United States Patent Application Publication US 2010/0120627 A1 - sequence listing, part 8

SEQ ID NO: 16410 - DNA, 721 bp, Homo sapiens
ctggatagtaaggatgtttatcttactctgtcttcattgtcctcaaacctcaagtagtcactaataccctggctatgacagcttttatcgtagtgttaaatggcagatttatttacttggcaaacattgtcaagtctcagaaaaattaccccatggtcttgccttcttccctcgtgaattgccttccactgatggagaggatttgatctgttccctgctcatcaatttttctagcttctttgggatgtccgctctgcatatctactaaggaattaagaaataatggcttcagcaagaaacaaggcaggaaagtgcagtgacatgaggaccatacagggaaggagctgtccccaaagcacgatgagccacttgaggccaggtacagccatggcgtgtatcccagagcacctgtgagaatgtctcacagacagtccgtctctcctgaatatgaagggatgggcaccagccggagccaccatccgtgtgactggcccgtggccgcctccagctcacacagaacctctgcacgcaacggaaaaaggtctcccctgggtgaatggggtgggaaacgtgtgcccctccaggcggctggtgagcagagtgctcccctcggcagggtgtgacttgtacagctccaccacgggccctgtaacaagacaggcttcgaccctgccctcttgcagctcgtatgtatgaggggcagcccaataaataaataagc

SEQ ID NO: 16411 - protein, 43 aa, Homo sapiens
MASARNKAGKCSDMRTIQGRSCPQSTMSHLRPGTAMACIPEHL

SEQ ID NO: 16412 - DNA, 674 bp, Homo sapiens
gagaggagcgagcgactcctgcgcaagcgcagagtgaagggccgggaacagtggagggtgcgaggaagacaatgggggaggaccctgaggcggcctctgtgagccgacaggaacacgtggtcgatcagagagagactcgaggttcgtgaacggatggggaggaccctgaaaagcactgtggaatacaggtttctagtaacttcaaaatcacatcatttggactggaacccaaagatgggatcttctgagaacatcagagaaacgctgcccttggcatcatcactgcaacaaaacatcaggatcttgaaccttggggtcataatctcacaactgagcagggtcactcttggaactctacatccattgaaacccttaaggtaaagctaatcagggaagtttctccccagaagaagatggcatccttgatgtgagcagctctttctgaagatcatggatcaagacttcttactatcatgagactcttatctttgaatgtttttccgttgcttccgcctctgtgaacaacagaagtgagaagggggtctgttttgtgcacttatggggtatacttttatttgtgaagggctttgcagccagctttatacatggataatcttataacttgatagataaagatgaaggcccagtgtatcataggtgagaaacttcaatgg

SEQ ID NO: 16413 - protein, 75 aa, Homo sapiens
MGRTLKSTVEYRFLVTSKSHHLDWNPKMGSSENIRETLPLASSLQQNIRILNLGVIISQLSRVTLGTLHPLKPLR

SEQ ID NO: 16414 - DNA, 721 bp, Homo sapiens
agcgcagagtgaagggccgggaacagtggagggtgcgaggaagacaatgggggaggaccctgaggcggcctctgtgagccgacaggaacacgtggtcgatcagagagagactcgaggttcgtgaacggatggggaggaccctgaaaagcactgtggaatacaggtttctagtaacttcaaaatcacatcatttggactgggtaagaattgctgaaactttaatgaaaagactgactggcttataaaactgctaacccaaatagaataaaaattaattgaataccgaggaaatgcttcaccaggtttgcatacttaatcagcctatactgaaattgtttagatatacaatttgaatgaactccatggtctaagtcaaattacctgtgataacccatcagttatccatgctatgtgcccaatttggagaaacaactggcacccaagaggacataagtccgatgttaagcatggactcatggagaaccaagatggctgccttgtccttcgtgagtccttaaagcttttgttattaaaagttatgcattccatgactcatcctggaaaagataaaatgatccaaattaaatatgttggtgtggtgacttacagattgttaaaatagtttataaacaatgtttagtttgtcaaacccatactcctgggaagtcaatcaaagcttcatgtacatttggctacctgatgaggcatttaaacatttata

SEQ ID NO: 16415 - protein, 70 aa, Homo sapiens
MCPIWRNNWHPRGHKSDVKHGLMENQDGCLVLRESLKLLLLKVMHSMTHPGKDKMIQIKYVGVVTYRLLK

SEQ ID NO: 16416 - DNA, 1066 bp, Homo sapiens
ggcttcaggtttaaaggcgcgagcgccacccacgcaggcacaagggctcctagtcgttttatttttagcgtaaggttttcctctttaacaaggaagtaaaaaaaaaagttgtgcaataaatattaatcgtccttatatgtactcgggaacgttcgtcctttaggttttctcctggcgcatgggcgccgccaatcatttcggggcttattttggttctaaagcccggggcagccaggcctccctgcctggcctcggcggggacgcgggacctggggccccggaccgggcctaaccgccctggccggtccccactgatggtggcggtcggtcctgatcgtcctgatggcagcgaccaggctggactcgggctgtgcaggggcgaggggagcagggcggggtgacgcccggagagcggcctggagagcgcgtgcttcagaaggcgtgggcaccctgtcccctttgcagatggggatgcaggccctggtggcggtggaggggagatgggggcagggacgttgccgggcagaggaagctggaagtttggctgctgtaactgactgggaagcttaaaataacagacaatcatctctcacatttatggggactgggaagtccaagaccaagttgccatctggggagggcctgttcctcacagcgccttccagctcaggcctcgtttataagggcactcaagccttccacgacaacgggtcctcatgacttactcacctcggaaagccccacccccaagaccatcacattgtgggtgatggcagagcataaggtgccttccccacatgctcgggttggcccagcgtctcacgctagcagctacgtggaatagttattttttctggagaactctgggacccctctgatgtcttggagcacccacacaggccgttcactgtgcacgctgtgaggctgtcgtcttggagcacccacacaggccgttcactgtgcacgtggtgaggctgtcctctggggagttctgctgttgtatgggttctgtctgtgtcaatgtcccagcgggaacgcagggcacactagcgtcatccccagaggg

SEQ ID NO: 16417 - protein, 75 aa, Homo sapiens [sequence omitted]

SEQ ID NO: 16418 - DNA, 5003 bp, Homo sapiens
ggcttcaggtttaaaggcgcgagcgccacccacgcaggcacaagggctcctagtcgttttatttttagcgtaaggttttcctctttaacaaggaagtaaaaaaaaaagttgtgcaataaatattaatcgtccttatatgtactcgggaacgttcgtcctttaggttttctcctggcgcatgggcgccgccaatcatttcggggcttattttggttctaaagcccggggcagccaggcctccctgcctggcctcggcggggacgcgggacctggggccccggaccgggcctaaccgccctggccggtccccactgatggtggcggtcggtcctgatcgtcctgatggcagcgaccaggctggactcgggctgtgcaggggcgaggggagcagggcggggtgacgcccggagagcggcctggagagcgcgtgcttcagaaggcgtgggcaccctgtcccctttgcagatggggatgcaggccctggtggcggtggaggggagatgggggcagggacgttgccgggcagaggaagctgggtgagtgtgcacttggtcccctttgctcctccctgggactttgggctctatagggcagcctccgaggcccacgtgcacactcggtgaaccacagtccagacacaggcagggcggcaggccagggaaggagaggccaggtgttggtgcatggagaggccaggtgttggcctgggggtgctaagtgaacccccaaggtcgcggagacagtagggcaacagcaaaacgagctctgccgtccagggcgagggcccggagtcctccccaggggtgggctgcagagaagcccctgtccaggccctgctcacctgcaaagtgctcccgagctcctgtgcccccagcagcaatcccagccccgctgacacccaagcttgtcacccgctgggtttcttgaggtctgaggaccgtggctgagggtgcatgggcgctgggatggagggggatgtcctgtcccagtctgtgcttattaattgttaaagagggcaaggctgcttttattcaaggtgggggggctgctaaagcgagatgttgggttaggggaggcagatccggctcaactccagatagaaaaagtgggaattgacagcccaggcgtagggtcgggagtggagagaaaattactaagaggaagggtcaggggcaaggcgggttctagctgcatagacaggatttttgctgaaaaggcaggcagtgtggtcacagaccgagggtgggagttgaggactttgatcagggaccaagagtagacgattttcactaaaccgactcagcaggattcttgctaaatcggccgaaaccggccaaggtcagggactggtcacagggagggctcagaggagcctgactcgagtgtggtcaaaggagagagtctttgtcatcttttaagaggcgagagtgacgtattagtgagaaacggtgaagggatcaagctcaggccagcagccccgagtttgagatgaggacaggctgggtccaggaagggctgcaggaatagggggcacctgagcctgcagaaagcggggagcccagccgccagagcaggcacccccaggcagacctcagtgtgtcctgccctgtgggagtggcaaggccagaccaagctggatgtgaaccagtcccagaacaccgcctagaatttggattgtaatttgttatcgatgatattgctgcttggtctctctcctcttcctccccacccccacccaagatggagtctggctttgtcccccaggctggagtgcgatggcaggatctcggctcactgcaacctccgcctcctgggttcaaacaattctcctgcctcagcctcccaaatagcggggattactggtgcgtgccaccacacccagctaatttttgtatttttggtagagacggggtttcatcatgttggccaggctagtctcaaactcctgacgtcgtgatccgcccacctcagcctcccgaaatgctttgggattacgggtgtgagccgccgcgccgagcatggccatcgtggctacatcagtcccggctaatagagattttagcacactcagattctattggctaataagatttaattataattctggggtatttaacaatgtcgttatacagtcttcattgttgcaaatggagaatgaaatcgggtgcatgtgacactaatatgacctgttcatgctctgtcacttaaacggagttaagtaacatagccctgagcaggaagactccttccccacttctgtccaggagctccttactcgattctggggaacagaaaggctttcagcggccaaggggagtgacaacagccagacatgagacacctcctagagccctttggtgttaccctttccggtccatcagccacagtgtccaccccaggtagctgggtcctgagttcaccgtctcaggacatttttcgacctggtttgtctgaattattattattattgatcattgagacagggtctcagtccatcgccaagactggagtgcagtggtgtgatcctggcttactcagcctcccaggctcaggtgatcctcccagctcagcctcctgcgtagctgggaccacaggcaggcaccaccatgcctggctaaattttttgtattttttgtagagaccagctctcgctatgttgtccaggttggtctcaaactgctgcctcagcctcccaaggtgctgggattacaggcatgagggaccaagctcagcaatctgaattatttatgcagaatttttttttctctagctggaagagctgtttatatgcacgtttctttgggggcaactcttctccattgtcacagattttttttttccaagccattcctgggggattcctgggagccatgtgggagaggcgtgaggaagtgagaccttcaccccgagacaggtcctgacacaccctctggtgcctctactcaagtgagaagtttggctgctgtaactgactgggaagcttaaaataacagacaatcatctctcacatttatggggactgggaagtccaagaccaagttgccatctggggagggcctgttcctcacagcgccttccagctcaggcctcgtttataagggcactcaagccttccacgacaacgggtcctcatgacttactcacctcggaaagccccacccccaagaccatcacattgtgggtgatggcagagcataaggtgccttccccacatgctcgggttggcccagcgtctcacgctagcagctacgtggaatagttattttttctggagaactctgggacccctctgatgtcttggagcacccacacaggccgttcactgtgcacgctgtgaggctgtcgtcttggagcacccacacaggccgttcactgtgcacgtggtgaggctgtcctctggggagttctgctgttgtatgggttctgtctgtgtcaatgtcccagcgggaacgcagggcacactagcgtcatccccagagggcttggtaaggggactgtttgcagagacataggcagagggctggaaaactaccaaaaaagtgcagtgttctggacctaataatagcagagctattctcaccctggtctgaaggcaggaggggaggagcagttaatggattctggaagtcaggttgcacagagtcaccttgaaagatgccatgaccttcaccgagggccagacagagactaagatgaccccataggagaataagacctagacctcatcctcctgcctcctgccagtccctgccaggggtcgccaatggcaaaacaggactggaagccagaggccatggaagcccatggatgaagtccacaggccagcctccccgagagcagcctggacggtccgcaggagacgtctcctgtcttaggcgtcccacgccgcgtgctcctgttcagccctgccgaggtggaagcttggagtggctcacggtggatgcattgacgctgcagacgccagcaagtgctacaaaccagagctggcctttaactcagactgatggagaaggtgttaataatgcagattagacttaaaagtgttgaagccattgcactgtgaacagcaaaaaaattgaagaactcttctggcatttaaaaacaattactcagttcagcagagaagtcactgacaaacgagatcacactgactgctttgtcgttttggttttgtcttactcattaatgcaaataagaacattcactagcatctgtgtcgggcctaccctccctggtcaaatacagctacagtctccctgcagaaacgagttttccagaaatgagccgatgttttctgcgagaatcaattggtcatatacaatttacaaaaatgagtactgtatactatatttgtaaactgtacactgcagatgctttatttcactgaaatttataatacacttatccatgtatatgcatgcatgcatttttgttcctgagatccagctgtgaaatgtttaccagcacataaattaccagcacatgctcttttttgttaacctactaggtaaaatcttcatttattacatcaaattcttgtagtttttgtattgcaattatgcagatattgattatcgcagtattactgcaattatacagataccacaatttcagatattgatcagcgtgttcagttggtttctaaggaggtttacttacctcatggtacacctagtttgcatagtttgattatatttaactcttatgctaattgggggaagtcattgatttattggacagatgcacctgtggtcttccctgagcacatcctggccaaggatgctgcccccaggagatttgagaagtcctgtaaggatcatatcagtattttcaaatacttatagaaaagccagagggattgacccagaattaccaatataagcttgaccctgagataacaatgccattttatgtttgcatgcataaaaccaatgcaagaggctgatgactccagatcccttatataagccaataaaaagtagtttcattttttatttcattta

SEQ ID NO: 16419 - protein, 101 aa, Homo sapiens
MRHLLEPFGVTLSGPSATVSTPGSWVLSSPSQDIFRPGLSELLLLLIIETGSQSIAKTGVQWCDPGLLSLPGSGDPPSSASCVAGTTGRHHHAWLNFLYFL

SEQ ID NO: 16420 - DNA, 402 bp, Homo sapiens
ggtccctggtgcagggggtggaggtcaggcaggccctgggcagctgattgctgcctgaagcccaccctgaggagggagggaggcaggggaggagacagaacagatcccttgggggaagcaaacccacattcccagacccaggagcgcccacgtcagggggctcccccgccacaagaggggccgtcccgggtgctttgagtggagtgagctagagagtcggatattagggccacctaggagagccggccttgtccatcgcctggccggggctggactgacgtgagctgtctccaagtccaggaggaaactcacaaactctgagctacacagcaggtatgagtcctgctgcaacacagtgcgctttaaaaagtgtgaataaattgaaacttcatgaaatagcct

SEQ ID NO: 16421 - protein, 70 aa, Homo sapiens
GGREAGEETEQIPWGKQTHIPRPRSAHVRGLPRHKRGRPGCFEWSELESRILGPPRRAGLVHRLAGAGLT

SEQ ID NO: 16422 - DNA, 2324 bp, Homo sapiens
gagaggctcggccaggcgggagctgcgctcggggcggccgctgcacctgcccgggaccccgccggccgctccccgcgcccaccccttccgcccttcgccccccccttccccccagccccggtctcccgggcgcggcgtgagagcagagcccggcccggaggagccgccccttccccgcccgcccgcccggcgcctggagaggagcgcgctgaggatcgggacgcctgcggccgccgccaccgcccaggcccgtcgcgccccggccgggatggacccacacgcccgatgagccccgcgccggcggctgcgagcgccgagcctccccctgctgcggccccagccgccccccgcgcgcccggctccgcggaccaggacccctgggctccccggctgagggcgcggccgctccggagaggccgagcggggacgggcccgagatggcgcggggacccagcgctccggcggcgggcgccctgcacgcggcccgggcccggggacagccccggagctggtagccgcccggcaccgatggaccttgacccgcgaggcggcgccgcgctcgtgcccagctgcagctagaggggcgcgcgggcagaacgcgctccaggcccgggccggcccgcgcggccatgaagatgatgctggtgcgccggttccgcgtgctcatcctgatggtgttcctggtggcctgcgcgctgcacatcgccctggacctgctgcccaggctggagcgacgcggcgcgcggccctcgggggagcccggctgttcgtgcgcgcagcccgccgccgaggtggccgcgcccggctgggcccaggttcggggccgccccggggagcccccggccgcctcctccgccgccggcgacgcgggctggcccaacaagcacacgctccgcatcctgcaggacttcagctccgacccctcctccaacctctcgtcccactcgctggagaaactgccgcccgcggccgagccggccgagcgcgccttgcgggggcgggatcccggcgccctaagaccccacgaccccgcgcaccggccgctgctgcgagaccccggcccgcgtcggtccgagtcgccccccggccccggcggagacgcctccctcctggccaggctgttcgagcacccgctttaccgggtggcggttccgccgctcacggaggaggacgtcctgttcaatgtgaacagcgacaccaggctcagccccaaagcggcggagaacccggactggccgcatgcgggtgctgaaggtgcagaattcctctcccccggggaggcggccgtggactcctatcccaactggctcaagttccacattggtatcaaccggtacgagctgtactccagacacaacccggccatcgaggccctgctgcacgacctcagctcccagaggatcaccagcgtggcaatctgcacgggcagcgaggagggacagagggctcgcgtctcgtgtgctctcacactggatgtgctcctgatctgccgcacgatgagcggggagacgcctggacagccggtccactgcgctctgcgtcctcacctgggtggtcccgggggtgccaactggatgacagagtccttccctcctggggtagaggaatagaggggtatctctggcggcggtgacccctccaccggaagcgtgtgcatggaactctcctgcttttctacacacgaccctggctgggtggggagacagccatgagcctgcttcttgtggttttgaagccgtccttcgtcagacctcagcaaggcgctgtgcagtttcatactgaggagacataggcagggctcaggacggaggcctgggcctcccagatggaggagtttgaaggcaacatctccaggtactttgggatctgctgaattggacaaaaaagggcatccagttgctgatttcaggaaaatatgccactgcagcttctgagcgtggaggtttggtgccattgttctcagcttgtaggcgattgtttgtgaaggtcccatttgtcaccagtgcttggagaggtagtgagggcggggctgaggccctttagtgggagcagctgctccccggggattgcagggagtgggcctgggtgcacacagctgtgggcaggtgcagaggccatgacagcctgaaggcagggctttctttgcgctgtgtgatgaggccagcagtcccaggcattagcttcatgtgtgtctcagaagcaaccttggtgctgaaagggtcccagcagcctggggttctgtccagttgctgacacaggacttaggtgtcccctttcaggccagcaggtaggttctcctgagctcttcggggctgtttctggct

SEQ ID NO: 16423 - protein, 326 aa, Homo sapiens [sequence omitted]

SEQ ID NO: 16424 - DNA, 675 bp, Homo sapiens
tcggggccgccccggggagcccccggccgcctcctccgccgccggcgacgcgggctggcccaacaagcacacgctccgcatcctgcaggacttcagctccgacccctcctccaacctctcgtcccactcgctggagaaactgccgcccgcggccgagccggccgagcgcgccttgcgggggcgggatcccggcgccctaagaccccacgaccccgcgcaccggccgctgctgcgagaccccggcccgcgtcggtccgagtcgccccccggccccggcggagacgcctccctcctggccaggctgttcgagcacccgctttaccgggtggcggttccgccgctcacggaggaggacgtcctgttcaatgtgaacagcgacaccaggctcagccccaaagcggcggagaacccggactggccgcatgcgggtgctgaaggtgcagaattcctctcccccggggaggcggccgtggactcctatcccaactggctcaagttccacattggtatcaaccggtacgagctgtactccagacacaacccggccatcgaggccctgctgcacgacctcagctcccagaggatcaccagcgtggccatgaagtcggggggcacgcagctgaagctcatcatgaccttccagaattacgggcaagcgctgttcaaacccatgaa

SEQ ID NO: 16425 - protein, 59 aa, Homo sapiens
MRVLKVQNSSPPGRRPWTPIPTGSSSTLVSTGTSCTPDTTRPSRPCCTTSAPRGSPAWP

SEQ ID NO: 16426 - DNA, 835 bp, Homo sapiens
ggcggcgttgggggtgcagcagctgcgcgcggcgcgggggcgggcgtggagggcggcgccgctgcagtgcggggacccgctcgctcgctcgccagccgtccccgcgccccgcgtccccgcgcagccgcctcctggcctcgggcgccgcgcatccaggaaggaagcagccaccctcgccatggcctccccgcccgcctgcccctcggaggaggacgagagcctgaagggctgtgagctgtacgtgcagctgcacgggatccagcaggtcctcaaagactgtatcgtccacctctgcatctccaagcccgaacgccccatgaagttcctccgggagcacttcgagaagctggagaaggaagaaaacaggcagattttggcgcggcaaaagtcaaactcacagtcggactcccatgatgaggaggtgtcgcccacccccccgaaccctgtggtgaaggcccgccgccggcgaggaggcgtgagtgccgaggtgtacaccgaggaggacgccgtgtcctacgtcaggaaggtgattcccaaggactacaaaaccatgactgcgctggccaaggccatctccaagaacgtgctcttcgctcacctggatgacaacgagaggaggaggtgggcagcccccgttgctcgcctgggaatcacagctgccttctccggcctccgggagggaggctttgccgtttctctgactcatgggccatggaatacagaacgctcggcgccaggagaagcgtgtcacagctctcaggaaacgtgggctcaccacgcaggggtggcttcccgaaatactatgctgcgtgcacctgccctgctgccgagctga

SEQ ID NO: 16427 - protein, 218 aa, Homo sapiens
MASPPACPSEEDESLKGCELYVQLHGIQQVLKDCIVHLCISKPERPMKFLREHFEKLEKEENRQILARQKSNSQSDSHDEEVSPTPPNPVVKARRRRGGVSAEVYTEEDAVSYVRKVIPKDYKTMTALAKAISKNVLFAHLDDNERRRWAAPVARLGITAAFSGLREGGFAVSLTHGPWNTERSAPGEACHSSQETWAHHAGVASRNTMLRAPALLPS

SEQ ID NO: 16428 - DNA, 739 bp, Homo sapiens
ggaacgggcgtgcttgctgggtaccgggtgtcctgcagaggcagggatgtgatcccctaggaaggaagcagccaccctcgccatggcctccccgcccgcctgcccctcggaggaggacgagagcctgaagggctgtgagctgtacgtgcagctgcacgggatccagcaggtcctcaaagactgtatcgtccacctctgcatctccaagcccgaacgccccatgaagttcctccgggagcacttcgagaagctggagaaggaagaaaacaggcagattttggcgcggcaaaagtcaaactcacagtcggactcccatgatgaggaggtgtcgcccacccccccgaaccctgtggtgaaggcccgccgccggcgaggaggcgtgagtgccgaggtgtacaccgaggaggacgccgtgtcctacgtcaggaaggtgattcccaaggactacaaaaccatgactgcgctggccaaggccatctccaagaacgtgctcttcgctcacctggatgacaacgagaggaggaggtgggcagcccccgttgctcgcctgggaatcacagctgccttctccggcctccgggagggaggctttgccgtttctctgactcatgggccatggaatacagaacgctcggcgccaggagaagcgtgtcacagctctcaggaaacgtgggctcaccacgcaggggtggcttcccgaaatactatgctgcgtgcacctgccctgctgccgagctga

SEQ ID NO: 16429 - protein, 218 aa, Homo sapiens; identical to SEQ ID NO: 16427

SEQ ID NO: 16430 - DNA, 753 bp, Homo sapiens
gggagtgaggtgagtgagggccaagcaggaacaggggtcacggggcaaggagcacgtggcagcgcaggaaacaggaaggaagcagccaccctcgccatggcctccccgcccgcctgcccctcggaggaggacgagagcctgaagggctgtgagctgtacgtgcagctgcacgggatccagcaggtcctcaaagactgtatcgtccacctctgcatctccaagcccgaacgccccatgaagttcctccgggagcacttcgagaagctggagaaggaagaaaacaggcagattttggcgcggcaaaagtcaaactcacagtcggactcccatgatgaggaggtgtcgcccacccccccgaaccctgtggtgaaggcccgccgccggcgaggaggcgtgagtgccgaggtgtacaccgaggaggacgccgtgtcctacgtcaggaaggtgattcccaaggactacaaaaccatgactgcgctggccaaggccatctccaagaacgtgctcttcgctcacctggatgacaacgagaggaggaggtgggcagcccccgttgctcgcctgggaatcacagctgccttctccggcctccgggagggaggctttgccgtttctctgactcatgggccatggaatacagaacgctcggcgccaggagaagcgtgtcacagctctcaggaaacgtgggctcaccacgcaggggtggcttcccgaaatactatgctgcgtgcacctgccctgctgccgagctga

SEQ ID NO: 16431 - protein, 218 aa, Homo sapiens; identical to SEQ ID NO: 16427

SEQ ID NO: 16432 - DNA, 668 bp, Homo sapiens
caggaaggaagcagccaccctcgccatggcctccccgcccgcctgcccctcggaggaggacgagagcctgaagggctgtgagctgtacgtgcagctgcacgggatccagcaggtcctcaaagactgtatcgtccacctctgcatctccaagcccgaacgccccatgaagttcctccgggagcacttcgagaagctggagaagtgttgttacgaagatggctttggcctggaaagcctgtcccggccccacgacctcgaccgtcctgcagctcagacaatgcatcagtatgaaaacaggagacaggaagtgggggctgcaaaatgagaggctttcccggaatcccaagaggggaaggggaagagcagcctggcatgtgcacaggcagagcccgtgagaggtcacccccatgcagccctggggaggggccctgctcgctgtccccctttctcccaaggcctcctgaagcggcctgtgtgtatggaaccacctgtatcctgcctagtctgattcttcacctgccaaagatgggaagtcccgtcgagcctggacaggcaaagctctttcagccaagagactgggaccccaacctcgttccttgaagagaagcggcttctggttcctgcaaagggagagcccagggtccttgccggagccgtgaggccctggg

SEQ ID NO: 16433 - protein, 99 aa, Homo sapiens
MASPPACPSEEDESLKGCELYVQLHGIQQVLKDCIVHLCISKPERPMKFLREHFEKLEKCCYEDGFGLESLSRPHDLDRPAAQTMHQYENRRQEVGAAK

SEQ ID NO: 16434 - DNA, 331 bp, Homo sapiens
ggccaggcattcacgtccacctgggccaaatagtgacacctcgtcgctacaaagaaatattaaaacttagctggatgcagtgactcacacctgtagtcccagctcagggagcatacggacgttgcgcagtgaatgcagctggctggggaaggctcaggaaccgcacccaggaagcccacctacagatcccacctcaaaccacgacatgctgcagcctccccagtggccagagcagcttaacaaagcatctttgtttcctttctgcaccccagaaaatagctgtgttggtctcttcgccatgcagagtgaataaagaataagacaaacacca

SEQ ID NO: 16435 - protein, 35 aa, Homo sapiens
MQLAGEGSGTAPRKPTYRSHLKPRHAAASPVARAA

SEQ ID NO: 16436 - DNA, 1836 bp, Homo sapiens
gagatggagtcttgctctgtcacccaggctggagtgcggtggcatgatattggctcactacaacctccacctcctgggttcaggcaattctcgtgcctcagcctccccgagtagctgggattacaggtacccaccaccacacccagctggctaatttttctatttttagtagagatggggtttcaccatgttatccaggctggtttcaaactcctgaccacaggtgatctgcctgccttggcctcacaaagtgctgggatgacaggcgtgagccaccgcgcctggctaatttttgtatttttagtagagatggggtttcaccatgttgtccaggctggtttcaaactcctgacctcaggtgatctgcccgccttggcctcacaaagtgctgggatgacaggcgtgagccaccgcgcccagctggttcttatgactctgctttaaaattcttggcagatgattccaacatgtgacctatcttggaatttacatccgttaccttaccatgttcaggttgtggctttccttgttcttggtatgacaagtgatctccagatgtatcctggacatttgggttacgatgtttgcagactccttgtcctactctattccaccaggcagttgctctgttcaggtccagggtgtagattgcagcctgtttttgtggtctgtcattccaacagcagtttcgtcttcagagccctggcactgccctcctcgtctgctttattcttctggctctcctgggactgctgctcatttcccatgggtgctgcctgcaggggtgaaaggtacctccctgggccgcctggtgtcactgggctaccttttgctgtgtcaggacagaacatgctcgttctgggtctctttgtgctaagagaggaagggcagatttcaggctcctctgacactacctgtgcagtgcagactgtccactcgaaccccagttgcacagcacaggttaatgcacctgcagcagctttaaaatcggccctgaaagcagactgtggggtgaaggtggcagctaccctctaggtctctgttgggcgtcccctttcccagggctttggccagagagaggaggctttccttggagaatttctgtctgtgcctgttggctgttctgggccacaggcttccctggggactagtgcaggaacatgccatcatgtaagatgtgacttgctccttcccgccttcggccatcattgtgaggcctccccagccatgtggaactgtgagtccagtaaacctttccctgtataagttacccagtctcggccatgtctttattagcagcgtgaaaatggactaatacactgtgtttacttattcttcatatttcacctctgctaccatttgttcagggaagccttaaaagtctagttcaacatcccttgacactcattctctcaggaccaccacggttaaacacatactaatttatccttccattaagggctatctcatcctgcaagaccctaagatctgggagagcagggaccatggccagtttctacatcattgtcatcctgtcccacatgttgcagacagtgcctggtcaaacaaatgcctgttggaggaaacaatgaatgaaggttactgaatatgctacataacaacttttcagaagtactgatgggccgggcgtggtcgtgggcacctgcagtcccagctacttgggaggctgaggcaggagaatggcatgaacctgggaggcagagtctgcagtgagcggagatcgcgccactgcactccaggctgggcgacagagcaagattccatctcaaaaaaaaaaaaaaaagacgtaccgacaaacaccaccattttgcaaca

SEQ ID NO: 16437 - protein, 41 aa, Homo sapiens
MLHNNFSEVLMGRAWSWAPAVPATWEAEAGEWHEPGRQSLQ

SEQ ID NO: 16438 - DNA, 2317 bp, Homo sapiens
agtcggcagctgctcagctttgctgcagttttcctgctcgatgtgtgctgctggtgaggccaccaggcctgttcttgtcaagagagaccttccgggaacaacagatgttacaggagagactggggatgcatggacagcttttcagagatgagtccggcgggcggtggcctccgtggtgggcggctggctgctgtgtctgcgtgaccgttactccttcttccacaagctcatccctctgctgctcagtagcctcaacgacgaggtgcctgaggtcaggcagctggctgccagcctctgggaggacgttggcctgcagtggcagaaggagaatgaggaggacctgaaggacaagctggactttgcccctcccaccccaccccattaccctccacatgagcgccgccctgtgctgggctgccgggagctcgtcttcaggaacctctccaagatcctccctgccctgtgccacgacatcaccgactgggtggtggggacccgagtgaagtcggcacagctgctcccagtgctgctgctgcatgccgaggaccacgccacgcagcacctggaggtcgtcctccggaccctgttccaggcctgcaccgacgaggaggcagccgtggtccaaagttgtaccagatccgcagagctcgtcgggacgtttgtcagccctgaggtgtttctgaagctgatcttatcgacgctgaagaagacgccctctgcctccggcctcctggtgctggcctccgccatgcggggttgcccccgagaagccctccagccgcacctggcagccatcgccacagagctggcacaggcccacatctgccaggcatctgaaaacgacctctacctggagcgcctgctgctgtgtgtgcaggctctggtgtctgtgtgtcatgaggactgtggcgtggccagcctgcagctcttggacgtgctgctgacaatagtggccctcgcaggtgctaccggcctgagggacaaggcacaggagacgatggactcactggccatggtggagggtgtcagcagctgccaggacctctaccgcaagcacattggtcccctcctggagcgggtgaccgcgtcgcaccttgactggaccgcacactcgccggagctcctgcagttcagtgtcatcgtcgcacagtcaggccctgccctgggagaagccctgccacacgtcgtgcccacgctgagggcctgtctgcagccctcccaagacccgcagatgcgcctgaagctgttctccatcctgtccaccgcgctgctcagagccacggacaccatcaactcccaggggcagtttcccagctacctcgagacggtgacaaaggacatcctggcccccaatctgcagtggcatgcggggaggacagccgcggccatccgcacggctgccgtgtcctgcctctgggcgctcaccagcagcgaggtcctgtcggcagagcagatacgggacgtgcaggaaacactgatgccccaggtcctgaccaccctggaggaggattcgaagatgacgcgactgatctcatgccgtattatcaacacgttcttaaaaacctcgggcggcatgacggatccagagaaactcatcaagatttatcctgaactcttaaaacgcctagatgacgtgtccaacgatgtgaggatggcagccgcctccaccttggtcacctggctgcagtgtgtcaagggtgccaacgcaaaatcctactatcagagcagtgtccagtacctgtaccgagagttgctggttcaccttgacgatccagagagggccatccaggatgcaattttagaggtcctcaaagagggcagcgggctgttcccagatctcctggtgagggagacggaggccgtcatccacaagcaccgctcggccacctactgcgagcagctcctgcagcatgtgcaggccgtgccagccacacagtgaccacgctggtttcagccacggcacacccttgtccccacctgagccagagtttgtggcctttaaatctcataaacaaggcacctctgtgccagcagtgagactgtgacagcaagaatgtactcctcaggacacctgcccgctctttccctggaataacagcctctgagtggattctgcatgttatgtgatttgttctgttcatcgagagggctcccaaacatctgcagctgatttgaaattaaaagtaagtcgcagccgctcctcccgcagccacttcagcagcatcttagattttaagcctcacgtgcgcagctggttcatgaactattggctgcatcctgcttaggtgcccaccaagaaggtttttacctacttaac

SEQ ID NO: 16439 - protein, 396 aa, Homo sapiens [sequence omitted]

SEQ ID NO: 16440 - DNA, 2761 bp, Homo sapiens
agtcggcagctgctcagctttgctgcagttttcctgctcgatgtgtgctgctggtgaggccaccaggcctgttcttgtcaagagagaccttccgggaacaacagatgttacaggagagactggggatgcatggacagcttttcagagatgagtccggcgggcggtggcctccgtggtgggcggctggctgctgtgtctgcgtgaccgttactccttcttccacaagctcatccctctgctgctcagtagcctcaacgacgaggtgcctgaggtcaggcagctggctgccagcctctgggaggacgttggcctgcagtggcagaaggagaatgaggaggacctgaaggacaagctggactttgcccctcccaccccaccccattaccctccacatgagcgccgccctgtgctgggctgccgggagctcgtcttcaggaacctctccaagatcctccctgccctgtgccacgacatcaccgactgggtggtggggacccgagtgaagtcggcacagctgctcccagtgctgctgctgcatgccgaggaccacgccacgcagcacctggaggtcgtcctccggaccctgttccaggcctgcaccgacgaggaggcagccgtggtccaaagttgtaccagatccgcagagctcgtcgggacgtttgtcagccctgaggtgtttctgaagctgatcttatcgacgctgaagaagacgccctctgcctccggcctcctggtgctggcctccgccatgcggggttgcccccgagaagccctccagccgcacctggcagccatcgccacagagctggcacaggcccacatctgccaggcatctgaaaacgacctctacctggagcgcctgctgctgtgtgtgcaggctctggtgtctgtgtgtcatgaggactgtggcgtggccagcctgcagctcttggacgtgctgctgacaatagtggccctcgcaggtgctaccggcctgagggacaaggcacaggagacgatggactcactggccatggtggagggtgtcagcagctgccaggacctctaccgcaagcacattggtcccctcctggagcgggtgaccgcgtcgcaccttgactggaccgcacactcgccggagctcctgcagttcagtgtcatcgtcgcacagtcaggccctgccctgggagaagccctgccacacgtcgtgcccacgctgagggcctgtctgcagccctcccaagacccgcagatgcgcctgaagctgttctccatcctgtccaccgcgctgctcagagccacggacaccatcaactcccaggggcagtttcccagctacctcgagacggtgacaaaggacatcctggcccccaatctgcagtggcatgcggggaggacagccgcggccatccgcacggctgccgtgtcctgcctctgggcgctcaccagcagcgaggtcctgtcggcagagcagatacgggacgtgcaggaaacactgatgccccaggtcctgaccaccctggaggaggattcgaagatgacgcgactgatctcatgccgtattatcaacacgttcttaaaaacctcgggcggcatgacggatccagagaaactcatcaagatttatcctgaactcttaaaacgcctagatgacgtgtccaacgatgtgaggatggcagccgcctccaccttggtcacctggctgcagtgtgtcaagggtgccaacgcaaaatcctactatcagagcagtgtccagtacctgtaccgagagttgctggttcaccttgacgatccagagagggccatccaggatgcaattttagaggtcctcaaagagggcagcgggctgttcccagatctcctggtgagggagacggaggccgtcatccacaagcaccgctcggccacctactgcgagcagctcctgcagcatgtgcaggccgtgccagccacacagtgaccacgctggtttcagccacggcacacccttgtccccacctgagccagagtttgtggcctttaaatctcataaacaaggcacctctgtgccagcagtgagactgtgacagcaagaatgtactcctcaggacacctgcccgctctttccctggaataacagcctctgagtggattctgcatgttatgtgatttgttctgttcatcgagagggctcccaaacatctgcagctgatttgaaattaaaagtaagtcgcagccgctcctcccgcagccacttcagcagcatcttagattttaagcctcacgtgcgcagctggttcatgaactattggctgcatcctgcttaggtgcccaccaagaaggtttttacctacttaacaaaaaagaaagaagccaaagtgattagaaagaaatgaaatctctttttgggttctgtctactgaaatttaatatctcagtgaacagactaaaaggaatttagaatcctaacaacttaccagatttctcctgttttaaatatactgggactttaaaggttatatgtccggtcaccgtatgttttaagtcggtgttaatgctaacagtgttgaaaacaatatttcatgagatctaattgtggttgcccctataggtagcaggaaagtaaagttgcatttccctctcgcacattctacacccaagtgcctaaaagatctcattgtaagtgggtagtgttaccggaagccattgtgttcacacgggggaaatgccgtatatatttttcaacaaatattaacgtttatactttcatgtttgaaaatttaattaaaaatatttgttttaa

SEQ ID NO: 16441 - protein, 396 aa, Homo sapiens [sequence omitted]

SEQ ID NO: 16442 - DNA, 685 bp, Homo sapiens
gctggagtgcagtggtacgatcacagctcactgtagcctcaaacttctgggatcaagtgatttttctgccttagcctcctgatgctgggattaacaggcataagccaccatgcctggtttaaaactgcatttcccaatgatgattatgttctctgagccccatctgagcgcacacatgtgtggtgctctcgggagtcgggggcacagcctcaaatataatacaatatttccaacatcgtgtccttggaatacagatgatttttattttcttctttatttttttctatgtttttctaagctttctctaatgagcatgcactactgtaataaacagaagacaaaaggattaaaacaattttttaataggagaaatttttaaatttctcatttacaaaagttctatgagaagataccttttaaattttaattattttaaacatacagaaagggataatttctaaactttgagaggatgggggatctacaaagacattgatttgactatatacatttgaaccaaaataaaaggaacatagacttaggaaaatatttgcaataaggatgacagtgtgagatctttgttacataaagctgacacaaaatgagaacaaaagcattaagagttgggcacggtggctcacgcctataatctcagcactctgagtccataaccgagcagcctgct

SEQ ID NO: 16443 - protein, 89 aa, Homo sapiens
MPGLKLHFPMMIMFSEPHLSAHMCGALGSRGHSLKYNTIFPTSCPWNTDDFYFLLYFFLCFSKLSLMSMHYCNKQKTKGLKQFFNRRNF

SEQ ID NO: 16444 - DNA, 1907 bp, Homo sapiens
agacacgtggtccgggtggaagtgtccctgctgcgagcaggagctcacgctgggagggcagacacatggtcccgtggaagtgtccctgctgcaagcaggagcgctagtgctgggagggcggacacgtggctccgggcagaagtgtccgccagcaggagcgctcgtgcttggaaggtagacacgtggcccgggcggaagtatccttgcagcgagcaggagctggcgctgggagggcagacacgtggtccgggcggaagtgtccgtgcagccagcgggagctcgcgctgggagcggagacaggccctgccctgggagaagccctgccacacgtcgtgcccacgctgagggcctgtctgcagccctcccaagacccgcagatgcgcctgaagctgttctccatcctgtccaccgcgctgctcagagccacggacaccatcaactcccaggggcagtttcccagctacctcgagacggtgacaaaggacatcctggcccccaatctgcagtggcatgcggggaggacagccgcggccatccgcacggctgccgtgtcctgcctctgggcgctcaccagcagcgaggtcctgtcggcagagcagatacgggacgtgcaggaaacactgatgccccaggtcctgaccaccctggaggaggattcgaagatgacgcgactgatctcatgccgtattatcaacacgttcttaaaaacctcgggcggcatgacggatccagagaaactcatcaagatttatcctgaactcttaaaacgcctagatgacgtgtccaacgatgtgaggatggcagccgcctccaccttggtcacctggctgcagtgtgtcaagggtgccaacgcaaaatcctactatcagagcagtgtccagtacctgtaccgagagttgctggttcaccttgacgatccagagagggccatccaggatgcaattttagaggtcctcaaagagggcagcgggctgttcccagatctcctggtgagggagacggaggccgtcatccacaagcaccgctcggccacctactgcgagcagctcctgcagcatgtgcaggccgtgccagccacacagtgaccacgctggtttcagccacggcacacccttgtccccacctgagccagagtttgtggcctttaaatctcataaacaaggcacctctgtgccagcagtgagactgtgacagcaagaatgtactcctcaggacacctgcccgctctttccctggaataacagcctctgagtggattctgcatgttatgtgatttgttctgttcatcgagagggctcccaaacatctgcagctgatttgaaattaaaagtaagtcgcagccgctcctcccgcagccacttcagcagcatcttagattttaagcctcacgtgcgcagctggttcatgaactattggctgcatcctgcttaggtgcccaccaagaaggtttttacctacttaacaaaaaagaaagaagccaaagtgattagaaagaaatgaaatctctttttgggttctgtctactgaaatttaatatctcagtgaacagactaaaaggaatttagaatcctaacaacttaccagatttctcctgttttaaatatactgggactttaaaggttatatgtccggtcaccgtatgttttaagtcggtgttaatgctaacagtgttgaaaacaatatttcatgagatctaattgtggttgcccctataggtagcaggaaagtaaagttgcatttccctctcgcacattctacacccaagtgcctaaaagatctcattgtaagtgggtagtgttaccggaagccattgtgttcacacgggggaaatgccgtatatatttttcaacaaatattaacgtttatactttcatgtttgaaaatttaattaaaaatatttgttttaa

SEQ ID NO: 16445 - protein, 235 aa, Homo sapiens [sequence omitted]

SEQ ID NO: 16446 - DNA, 1970 bp, Homo sapiens
gacacgtggtccgggcggaagtgtctgtgctgcgagtaggcgctccggctgggagggcagacacgtggtccgggcggaagtgtccgtgcagcgagcaggagctcgcgctgggagggcagacaagtggtccagtggaagtgtccgtgctgcaagcaggagcgctagtgctgggagggcggacacgtggcccaggcggaagtgtccacgcctacctcgagcaggagcgctcatgctgggaaggcagatgggtggcccgggcagaagtgtctgtgctgcaagcaggagcgctcatgctgggaaggcagacacgtggcccaggcgtcaggtttgaacattcttgacagcaagtggctcacccgtcagcgtgctgctttttcccatcccaggagttggacttgacctgtggacatttggctgttttctttttgtttttaagccagaaacactgtcttgtttccagtttaagatgtagagagggtgaaacagtcagaaactgggtcagaagcagcgtggttctcgtggcagggcggcacttggcccaagactcgtgctttggcgggaggctcaagtcaggcgtcccagcagcttcggtgcaacgcctcctgcccggctgcgtggggaggccctccaagacaccagctggtctcaccgcgaggcctgacttcgagccagagcagcgagtacattgcgtctccgtgtggcaagggcaggtgcgggggtctcagtccactaccgagcagcctgctctgatgactggcggcgccagggagaagggtcacatcgcgaggtccccagcaacggctcaaggccctgccctgggagaagccctgccacacgtcgtgcccacgctgagggcctgtctgcagccctcccaagacccgcagatgcgcctgaagctgttctccatcctgtccaccgcgctgctcagagccacggacaccatcaactcccaggggcagtttcccagctacctcgagacggtgacaaaggacatcctggcccccaatctgcagtggcatgcggggaggacagccgcggccatccgcacggctgccgtgtcctgcctctgggcgctcaccagcagcgaggtcctgtcggcagagcagatacgggacgtgcaggaaacactgatgccccaggtcctgaccaccctggaggaggattcgaagatgacgcgactgatctcatgccgtattatcaacacgttcttaaaaacctcgggcggcatgacggatccagagaaactcatcaagatttatcctgaactcttaaaacgcctagatgacgtgtccaacgatgtgaggatggcagccgcctccaccttggtcacctggctgcagtgtgtcaagggtgccaacgcaaaatcctactatcagagcagtgtccagtacctgtaccgagagttgctggttcaccttgacgatccagagagggccatccaggatgcaattttagaggtcctcaaagagggcagcgggctgttcccagatctcctggtgagggagacggaggccgtcatccacaagcaccgctcggccacctactgcgagcagctcctgcagcatgtgcaggccgtgccagccacacagtgaccacgctggtttcagccacggcacacccttgtccccacctgagccagagtttgtggcctttaaatctcataaacaaggcacctctgtgccagcagtgagactgtgacagcaagaatgtactcctcaggacacctgcccgctctttccctggaataacagcctctgagtggattctgcatgttatgtgatttgttctgttcatcgagagggctcccaaacatctgcagctgatttgaaattaaaagtaagtcgcagccgctcctcccgcagccacttcagcagcatcttagattttaagcctcacgtgcgcagctggttcatgaactattggctgcatcctgcttaggtgcccaccaagaaggtttttacctacttaac

SEQ ID NO: 16447 - protein, 280 aa, Homo sapiens [sequence omitted]

SEQ ID NO: 16448 - DNA, 2414 bp, Homo sapiens
gacacgtggtccgggcggaagtgtctgtgctgcgagtaggcgctccggctgggagggcagacacgtggtccgggcggaagtgtccgtgcagcgagcaggagctcgcgctgggagggcagacaagtggtccagtggaagtgtccgtgctgcaagcaggagcgctagtgctgggagggcggacacgtggcccaggcggaagtgtccacgcctacctcgagcaggagcgctcatgctgggaaggcagatgggtggcccgggcagaagtgtctgtgctgcaagcaggagcgctcatgctgggaaggcagacacgtggcccaggcgtcaggtttgaacattcttgacagcaagtggctcacccgtcagcgtgctgctttttcccatcccaggagttggacttgacctgtggacatttggctgttttctttttgtttttaagccagaaacactgtcttgtttccagtttaagatgtagagagggtgaaacagtcagaaactgggtcagaagcagcgtggttctcgtggcagggcggcacttggcccaagactcgtgctttggcgggaggctcaagtcaggcgtcccagcagcttcggtgcaacgcctcctgcccggctgcgtggggaggccctccaagacaccagctggtctcaccgcgaggcctgacttcgagccagagcagcgagtacattgcgtctccgtgtggcaagggcaggtgcgggggtctcagtccactaccgagcagcctgctctgatgactggcggcgccagggagaagggtcacatcgcgaggtccccagcaacggctcaaggccctgccctgggagaagccctgccacacgtcgtgcccacgctgagggcctgtctgcagccctcccaagacccgcagatgcgcctgaagctgttctccatcctgtccaccgcgctgctcagagccacggacaccatcaactcccaggggcagtttcccagctacctcgagacggtgacaaaggacatcctggcccccaatctgcagtggcatgcggggaggacagccgcggccatccgcacggctgccgtgtcctgcctctgggcgctcaccagcagcgaggtcctgtcggcagagcagatacgggacgtgcaggaaacactgatgccccaggtcctgaccaccctggaggaggattcgaagatgacgcgactgatctcatgccgtattatcaacacgttcttaaaaacctcgggcggcatgacggatccagagaaactcatcaagatttatcctgaactcttaaaacgcctagatgacgtgtccaacgatgtgaggatggcagccgcctccaccttggtcacctggctgcagtgtgtcaagggtgccaacgcaaaatcctactatcagagcagtgtccagtacctgtaccgagagttgctggttcaccttgacgatccagagagggccatccaggatgcaattttagaggtcctcaaagagggcagcgggctgttcccagatctcctggtgagggagacggaggccgtcatccacaagcaccgctcggccacctactgcgagcagctcctgcagcatgtgcaggccgtgccagccacacagtgaccacgctggtttcagccacggcacacccttgtccccacctgagccagagtttgtggcctttaaatctcataaacaaggcacctctgtgccagcagtgagactgtgacagcaagaatgtactcctcaggacacctgcccgctctttccctggaataacagcctctgagtggattctgcatgttatgtgatttgttctgttcatcgagagggctcccaaacatctgcagctgatttgaaattaaaagtaagtcgcagccgctcctcccgcagccacttcagcagcatcttagattttaagcctcacgtgcgcagctggttcatgaactattggctgcatcctgcttaggtgcccaccaagaaggtttttacctacttaacaaaaaagaaagaagccaaagtgattagaaagaaatgaaatctctttttgggttctgtctactgaaatttaatatctcagtgaacagactaaaaggaatttagaatcctaacaacttaccagatttctcctgttttaaatatactgggactttaaaggttatatgtccggtcaccgtatgttttaagtcggtgttaatgctaacagtgttgaaaacaatatttcatgagatctaattgtggttgcccctataggtagcaggaaagtaaagttgcatttccctctcgcacattctacacccaagtgcctaaaagatctcattgtaagtgggtagtgttaccggaagccattgtgttcacacgggggaaatgccgtatatatttttcaacaaatattaacgtttatactttcatgtttgaaaatttaattaaaaatatttgttttaa

SEQ ID NO: 16449 - protein, 280 aa, Homo sapiens [sequence omitted]

SEQ ID NO: 16450 - DNA, 529 bp, Homo sapiens
ttgttgggaattcactcactttttaaaacaggagctggcggaaaggctgcacgcgtttgggcatctgagcgcatttgggcatctgggccacggccccctgtttattttcactacaaaaggttccttgagaggccccttgcctattagtgccagctctgggcttcccagggtgaagtgttggatgaatcatggcctccttggtggggaaggaaggatgtcctgagttgggagcacagacatccaggcctcccaggacagacagacacaaacatgaacagcagacaggccagcgtgagccgattctgcctggcttagtcgtgcatgaaaggaaccctaaactggtacaaaagtggacctgcaggccatccagggagtgaccatcgtaaaaacacaatagccagtgccactctgtgtacttccatagtcgaccgcgccagcaggaggcctcggaggatcctgtccgggcccatagatgtttgctagcgggacaagcttggaactcttaaaacgcctagatgacgtgtccaac

SEQ ID NO: 16451 - protein, 62 aa, Homo sapiens [sequence omitted]

SEQ ID NO: 16452 - DNA, 756 bp, Homo sapiens
tgaaatgtctgctctagactcacacacctgtctcgctccctccttccagaactcttaaaacgcctagatgacgtgtccaacgatgtgaggatggcagccgcctccaccttggtcacctggctgcagtgtgtcaagggtgccaacgcaaaatcctactatcagagcagtgtccagtacctgtaccgagagttgctggttcaccttgacgatccagagagggccatccaggatgcaattttagaggtcctcaaagagggcagcgggctgttcccagatctcctggtgagggagacggaggccgtcatccacaagcaccgctcggccacctactgcgagcagctcctgcagcatgtgcaggccgtgccagccacacagtgaccacgctggtttcagccacggcacacccttgtccccacctgagccagagtttgtggcctttaaatctcataaacaaggcacctctgtgccagcagtgagactgtgacagcaagaatgtactcctcaggacacctgcccgctctttccctggaataacagcctctgagtggattctgcatgttatgtgatttgttctgttcatcgagagggctcccaaacatctgcagctgatttgaaattaaaagtaagtcgcagccgctcctcccgcagccacttcagcagcatcttagattttaagcctcacgtgcgcagctggttcatgaactattggctgcatcctgcttaggtgcccaccaagaaggtttttacctacttaac

SEQ ID NO: 16453 - protein, 95 aa, Homo sapiens [sequence omitted]

SEQ ID NO: 16454 - DNA, 1200 bp, Homo sapiens
tgaaatgtctgctctagactcacacacctgtctcgctccctccttccagaactcttaaaacgcctagatgacgtgtccaacgatgtgaggatggcagccgcctccaccttggtcacctggctgcagtgtgtcaagggtgccaacgcaaaatcctactatcagagcagtgtccagtacctgtaccgagagttgctggttcaccttgacgatccagagagggccatccaggatgcaattttagaggtcctcaaagagggcagcgggctgttcccagatctcctggtgagggagacggaggccgtcatccacaagcaccgctcggccacctactgcgagcagctcctgcagcatgtgcaggccgtgccagccacacagtgaccacgctggtttcagccacggcacacccttgtccccacctgagccagagtttgtggcctttaaatctcataaacaaggcacctctgtgccagcagtgagactgtgacagcaagaatgtactcctcaggacacctgcccgctctttccctggaataacagcctctgagtggattctgcatgttatgtgatttgttctgttcatcgagagggctcccaaacatctgcagctgatttgaaattaaaagtaagtcgcagccgctcctcccgcagccacttcagcagcatcttagattttaagcctcacgtgcgcagctggttcatgaactattggctgcatcctgcttaggtgcccaccaagaaggtttttacctacttaacaaaaaagaaagaagccaaagtgattagaaagaaatgaaatctctttttgggttctgtctactgaaatttaatatctcagtgaacagactaaaaggaatttagaatcctaacaacttaccagatttctcctgttttaaatatactgggactttaaaggttatatgtccggtcaccgtatgttttaagtcggtgttaatgctaacagtgttgaaaacaatatttcatgagatctaattgtggttgcccctataggtagcaggaaagtaaagttgcatttccctctcgcacattctacacccaagtgcctaaaagatctcattgtaagtgggtagtgttaccggaagccattgtgttcacacgggggaaatgccgtatatatttttcaacaaatattaacgtttatactttcatgtttgaaaatttaattaaaaatatttgttttaa

SEQ ID NO: 16455 - protein, 95 aa, Homo sapiens [sequence omitted]

SEQ ID NO: 16456 - DNA, 2436 bp, Homo sapiens
ctatgtgcatttctctgaggagcggtgctggtgggcaccttttcagacgcctgtttgtcatttccatgctgtcttttgagagctgtctgttcaggtcttttacccatttttaattggattattagattgtctgctattgagcctgagctcctcatatattccagtgattaatccttgtcaggcggcggttctaagatacagtctcccatcccgtacccgcgggctgtccctgcggctgtactctgctcattcttccctttgctgtgtggaagctttgggcctggatgtgctgactttgccttttgcctcctttggaaaatacttagaccttccccgcgcagctgcgtccggtttcccggcgtggctacatccggttatgcgataaactcggatcttcgtggcgtggccgcctcccgacacgcggcgtcagaaactcggatcttcctggcgtggccgcctcccgtcgcgcggcgtcagaaactcggatcttcgcggcgtggccacctcccgacacgcggcatcagaaactcggatcttcctggcgtggccgcctcccgtcacgcggcgtcagaaactcggctcttcgcggcgtggccgcctcccgtcacgcggcgtcagaaactcgcatcttcccggcgtggccgcctcccgtcacgcggcgtcagaaactcgcatcttcccggcgtggccgcctcccgtcacgcggcgtcagaaactcgcatcttcctggtgtggccgcctcccgtcacgcggcgtcagaaactcggatcttcccggcgtggccgcgtcccgtcacgcggcgtcagaaactcgcatcttcctggtgtggccgcctcccgtcacgcggcgtcagaaactcggatcttcccggcgtggccgcgtcccgttacgcagcgtcagaaactcgatattcctggcgtggccgcctcccgtcacgcagcgtcagaaactcgatcttcctggcgtggccgcctcccgtcacgcagcgtcagaaactcgatcttcctggcgtggccgcctcccgtcacgcagcgtcagaaactcggtcttcctgccatggccacctcccatccggcggcatcagaaactcggaccttcctggcgtggccgcgtcccctcacacagcgtcagaaactcgatcttcctggcgtggccacctcccctccggcggcatcagaaactcggatcgtcctggggtggctgctcttgttacgcaacgtcagaaactctcctgcgtgggcaccaggctcagaagagtccggcttgtggtggcagggccaagctttggctcattgtgattttttgtgtgagagcttgacttgtatcctcggccacaaaccctgtcggttgttctgggagtgagggacttgggccgttcactttcacgccgtgctctgccagatcccgcgtccgcacagccaggaggtcctcaaagagggcagcgggctgttcccagatctcctggtgagggagacggaggccgtcatccacaagcaccgctcggccacctactgcgagcagctcctgcagcatgtgcaggccgtgccagccacacagtgaccacgctggtttcagccacggcacacccttgtccccacctgagccagagtttgtggcctttaaatctcataaacaaggcacctctgtgccagcagtgagactgtgacagcaagaatgtactcctcaggacacctgcccgctctttccctggaataacagcctctgagtggattctgcatgttatgtgatttgttctgttcatcgagagggctcccaaacatctgcagctgatttgaaattaaaaatgtgcctggttccccttcaccttctgccatgattggaagtttcctgaggcctccccacccatggagaactggtacatacagtctcaaacaggtggattttacaaccaagcgggaggattttgcccacaggaagaccttggaggtggctgccatccagatggctcgggcagcccagctgacctgctgcagaggccttcctggagggtctcgggcatcggggtgtccacactgcatcctggacaagagtgagcctccgtctctgggagacacgctgagtgggagccacacgtgtaccctggaggaaggccttctgtgttactcagctctcacattgctgtaaagaaagacctggccaggcgcagtggctcatgcctgtaatcccagcactttgggaggccgaggtgggtgaatcacaaggtcaggagtttgagaccagcctgactgacatggtgaaaccctgtctctactaaaaatacaaaaattagccgggcatggtggtgcgcacctgtagtcccagctactcaggaggctgaggcaggagaattgcttgaatctgggaggtggaggttgcagtgagccgagattgcgccgccacactccagcctgagtgacagagtgagactctgtctcc

SEQ ID NO: 16457 - protein, 103 aa, Homo sapiens
MIGSFLRPPHPWRTGTYSLKQVDFTTKREDFAHRKTLEVAAIQMARAAQLTCCRGLPGGSRASGCPHCILDKSEPPSLGDTLSGSHTCTLEEGLLCYSALTLL

SEQ ID NO: 16458 - DNA, 1022 bp, Homo sapiens
acgggagggagaccttgtctcaaaaaaaaaacaaaagagcaaaaaagtatggtttgaagtggtgaacatggatttttctcggcttcacatgtacagtcctccccagtgtgtgccggagaacacgggctacacgtatgcgctcagttccagctattcttcagatgctctggattttgagacggagcacaaattggaccctgtatttgattctccacggatgtcccgccgtagtttgcgcctggccacgacagcatgcaccctgggggatggtgaggctgtgggtgccgacagcggcaccagcagcgctgtctccctgaagaaccgagcggccagaacaacaaaacagcgcagaagcacaaacaaatcagcttttagtatcaaccacgtgtcaaggcaggtcacgtcctctggcgtcagccacggcggcactgtcagcctgcaggatgctgtgactcgacggcctcctgtattggacgagtcttggattcgtgaacagaccacagtggaccacttctggggtcttgatgatgatggtgatcttaaaggtggaaataaagctgccattcagggaaacggggatgtgggagccgccgccgccaccgcgcacaacggcttctcctgcagcaactgcagcatgctgtccgagcgcaaggacgtgctcacggcgcaccccgcggcccccgggcccgtgtcgagagtttattctagggacaggaatcaaaaatgtaagtctcagtcctttaaaactcagaaaaaggtgtgttttccaaatttaatatttcctttctgtaagtctcagtgtctgcactatttgtcttggagacttaaaattatcccttgaaagcataagaagtacaccccaaaccagctttgtccttcctgtcctcttctagtttacattttatgtggttagtaattttgtacctaaaagtatttgaaattctataaatttggacttgacgtgagcaaaagaaaatttctacgtaagcgaaactaataaaactacagtcactttcagatgc

SEQ ID NO: 16459 - protein, 257 aa, Homo sapiens
MDFSRLHMYSPPQCVPENTGYTYALSSSYSSDALDFETEHKLDPVFDSPRMSRRSLRLATTACTLGDGEAVGADSGTSSAVSLKNRAARTTKQRRSTNKSAFSINHVSRQVTSSGVSHGGTVSLQDAVTRRPPVLDESWIREQTTVDHFWGLDDDGDLKGGNKAAIQGNGDVGAAAATAHNGFSCSNCSMLSERKDVLTAHPAAPGPVSRVYSRDRNQKCKSQSFKTQKKVCFPNLIFPFCKSQCLHYLSWRLKIIP

SEQ ID NO: 16460 - DNA, 4514 bp, Homo sapiens
atgggagacgtgcggaaggccaaggaggcactggccgaggtgcagatccctcccccagatgcgggcccctcccccagatgcaaaccccccccagcagagcgtcttctcgggcctgggcggcgcagacgaggcctgaggcggcggcgcgaggcagtatggtttgaagtggtgaacatggatttttctcggcttcacatgtacagtcctccccagtgtgtgccggagaacacgggctacacgtatgcgctcagttccagctattcttcagatgctctggattttgagacggagcacaaattggaccctgtatttgattctccacggatgtcccgccgtagtttgcgcctggccacgacagcatgcaccctgggggatggtgaggctgtgggtgccgacagcggcaccagcagcgctgtctccctgaagaaccgagcggccagaacaacaaaacagcgcagaagcacaaacaaatcagcttttagtatcaaccacgtgtcaaggcaggtcacgtcctctggcgtcagccacggcggcactgtcagcctgcaggatgctgtgactcgacggcctcctgtattggacgagtcttggattcgtgaacagaccacagtggaccacttctggggtcttgatgatgatggtgatcttaaaggtggaaataaagctgccattcagggaaacggggatgtgggagccgccgccgccaccgcgcacaacggcttctcctgcagcaactgcagcatgctgtccgagcgcaaggacgtgctcacggcgcaccccgcggcccccgggcccgtgtcgagagtttattctagggacaggaatcaaaaatgcggtgcgtctttctacgtgaataggattttgtggctggccagatacactgcatcatctttttcatcatttttagttcaactttttcaagtggttttaatgaagctcagttatgaatcagaaaattacaaattgaaaactcatgaatcaaaagattgtgaatccgaaagctataagtcaaaaagccatgaatcaaaagctcatgccagttactatgggagaatgaatgtgagagaggttctcagagaggatggccacctcagtgtaaatggggaagcgctgtgcgacgactgtaagggcaagaggcacctcgacgcgcacacagccgcccactcgcagtcgccacggctgcccggtcgggcagggaccctctggcacatctgggcatgtgcaggttacttcttgctgcagattctgcgcaggatcggagctgtgggccaggctgtgtccaggacggcgtggtcggccctttggctggccgtggttgctccagggaaggcagcctctggagtgttctggtggctggggattggatggtaccagtttgttactttgatttcttggctgaatgtgtttcttcttaccaggtgccttcgaaacatctgcaagtttttagtcttgctcatcccactcttccttttactagcaggtctctccttacggggccagggcaatttcttttcgttcttgcccgtgttgaactgggcaagcatgcatagaacacagcgggtggatgacccccaggacgtgtttaaacccacgacttctcgcctgaagcagcctctgcagggtgacagtgaggcttttccgtggcattggatgagtggcgtggagcagcaggtggcctctctgtctggacagtgccaccaccatggtgagaatctccgagagctgaccactttgctacagaagctgcaggctcgggtggaccagatggaaggcggcgctgccgggccgtcagcttcggtcagagacgctgtgggacagcccccgagggagactgactttatggcctttcaccaagaacatgaagtgcgtatgtcacacttggaagatattctgggaaaactgagagaaaaatctgaggccatccagaaggaactagaacagaccaagcaaaaaacaatcagtgcggttggtgagcagctcctgcccacagtcgagcacctccagctggagctggatcagctaaagtcagagctgtccagctggcgacacgtgaagaccggctgtgagacagtggatgccgtacaagaaagagtggacgtgcaagtcagagaaatggtgaaactcctgttttccgaagatcagcaaggcggttctctggaacagctgctgcagaggttctcatcacagtttgtgagcaaaggcgacttgcagacgatgctgcgagacctgcagctgcagatcctgcggaacgtcacccaccacgtttccgtgaccaagcagctcccaacctcagaagccgtggtgtctgctgtgagcgaggcgggggcgtctggaataacagaggcgcaagcacgtgccatcgtgaacagcgccttgaagctgtattcccaagataagaccgggatggtggactttgctctggaatctggtggtggcagcatcttgagtactcgctgttctgaaacttacgaaaccaaaacggcgctgatgagtctgtttgggatcccgctgtggtacttctcgcagtccccgcgcgtggtcatccagcctgacatttaccccggtaactgctgggcatttaaaggctcccaggggtacctggtggtgaggctctccatgatgatccacccagccgccttcactctggagcacatccctaagacgctgtcgccaacaggcaacatcagcagcgcccccaaggacttcgccgtctatggattagaaaatgagtatcaggaagaagggcagcttctgggacagttcacgtatgatcaggatggggagtcgctccagatgttccaggccctgaaaagacccgacgacacagctttccaaatagtggaacttcggattttttctaactggggccatcctgagtatacctgtctgtatcggttcagagttcatggcgaacctgtcaagtgaagacactactcattatttttgtacatttttgtatatactgggacagcgtgaaacactggaatccttcatggacgagggcatatacaatgatgggacagtgccacactccttcaataaacgtggctgctggccagaggacgtgagcgtgtgacgggcgccttggcgccacctgttgggtgctcactgcctctgcaggtgcagaggggtcagcagcaggagaagcgtgttgaacacgtggctctcagacactccttgtttttaacgggaagctctttgcatttgcatttcctcaacaaaggagcaaagcagaggaagctgagagtctggcgtgttcttgacgctttggtcttcagccttgcactggctcttctaaaggacttttggagggcagataatttcatctgttaaatccaacacacatttctttcagggaaaaacaatgtcaccaaattttcagagttctaaactcctttccttcaagccggaattttccttttttcagcaccagtaggtactaagtctccagatggggaaataactaaaatgtgtttttctgctttgttcgctcttacttctgaggaaggtttccagtcaggactcgctgtaccaatatccatggaggaatatgggagcgtttcgctctccttgtaggctgaagtcagtctgacttgaaggggcctggtttggatctaagcaaacacccagatggggttctctggtctcagcaaggcttttcctgttgggagtcacagtaaacagaaacccaaaaatctcatcttgggtgttttcagggcttgttttgagttttgctgaatagggagcgcaagacgccctgagcctccctctcactggtggtgataagaggagccgtctggtgtgtcagggtcacgaacccgttacatttcaggacgatcctttttccttcagcagcatttcttactggctgtggctggaatctgccttttatcacagctgtcaccattctcacgtgattcttgtgagactctttttggttataattactatttaatatttagactattttactgagcagactttataaatgagatatctacaaggcacttaaagtgttacagatgttttaccttaagaattatttaagttgtgttgggttaagacagttttcagtgtaccgtaaatgttgtgttttcagaaaaagacaaaacgatggtgctgactggttttctgtatattgcacaacagtcctcaaatacactgatgtatgaaactattcatacatcaagcagcatttttttcactctccttagaattggaactatgcagttaaggcagataaaatgtacagatgtttcatatattacaggttacatatataaatcaaaatttcctatataaaactgatttgggatttggggtggaaatattttgaatattaatttatttttaaagatgcaagataggactttgtgcaatgtatttttgtaaatgcttttcaaaatatctgtctttggtagtgcttctgctgctgccaccaaattgataagatgctattaagaggtttaaataaagagttttaatttttaaaagggcatgggatataaacagtc

SEQ ID NO: 16461 - protein, 974 aa, Homo sapiens
MGDVRKAKEALAEVQIPPPDAGPSPRCKPPPAERLLGPGRRRRGLRRRREAVWFEVVNMDFSRLHMYSPPQCVPENTGYTYALSSSYSSDALDFETEHKLDPVFDSPRMSRRSLRLATTACTLGDGEAVGADSGTSSAVSLKNRAARTTKQRRSTNKSAFSINHVSRQVTSSGVSHGGTVSLQDAVTRRPPVLDESWIREQTTVDHFWGLDDDGDLKGGNKAAIQGNGDVGAAAATAHNGFSCSNCSMLSERKDVLTAHPAAPGPVSRVYSRDRNQKCGASFYVNRILWLARYTASSFSSFLVQLFQVVLMKLSYESENYKLKTHESKDCESESYKSKSHESKAHASYYGRMNVREVLREDGHLSVNGEALCDDCKGKRHLDAHTAAHSQSPRLPGRAGTLWHIWACAGYFLLQILRRIGAVGQAVSRTAWSALWLAVVAPGKAASGVFWWLGIGWYQFVTLISWLNVFLLTRCLRNICKFLVLLIPLFLLLAGLSLRGQGNFFSFLPVLNWASMHRTQRVDDPQDVFKPTTSRLKQPLQGDSEAFPWHWMSGVEQQVASLSGQCHHHGENLRELTTLLQKLQARVDQMEGGAAGPSASVRDAVGQPPRETDFMAFHQEHEVRMSHLEDILGKLREKSEAIQKELEQTKQKTISAVGEQLLPTVEHLQLELDQLKSELSSWRHVKTGCETVDAVQERVDVQVREMVKLLFSEDQQGGSLEQLLQRFSSQFVSKGDLQTMLRDLQLQILRNVTHHVSVTKQLPTSEAVVSAVSEAGASGITEAQARAIVNSALKLYSQDKTGMVDFALESGGGSILSTRCSETYETKTALMSLFGIPLWYFSQSPRVVIQPDIYPGNCWAFKGSQGYLVVRLSMMIHPAAFTLEHIPKTLSPTGNISSAPKDFAVYGLENEYQEEGQLLGQFTYDQDGESLQMFQALKRPDDTAFQIVELRIFSNWGHPEYTCLYRFRVHGEPVK

SEQ ID NO: 16462 - DNA, 3821 bp, Homo sapiens
tctcgggcctgggcggcgcagacgaggcctgaggcggcggcgcgaggcagttccagctattcttcagatgctctggattttgagacggagcacaaattggaccctgtatttgattctccacggatgtcccgccgtagtttgcgcctggccacgacagcatgcaccctgggggatggtgaggctgtgggtgccgacagcggcaccagcagcgctgtctccctgaagaaccgagcggccagaacaacaaaacagcgcagaagcacaaacaaatcagcttttagtatcaaccacgtgtcaaggcaggtcacgtcctctggcgtcagccacggcggcactgtcagcctgcaggatgctgtgactcgacggcctcctgtattggacgagtcttggattcgtgaacagaccacagtggaccacttctggggtcttgatgatgatggtgatcttaaaggtggaaataaagctgccattcagggaaacggggatgtgggagccgccgccgccaccgcgcacaacggcttctcctgcagcaactgcagcatgctgtccgagcgcaaggacgtgctcacggcgcaccccgcggcccccgggcccgtgtcgagagtttattctagggacaggaatcaaaaatggaaggcagcctctggagtgttctggtggctggggattggatggtaccagtttgttactttgatttcttggctgaatgtgtttcttcttaccaggtgccttcgaaacatctgcaagtttttagtcttgctcatcccactcttccttttactagcaggtctctccttacggggccagggcaatttcttttcgttcttgcccgtgttgaactgggcaagcatgcatagaacacagcgggtggatgacccccaggacgtgtttaaacccacgacttctcgcctgaagcagcctctgcagggtgacagtgaggcttttccgtggcattggatgagtggcgtggagcagcaggtggcctctctgtctggacagtgccaccaccatggtgagaatctccgagagctgaccactttgctacagaagctgcaggctcgggtggaccagatggaaggcggcgctgccgggccgtcagcttcggtcagagacgctgtgggacagcccccgagggagactgactttatggcctttcaccaagaacatgaagtgcgtatgtcacacttggaagatattctgggaaaactgagagaaaaatctgaggccatccagaaggaactagaacagaccaagcaaaaaacaatcagtgcggttggtgagcagctcctgcccacagtcgagcacctccagctggagctggatcagctaaagtcagagctgtccagctggcgacacgtgaagaccggctgtgagacagtggatgccgtacaagaaagagtggacgtgcaagtcagagaaatggtgaaactcctgttttccgaagatcagcaaggcggttctctggaacagctgctgcagaggttctcatcacagtttgtgagcaaaggcgacttgcagacgatgctgcgagacctgcagctgcagatcctgcggaacgtcacccaccacgtttccgtgaccaagcagctcccaacctcagaagccgtggtgtctgctgtgagcgaggcgggggcgtctggaataacagaggcgcaagcacgtgccatcgtgaacagcgccttgaagctgtattcccaagataagaccgggatggtggactttgctctggaatctggtggtggcagcatcttgagtactcgctgttctgaaacttacgaaaccaaaacggcgctgatgagtctgtttgggatcccgctgtggtacttctcgcagtccccgcgcgtggtcatccagcctgacatttaccccggtaactgctgggcatttaaaggctcccaggggtacctggtggtgaggctctccatgatgatccacccagccgccttcactctggagcacatccctaagacgctgtcgccaacaggcaacatcagcagcgcccccaaggacttcgccgtctatggattagaaaatgagtatcaggaagaagggcagcttctgggacagttcacgtatgatcaggatggggagtcgctccagatgttccaggccctgaaaagacccgacgacacagctttccaaatagtggaacttcggattttttctaactggggccatcctgagtatacctgtctgtatcggttcagagttcatggcgaacctgtcaagtgaagacactactcattatttttgtacatttttgtatatactgggacagcgtgaaacactggaatccttcatggacgagggcatatacaatgatgggacagtgccacactccttcaataaacgtggctgctggccagaggacgtgagcgtgtgacgggcgccttggcgccacctgttgggtgctcactgcctctgcaggtgcagaggggtcagcagcaggagaagcgtgttgaacacgtggctctcagacactccttgtttttaacgggaagctctttgcatttgcatttcctcaacaaaggagcaaagcagaggaagctgagagtctggcgtgttcttgacgctttggtcttcagccttgcactggctcttctaaaggacttttggagggcagataatttcatctgttaaatccaacacacatttctttcagggaaaaacaatgtcaccaaattttcagagttctaaactcctttccttcaagccggaattttccttttttcagcaccagtaggtactaagtctccagatggggaaataactaaaatgtgtttttctgctttgttcgctcttacttctgaggaaggtttccagtcaggactcgctgtaccaatatccatggaggaatatgggagcgtttcgctctccttgtaggctgaagtcagtctgacttgaaggggcctggtttggatctaagcaaacacccagatggggttctctggtctcagcaaggcttttcctgttgggagtcacagtaaacagaaacccaaaaatctcatcttgggtgttttcagggcttgttttgagttttgctgaatagggagcgcaagacgccctgagcctccctctcactggtggtgataagaggagccgtctggtgtgtcagggtcacgaacccgttacatttcaggacgatcctttttccttcagcagcatttcttactggctgtggctggaatctgccttttatcacagctgtcaccattctcacgtgattcttgtgagactctttttggttataattactatttaatatttagactattttactgagcagactttataaatgagatatctacaaggcacttaaagtgttacagatgttttaccttaagaattatttaagttgtgttgggttaagacagttttcagtgtaccgtaaatgttgtgttttcagaaaaagacaaaacgatggtgctgactggttttctgtatattgcacaacagtcctcaaatacactgatgtatgaaactattcatacatcaagcagcatttttttcactctccttagaattggaactatgcagttaaggcagataaaatgtacagatgtttcatatattacaggttacatatataaatcaaaatttcctatataaaactgatttgggatttggggtggaaatattttgaatattaatttatttttaaagatgcaagataggactttgtgcaatgtatttttgtaaatgcttttcaaaatatctgtctttggtagtgcttctgctgctgccaccaaattgataagatgctattaagaggtttaaataaagagttttaatttttaaaagggcatgggatataaacagtc

SEQ ID NO: 16463 - protein, 702 aa, Homo sapiens; identical to SEQ ID NO: 1906

SEQ ID NO: 16464 - DNA, 484 bp, Homo sapiens
gcagtatggtttgaagtggtgaacatggatttttctcggcttcacatgtacagtcctccccagtgtgtgccggagaacacgggctacacgtatgcgctcagttccagctattcttcagatgctctggattttgagacggagcacaaattggaccctgtatttgattctccacggatgtcccgccgtagtttgcgcctggccacgacagcatgcaccctgggggatggtgaggctgtgggtgccgacagcggcaccagcagcgctgtctccctgaagaaccgagcggccaggtgagcaccgctgcacttcctctccatctgatctctaacaccagttaaaaccaagcttccatactttttggtctgtaaagccgcaccctgtctcgagcttaaggatatgtgtgtgtatgtgcgtgtacagacacacaaacctgtcatataaagtggtagtttgctgcaaataaagactgaaaggaactctggaa

SEQ ID NO: 16465 - protein, 89 aa, Homo sapiens
MDFSRLHMYSPPQCVPENTGYTYALSSSYSSDALDFETEHKLDPVFDSPRMSRRSLRLATTACTLGDGEAVGADSGTSSAVSLKNRAAR

SEQ ID NO: 16466 - DNA, 916 bp, Homo sapiens
gtgctgggattacaggcttgagcaactgcgcccaacccagaactattttaagcaggccaatctttgtattgtttgggccacacacacgattcagccagagggtgggggccctttcacgtctcttctcgtggcccgggccctgtcagcggcattcacctgtgtggtaggagccatcggctgtgggaactctgtggaagtggctagccttgcacatcctctgatcatgttgacttcatcagggtgcgagaagcacttgagcttggcgtcggtgagttccctaagcctcttttgcgtgtgttgcagctcatgccagttactatgggagaatgaatgtgagagaggttctcagagaggatggccacctcagtgtaaatggggaagcgctgtgtaagtatggcttcgttttcctgtgggcgtcggtcgtggagttggtcccacacgctgtcatgttgggtactagcagtagagaatgaacggcccgtgtgacatggtggtcctcactgatgacgacgggctgttggagctgctgcttaagccctcatcacagaagctcatagccaccagatcgcatttgctttgattgttgactgtctcgtgtgtaattgagtttcccagtttctacagactgccattgctatgcacggctgagatggacagagtttgcttgtgaatccgccacactcactgcctgtcaccacacctgcaggcgacgactgtaagggcaagaggcacctcgacgcgcacacagccgcccactcgcagtcgccacggctgcccggtcgggcagggaccctctggcacatctgggcatgtgcaggttacttcttgctgcagattctgcgcaggatcggagctgtgggccaggctgtgtccaggacggcgtggtcggccctttggctggccgtggttgctccag

SEQ ID NO: 16467 - protein, 34 aa, Homo sapiens
MCRLLLAADSAQDRSCGPGCVQDGVVGPLAGRGC

SEQ ID NO: 16468 - DNA, 4056 bp, Homo sapiens
tgtgcagaggtgaggcagctgggagggcctgggcaggatgggggacccaggtccaggcttctgccctgctgcagttcccagtggcatcagtcacctcagaaggctgtgatccgaaggggcagcgactcagggtagctcaggccattcccacagcaccagagagttggtaacgtaggtctcaaagacaccattttacatgaaggttctcctgaaggcatcagaagccttgtagataaaaccgtaactgcttttctaatactgggggggtggattttgcacaaaattatctagagggggaaaacagattggtgaaccctgactttcattttttctaagtcaaaggttttcattgttactcccaggtgccttcgaaacatctgcaagtttttagtcttgctcatcccactcttccttttactaggtaagtcaaatctggctgagttgcctccgatggctaagcggtacacacatatgtgtaacttagtggaaaaaaatgagcgtgtaagtccatgttttgagaagcgtggtgtacctgtgtgtgtgtggtggctcttctcttttagcaggtctctccttacggggccagggcaatttcttttcgttcttgcccgtgttgaactgggcaagcatgcatagaacacagcgggtggatgacccccaggacgtgtttaaacccacgacttctcgcctgaagcagcctctgcaggtaagagggtagaaaggcctctcagctggcactgcacatgtgaggtcttcagggacgttccacactgctgtgagccaggcacttcagttgggtgtcctgttgtaagaagtatttttaaatgtcagataagcaagtctttggagctccttaagtgttctaggatagttcaaatgcacatttaaagtactctcatgattcagttagttttaattttaaaaacataatagtattcatcactgtacaaagtacagaaagtatagagaagaaaatgagaagcacccatagtcagccatgtaaggatcaaacctgatactccgggtttctgtggattcctccattcgtgtgccgtgcgccccagagctggcgtcttgctgtaggacactgtttggaggtttaactgactctgtgctcatgcttgtttgactacctggtttcatttctctcttgccatttcagggtgacagtgaggcttttccgtggcattggatgagtggcgtggagcagcaggtggcctctctgtctggacagtgccaccaccatggtgagaatctccgagagctgaccactttgctacagaagctgcaggctcgggtggaccagatggaaggcggcgctgccgggccgtcagcttcggtcagagacgctgtgggacagcccccgagggagactgactttatggcctttcaccaagaacatgaagtgcgtatgtcacacttggaagatattctgggaaaactgagagaaaaatctgaggccatccagaaggaactagaacagaccaagcaaaaaacaatcagtgcggttggtgagcagctcctgcccacagtcgagcacctccagctggagctggatcagctaaagtcagagctgtccagctggcgacacgtgaagaccggctgtgagacagtggatgccgtacaagaaagagtggacgtgcaagtcagagaaatggtgaaactcctgttttccgaagatcagcaaggcggttctctggaacagctgctgcagaggttctcatcacagtttgtgagcaaaggcgacttgcagacgatgctgcgagacctgcagctgcagatcctgcggaacgtcacccaccacgtttccgtgaccaagcagctcccaacctcagaagccgtggtgtctgctgtgagcgaggcgggggcgtctggaataacagaggcgcaagcacgtgccatcgtgaacagcgccttgaagctgtattcccaagataagaccgggatggtggactttgctctggaatctggtggtggcagcatcttgagtactcgctgttctgaaacttacgaaaccaaaacggcgctgatgagtctgtttgggatcccgctgtggtacttctcgcagtccccgcgcgtggtcatccagcctgacatttaccccggtaactgctgggcatttaaaggctcccaggggtacctggtggtgaggctctccatgatgatccacccagccgccttcactctggagcacatccctaagacgctgtcgccaacaggcaacatcagcagcgcccccaaggacttcgccgtctatggattagaaaatgagtatcaggaagaagggcagcttctgggacagttcacgtatgatcaggatggggagtcgctccagatgttccaggccctgaaaagacccgacgacacagctttccaaatagtggaacttcggattttttctaactggggccatcctgagtatacctgtctgtatcggttcagagttcatggcgaacctgtcaagtgaagacactactcattatttttgtacatttttgtatatactgggacagcgtgaaacactggaatccttcatggacgagggcatatacaatgatgggacagtgccacactccttcaataaacgtggctgctggccagaggacgtgagcgtgtgacgggcgccttggcgccacctgttgggtgctcactgcctctgcaggtgcagaggggtcagcagcaggagaagcgtgttgaacacgtggctctcagacactccttgtttttaacgggaagctctttgcatttgcatttcctcaacaaaggagcaaagcagaggaagctgagagtctggcgtgttcttgacgctttggtcttcagccttgcactggctcttctaaaggacttttggagggcagataatttcatctgttaaatccaacacacatttctttcagggaaaaacaatgtcaccaaattttcagagttctaaactcctttccttcaagccggaattttccttttttcagcaccagtaggtactaagtctccagatggggaaataactaaaatgtgtttttctgctttgttcgctcttacttctgaggaaggtttccagtcaggactcgctgtaccaatatccatggaggaatatgggagcgtttcgctctccttgtaggctgaagtcagtctgacttgaaggggcctggtttggatctaagcaaacacccagatggggttctctggtctcagcaaggcttttcctgttgggagtcacagtaaacagaaacccaaaaatctcatcttgggtgttttcagggcttgttttgagttttgctgaatagggagcgcaagacgccctgagcctccctctcactggtggtgataagaggagccgtctggtgtgtcagggtcacgaacccgttacatttcaggacgatcctttttccttcagcagcatttcttactggctgtggctggaatctgccttttatcacagctgtcaccattctcacgtgattcttgtgagactctttttggttataattactatttaatatttagactattttactgagcagactttataaatgagatatctacaaggcacttaaagtgttacagatgttttaccttaagaattatttaagttgtgttgggttaagacagttttcagtgtaccgtaaatgttgtgttttcagaaaaagacaaaacgatggtgctgactggttttctgtatattgcacaacagtcctcaaatacactgatgtatgaaactattcatacatcaagcagcatttttttcactctccttagaattggaactatgcagttaaggcagataaaatgtacagatgtttcatatattacaggttacatatataaatcaaaatttcctatataaaactgatttgggatttggggtggaaatattttgaatattaatttatttttaaagatgcaagataggactttgtgcaatgtatttttgtaaatgcttttcaaaatatctgtctttggtagtgcttctgctgctgccaccaaattgataagatgctattaagaggtttaaataaagagttttaatttttaaaagggcatgggatataaacagtc

SEQ ID NO: 16469 - protein, 424 aa, Homo sapiens
MSGVEQQVASLSGQCHHHGENLRELTTLLQKLQARVDQMEGGAAGPSASVRDAVGQPPRETDFMAFHQEHEVRMSHLEDILGKLREKSEAIQKELEQTKQKTISAVGEQLLPTVEHLQLELDQLKSELSSWRHVKTGCETVDAVQERVDVQVREMVKLLFSEDQQGGSLEQLLQRFSSQFVSKGDLQTMLRDLQLQILRNVTHHVSVTKQLPTSEAVVSAVSEAGASGITEAQARAIVNSALKLYSQDKTGMVDFALESGGGSILSTRCSETYETKTALMSLFGIPLWYFSQSPRVVIQPDIYPGNCWAFKGSQGYLVVRLSMMIHPAAFTLEHIPKTLSPTGNISSAPKDFAVYGLENEYQEEGQLLGQFTYDQDGESLQMFQALKRPDDTAFQIVELRIFSNWGHPEYTCLYRFRVHGEPVK

SEQ ID NO: 16470 - DNA, 980 bp, Homo sapiens
tcatttataaagtctgctcagtaaaatagtctaaatattaaatagtaattataaccaaaaagagtctcacaagaatcacgtgagaatggtgacagctgtgataaaaggcagattccagccacagccagtaagaaatgctgctgaaggaaaaaggatcgtcctgaaatgtaacgggttcgtgaccctgacacaccagacggctcctcttatcaccaccagtgagagggaggctcagggcgtcttgcgctccctattcagcaaaactcaaaacaagccctgaaaacacccaagatgagatttttgggtttctgtttactgtgactcccaacaggaaaagccttgctgagaccagagaaccccatctgggtgtttgcttagatccaaaccaggccccttcaagtcagactgacttcagcctacaaggagagcgaaacgctcccatattcctccatggatattggtacagcgagtcctgactggaaaccttcctcagaagtaagagcgaacaaagcagaaaaacacattttagttatttccccatctggagacttagtacctactggtgctgaaaaaaggaaaattccggcttgaaggaaaggagtttagaactctgaaaatttggtgacattgtttttccctgaaagaaatgtgtgttggatttaacagatgaaattatctgccctccaaaagtcctttagaagagccagtgcaaggctgaagaccaaagcgtcaagaacacgccagactctcagcttcctctgctttgctcctttgttgaggaaatgcaaatgcaaagagcttcccgttaaaaacaaggagtgtctgagagccacgtgttcaacacgcttctcctgctgctgacccctctgcacctgcagaggcagtgagcacccaacaggtggcgccaaggcgcccgtcacacgctcacgtcctgggggtcatccacccgctgtgttctatgcatgcttgcccagttcaac

SEQ ID NO: 16471 - protein, 64 aa, Homo sapiens
MKLSALQKSFRRASARLKTKASRTRQTLSFLCFAPLLRKCKCKELPVKNKECLRATCSTRFSCC

SEQ ID NO: 16472 - DNA, 3186 bp, Homo sapiens
tcaccatctcttctaaacacgaatgaaatgcgtgtgtcgtcctcacacactgaaggcaggctgcgtgcacggtctcctcctccgttgcgcacagcaacgtggctgcctgggcgcagcgtctgcaacttgtcagtcagtccctgtgtgtgcctggggacgctgtgctgcgaacagtgctctccggtcacatctgccctgcacctggaggtgggggtgcgatcgcaggccagaggcagatgtgtgcgcagcaggccgaccttgccaggctgtgcttctggggctgcaggctgcaccgtggccgggttaggttagaacgtgcattttcccagggcatcagcagctgacccttgatgttggtcggatgggggggcagtgctggttccctgtggtgttggtcggatgggggggcagtgctggttccctgtggtgttggtcggattggggggcagtgctggttccctgtggtgttggtcggatgggggggcagtgctggttctctgtggtgttggtcggatggggggacagtgctggttccctgtggtgttggtcggattggggggcagtgctggttccctgtggtgttggtcggattggggggcagtgctggttccctgtggtgttggtcggatgggggggcagtgctggttccctgtggtgttggtcggatcggggggcagtgctggttctctgtggtgttggtcggatgggggggcagtgctggttccctgtggtgttggtcggatgggggggcagtgctggttccctgtggtgttggtcggatggggggacagtgctggttccctgtggtgttggtcggatggggggacagtgctggttccctgtggtgttggtcggatggggggacagtgctggttccctgtggtggtgtcccttcttgctgtgcagggtggagggcatcttgccacgaccaaggaccattgaccttcaccttttctttgaagtatgttgtatgtctcacccatttttctttaaggttctggtcgttttaacttttatacaacatatgggttggagatagtggccctctgaggagtgaattacaaatgcctttcccagcttatcttcggattttgctcatggcagtttctaccatgtaaaacttatttttatctcagtataatcagtctttcctcttcctgctgctaagtgggtaagagcatgctcacactctgagtcctcatgtttttcctttccccagcctgacatttaccccggtaactgctgggcatttaaaggctcccaggggtacctggtggtgaggctctccatgatgatccacccagccgccttcactctggagcacatccctaagacgctgtcgccaacaggcaacatcagcagcgcccccaaggacttcgccgtctatggattagaaaatgagtatcaggaagaagggcagcttctgggacagttcacgtatgatcaggatggggagtcgctccagatgttccaggccctgaaaagacccgacgacacagctttccaaatagtggaacttcggattttttctaactggggccatcctgagtatacctgtctgtatcggttcagagttcatggcgaacctgtcaagtgaagacactactcattatttttgtacatttttgtatatactgggacagcgtgaaacactggaatccttcatggacgagggcatatacaatgatgggacagtgccacactccttcaataaacgtggctgctggccagaggacgtgagcgtgtgacgggcgccttggcgccacctgttgggtgctcactgcctctgcaggtgcagaggggtcagcagcaggagaagcgtgttgaacacgtggctctcagacactccttgtttttaacgggaagctctttgcatttgcatttcctcaacaaaggagcaaagcagaggaagctgagagtctggcgtgttcttgacgctttggtcttcagccttgcactggctcttctaaaggacttttggagggcagataatttcatctgttaaatccaacacacatttctttcagggaaaaacaatgtcaccaaattttcagagttctaaactcctttccttcaagccggaattttccttttttcagcaccagtaggtactaagtctccagatggggaaataactaaaatgtgtttttctgctttgttcgctcttacttctgaggaaggtttccagtcaggactcgctgtaccaatatccatggaggaatatgggagcgtttcgctctccttgtaggctgaagtcagtctgacttgaaggggcctggtttggatctaagcaaacacccagatggggttctctggtctcagcaaggcttttcctgttgggagtcacagtaaacagaaacccaaaaatctcatcttgggtgttttcagggcttgttttgagttttgctgaatagggagcgcaagacgccctgagcctccctctcactggtggtgataagaggagccgtctggtgtgtcagggtcacgaacccgttacatttcaggacgatcctttttccttcagcagcatttcttactggctgtggctggaatctgccttttatcacagctgtcaccattctcacgtgattcttgtgagactctttttggttataattactatttaatatttagactattttactgagcagactttataaatgagatatctacaaggcacttaaagtgttacagatgttttaccttaagaattatttaagttgtgttgggttaagacagttttcagtgtaccgtaaatgttgtgttttcagaaaaagacaaaacgatggtgctgactggttttctgtatattgcacaacagtcctcaaatacactgatgtatgaaactattcatacatcaagcagcatttttttcactctccttagaattggaactatgcagttaaggcagataaaatgtacagatgtttcatatattacaggttacatatataaatcaaaatttcctatataaaactgatttgggatttggggtggaaatattttgaatattaatttatttttaaagatgcaagataggactttgtgcaatgtatttttgtaaatgcttttcaaaatatctgtctttggtagtgcttctgctgctgccaccaaattgataagatgctattaagaggtttaaataaagagttttaatttttaaaagggcatgggatataaacagtc

SEQ ID NO: 16473 - protein, 102 aa, Homo sapiens [sequence omitted]

SEQ ID NO: 16474 - DNA, 558 bp, Homo sapiens
gtaagagcatgctcacactctgagtcctcatgtttttcctttccccagcctgacatttaccccggtaactgctgggcatttaaaggctcccaggggtacctggtggtgaggctctccatgatgatccacccagccgccttcactctggagcacatccctaagacgctgtcgccaacaggcaacatcagcagcgcccccaaggacttcgccgtctatggattagaaaatgagtatcaggaagaagggcagcttctgggacagttcacgtatgatcaggatggggagtcgctccagatgttccaggccctgaaaagacccgacgacacagctttccaaatagtggaacttcggattttttctaactggggccatcctgagtatacctgtctgtatcggttcagagttcatggcgaacctgtcaagtgaagacactactcattatttttgtacatttttgtatatactgggacagcgtgaaacactggaatccttcatggacgagggcatatacaatgatgggacagtgccacactccttcaataaacgtggctgctggcc

SEQ ID NO: 16475 - protein, 102 aa, Homo sapiens [sequence omitted]

SEQ ID NO: 16476 - DNA, 1142 bp, Homo sapiens
aatccttcatggacgagggcatatacaatgatgggacagtgccacactccttcaataaacgtggctgctggccagaggacgtgagcgtgtgacgggcgccttggcgccacctgttgggtgctcactgcctctgcaggtgcagaggggtcagcagcaggagaagcgtgttgaacacgtggctctcagacactccttgtttttaacgggaagctctttgcatttgcatttcctcaacaaaggagcaaagcagaggaagctgagagtctggcgtgttcttgacgctttggtcttcagccttgcactggctcttctaaaggacttttggagggcagataatttcatctggcttgttttgagttttgctgaatagggagcgcaagacgccctgagcctccctctcactggtggtgataagaggagccgtctggtgtgtcagggtcacgaacccgttacatttcaggacgatcctttttccttcagcagcatttcttactggctgtggctggaatctgccttttatcacagctgtcaccattctcacgtgattcttgtgagactctttttggttataattactatttaatatttagactattttactgagcagactttataaatgagatatctacaaggcacttaaagtgttacagatgttttaccttaagaattatttaagttgtgttgggttaagacagttttcagtgtaccgtaaatgttgtgttttcagaaaaagacaaaacgatggtgctgactggttttctgtatattgcacaacagtcctcaaatacactgatgtatgaaactattcatacatcaagcagcatttttttcactctccttagaattggaactatgcagttaaggcagataaaatgtacagatgtttcatatattacaggttacatatataaatcaaaatttcctatataaaactgatttgggatttggggtggaaatattttgaatattaatttatttttaaagatgcaagataggactttgtgcaatgtatttttgtaaatgcttttcaaaatatctgtctttggtagtgcttctgctgctgccaccaaattgataagatgctattaagaggtttaaataaagagttttaatttttaaaagggcatgggatataaacagtc

SEQ ID NO: 16477 - protein, 62 aa, Homo sapiens
MVLTGFLYIAQQSSNTLMYETIHTSSSIFFTLLRIGTMQLRQIKCTDVSYITGYIYKSKFPI

SEQ ID NO: 16478 - DNA, 1346 bp, Homo sapiens
gtagaagggcgtcgggcggccgtcgggacggaagccgggaggcgctgccgaccgcgcctgcgacagcgtcagccctgcgcggagcgccggcccgatggcggcggcggcggcgatggccgagcaggagagcgcccggaacggcggccgcaaccgcggcggcgtccagcgtgtggagggcaagctgcgcgccagcgtcgagaagggcgactactacgaggcgcaccagatgtaccggaccctgttcttcaggtacatgtcccagagcaagcacacggaggcccgggagctcatgtactcgggagccctgctcttcttcagccatggccagcaaaacagtgcagcagacttgtccatgctggtcctggagtccctggagaaggcggaagtggaggtggctgacgagctgctggaaaatctggctaaagtgttcagcctgatggaccccaactctcctgagcgcgtgacctttgtgtccagagccctgaagtggtccagtgggggctccgggaagctgggccacccccggctgcaccagctgctggccctcaccctgtggaaagaacaaaactattgtgagtcgaggtatcattttctgcactcagcggacggggagggctgtgccaacatgctggtggagtattccacgtcccgcggcttccgcagcgaggtggacatgttcgtggcccaggccgtgctacagtttctctgtttaaaaaacaaaagtagcgcatcggtggtcttcacgacgtacacccagaagcacccgtccatcgaggacgggcctccgtttgtggagccgctgcttaacttcatctggttcctgctgctggctgtggacggtgggaagctgacggtgttcactgtgctgtgtgagcagtaccagccatccctccggcgggaccccatgtacaacgagtacctcgaccgcataggacagctgttcttcggcgtcccgcccaagcagacgtcttcctacgggggcctgctcgggaaccttctgaccagcctcatgggctcctcagagcaggaggatggggaggagagccccagcgacggcagccccatcgagctggactgaactggccaggccacgtggagacaccacggtcgacgacggctggagggacgtttcagaggcgagtcctgggtggctcctcgccttgggggctcctggccctgaggctggcggtggccgcatgccggcgcgtgtctgtttctgtgcggcggctcagggtggcgcggctgctgctcactgtgctgctgggacccaagagtggggcgtcgcccctgctggccgccgcgtcccccgagattgacccacaataaagcacaggccttaccgcggc

SEQ ID NO: 16479 - protein, 327 aa, Homo sapiens; identical to SEQ ID NO: 1908

SEQ ID NO: 16480 - DNA, 2098 bp, Homo sapiens
gtagaagggcgtcgggcggccgtcgggacggaagccgggaggcgctgccgaccgcgcctgcgacagcgtcagccctgcgcggagcgccggcccgatggcggcggcggcggcgatggccgagcaggagagcgcccggaacggcggccgcaaccgcggcggcgtccagcgtgtggagggcaagctgcgcgccagcgtcgagaagggcgactactacgaggcgcaccagatgtaccggaccctgttcttcaggtacatgtcccagagcaagcacacggaggcccgggagctcatgtactcgggagccctgctcttcttcagccatggccagcaaaacagtgcagcagacttgtccatgctggtcctggagtccctggagaaggcggaagtggaggtggctgacgagctgctggaaaatctggctaaagtgttcagcctgatggaccccaactctcctgagcgcgtgacctttgtgtccagagccctgaagtggtccagtgggggctccgggaagctgggccacccccggctgcaccagctgctggccctcaccctgtggaaagaacaaaactattgtgagtcgaggtatcattttctgcactcagcggacggggagggctgtgccaacatgctggtggagtattccacgtcccgcggcttccgcagcgaggtggacatgttcgtggcccaggccgtgctacagtttctctgtttaaaaaacaaaagtagcgcatcggtggtcttcacgacgtacacccagaagcacccgtccatcgaggacgggcctccgtttgtggagccgctgcttaacttcatctggttcctgctgctggctgtggacggtgggaagctgacggtgttcactgtgctgtgtgagcagtaccagccatccctccggcgggaccccatgtacaacgagtacctcgaccgcataggacagctgttcttcggcgtcccgcccaagcagacgtcttcctacgggggcctgctcgggaaccttctgaccagcctcatgggctcctcagagcaggaggatggggaggagagccccagcgacggcagccccatcgagctggactgaactggccaggccacgtggagacaccacggtcgacgacggctggagggacgtttcagaggcgagtcctgggtggctcctcgccttgggggctcctggccctgaggctggcggtggccgcatgccggcgcgtgtctgtttctgtgcggcggctcagggtggcgcggctgctgctcactgtgctgctgggacccaagagtggggcgtcgcccctgctggccgccgcgtcccccgagattgacccacaataaagcacaggccttaccgcggcgtcaccctctcccactcctttgttctgggtcctttcgggagggctgatgggcagcacaggaggcccgtcctcggggggctgcgcacatcacgctccttgccgggcgtccggcacagctgcggtcaccaaagcaggtgctggccctcggacctgagagcccagccagggcccatgtggtctgcaaatgggagcggctgtttttgaacacggggtcattctgcagtcaggacgaaccggtccccgtcgcagacggagtgcacgtgccctgcgccacatcctcacgctcggtggagggacgcgtgcggcgggacggtgcctacgggtacttgcagctgtgtcccatgtggcatcccagagctgcgccctgctggtctctgtgagcgccacgctgctgtgctggaaatgccgctttaaaaagggataccgtgggactctgcccgtctctttcataacgcaatatttatttgtattgggtgatgattgattctttcgacctaacattttgggttttaaccaaataaccggtccaggagtgagcagctccgttctgtcagatgctactccaaatgttaccagaacgatgacaaaaggggagacgctctattttttcacagttaaatgacagttgtagattgatacgcagttgtgcatgggaaggggaaacgcacagctttatttactgtaaagtggaatttcaggaaggcttgtgtgaaccgttgcgcataaataaaccctttctaccgggctgtgca

SEQ ID NO: 16481 - protein, 327 aa, Homo sapiens; identical to SEQ ID NO: 1908

SEQ ID NO: 16482 - DNA, 708 bp, Homo sapiens
aaacattagcatatttaaaaataaatcaacaaagcctgcacacctgcccgaggctaaaataaacataagaatatttaaaaataagtcaacaaacagtatcttttggtaaatttacccgacagctgaagggataaacaattgtgctggagacacacagggaaaaccactcagcgataaaaggaactgcggacgctccaggaggagtctcccagcctccgtggtgaatgaattcaagcggttagacagaaagtgcgcactgtgattccacatacgtaaaactccaggaaacaccacctcacctaagtgcagcccgcagatgcacgggtgccggggatggggtggggtggggtgggagtgggggcgaggaggcctggttgcagagccccacagtgccgtggtatcttctgtgtcttgactggtcatagttcattcatgtcagacctcaccaaattatacattttacataaatatttaaatgtaaatgtgcaattacatatatttattgacataaaagcattttaaaaaatggctgggtgctatggctcccacctataatccccgcactttgggaggaggcatgagccactgcgcccggcaaattgggcaaatatttatatacaaattcctaggcacggcaggcatcagggtgaatgctgaacaacataaaagttccccatcacacagctctatggctggcccctctaccca

SEQ ID NO: 16483 - protein, 55 aa, Homo sapiens
MAPTYNPRTLGGGMSHCARQIGQIFIYKFLGTAGIRVNAEQHKSSPSHSSMAGPS

SEQ ID NO: 16484 - DNA, 4356 bp, Homo sapiens
ggccggcagagagcaccagcgctcactggctctcagcgcctgtcagcaggcagaagccatttccctatctggaaggcacgtctgggtgtccacatggcacggccaatagtgcgcagcatgcagagccgggccgggagaaggcccggccatgcccagctgccccccactctccccggcctcgggcttgagagggtacctgtcctggcttagtcacctggaaaccaaaatccttcgcagcttccagaattctccagtacaggaggagaagccgtccacgttcagagccgccttagacggtttgcctgtcaccggcattcctggacctggaaacgggtgcccccagccaggccggggaccactgtgtgcccagaattctcctcccgtcctttttccccttgcccggctcccagctgcccagggaagaagggagccggctgcaaggcgcagtccaaaccaggccgggggccgtgaccatcggcagtgccccccagagcaggctcctcgtgcaggaatatgggtcactgccttccagggagtcctttttttcttctggtttctaagtcgccacctcttgctttacctcagatagaagcatccagaacgctgtagtatcggcaaagcagaagctggtgtggtgcttgctcagggtcggtgcatgcggttctgcccgtggccccactggcggcatcgtgaggccaggcgtgtctgggagcttgtttttccagagtgccctgtgccagacggctcccggcctcctctgagtcagtcatgtccctgcaggactggaactaggacggccggtcacagagtcagtggtcctgtcgaggctcctgctgtggtgttggggtgggtctccctccagaaccttcactgtgcggggagcacagcaaaaccggaggcctgccaacggcctgcaggctgacgggggtgcgggggcactttctctcttgggtgcgggcttttccctcctggtgccctgcctctgtgcagcacgaagcggtctcctgtggggggagggcctgtgtgccaggctaatgagatgcccggatgtggcggggctgtctgtgtttggggtccctggctgtggtgccttctgaagaggagcccttttctgtggttaactgagcatccaaccctttgcgttctcggctggccttcccgtcctggcaacaccaaggtcattctggtcctcagtggcgttgctgtggctctttatcacctccactgcaattggtttttgtttgtttgttttggggggatggcgcctcgctctgtcatccgtctaggcagtggtgcaatcatggcttactgcggccttgactacccggactcaagcagtcctcccacctcagcctcccgagtagctgggaccacaggtgcacaccaccatgcccagctaatttctgtgttttttgtagagacagggtctcactatgttgctcaggccagtctcaaactcatgagctcaagcgatcctcccacctcagcctcccaaagggctgagattacaggtgtgagcccccgaatccggtgtgcactgctgtttacttagtatttttctttaactagatttatttttaaacaaggctttgtccaaggacatttggctcgcaggcacagagctgattaactcgttatgtatcttttgataataaggcagcgatcattaagaaaaacgtgtagccaatgaaataacatgttctgggccccaccactggactgggaggtgcagcgcatccaagcagaggctgcctcctgccctccacgcctgctgctctcgcaggcaggggctctgctgcttacagcagtgcggccatctcggcttctctccacatcgtctgtcacgcgctggtccccaccatacctctcgccaccccgtgcctctgtccccgtgcggcctgaggagctccagctttccctgccagcggtgctctgggagtggggacgtgatgcagggcgagcatgatgcaacggggcaccccagacccttccctcccgtggggggaggggtgtggcacgcagaggggcagagggcggggacactggccccgtgggggaagaaggtgctgtcacagccgttactgtcccccgtgggaccccagcctggagccccccatcctttggctcctgcctgtggccactcagctctcaggtggccacatgcacatcccctgctccttccctgcgcacctgccctgcccagtggcctttctggtcccagctactgaaaccggtgagctgctccagggtgaggctgctttctggctcctggtgtatttggacacagataggcccttagtgtccagaggcgccccatgcagccctcatggtcagcaggacacccaggatagaccccctccacgcagcacctgggccctgggagcggctgcttttaggatgccacctgttcctgggcgccttgtttttagcttctgacctgaagatgagcgggggagcgcggtggcgagggcacgtgggcgtggctcacggtctcctctctgtggcaggtacatgtcccagagcaagcacacggaggcccgggagctcatgtactcgggagccctgctcttcttcagccatggccagcaaaacagtgcagcagacttgtccatgctggtcctggagtccctggagaaggcggaagtggaggtggctgacgagctgctggaaaatctggctaaagtgttcagcctgatggaccccaactctcctgagcgcgtgacctttgtgtccagagccctgaagtggtccagtgggggctccgggaagctgggccacccccggctgcaccagctgctggccctcaccctgtggaaagaacaaaactattgtgagtcgaggtatcattttctgcactcagcggacggggagggctgtgccaacatgctggtggagtattccacgtcccgcggcttccgcagcgaggtggacatgttcgtggcccaggccgtgctacagtttctctgtttaaaaaacaaaagtagcgcatcggtggtcttcacgacgtacacccagaagcacccgtccatcgaggacgggcctccgtttgtggagccgctgcttaacttcatctggttcctgctgctggctgtggacggtgggaagctgacggtgttcactgtgctgtgtgagcagtaccagccatccctccggcgggaccccatgtacaacgagtacctcgaccgcataggacagctgttcttcggcgtcccgcccaagcagacgtcttcctacgggggcctgctcgggaaccttctgaccagcctcatgggctcctcagagcaggaggatggggaggagagccccagcgacggcagccccatcgagctggactgaactggccaggccacgtggagacaccacggtcgacgacggctggagggacgtttcagaggcgagtcctgggtggctcctcgccttgggggctcctggccctgaggctggcggtggccgcatgccggcgcgtgtctgtttctgtgcggcggctcagggtggcgcggctgctgctcactgtgctgctgggacccaagagtggggcgtcgcccctgctggccgccgcgtcccccgagattgacccacaataaagcacaggccttaccgcggcgtcaccctctcccactcctttgttctgggtcctttcgggagggctgatgggcagcacaggaggcccgtcctcggggggctgcgcacatcacgctccttgccgggcgtccggcacagctgcggtcaccaaagcaggtgctggccctcggacctgagagcccagccagggcccatgtggtctgcaaatgggagcggctgtttttgaacacggggtcattctgcagtcaggacgaaccggtccccgtcgcagacggagtgcacgtgccctgcgccacatcctcacgctcggtggagggacgcgtgcggcgggacggtgcctacgggtacttgcagctgtgtcccatgtggcatcccagagctgcgccctgctggtctctgtgagcgccacgctgctgtgctggaaatgccgctttaaaaagggataccgtgggactctgcccgtctctttcataacgcaatatttatttgtattgggtgatgattgattctttcgacctaacattttgggttttaaccaaataaccggtccaggagtgagcagctccgttctgtcagatgctactccaaatgttaccagaacgatgacaaaaggggagacgctctattttttcacagttaaatgacagttgtagattgatacgcagttgtgcatgggaaggggaaacgcacagctttatttactgtaaagtggaatttcaggaaggcttgtgtgaaccgttgcgcataaataaaccctttctaccgggctgtgca

SEQ ID NO: 16485 - protein, 274 aa, Homo sapiens
MSQSKHTEARELMYSGALLFFSHGQQNSAADLSMLVLESLEKAEVEVADELLENLAKVFSLMDPNSPERVTFVSRALKWSSGGSGKLGHPRLHQLLALTLWKEQNYCESRYHFLHSADGEGCANMLVEYSTSRGFRSEVDMFVAQAVLQFLCLKNKSSASVVFTTYTQKHPSIEDGPPFVEPLLNFIWFLLLAVDGGKLTVFTVLCEQYQPSLRRDPMYNEYLDRIGQLFFGVPPKQTSSYGGLLGNLLTSLMGSSEQEDGEESPSDGSPIELD

SEQ ID NO: 16486 - DNA, 3021 bp, Homo sapiens
agatagaagcatccagaacgctgtagtatcggcaaagcagaagctggtgtggtgcttgctcagggtcggtgcatgcggttctgcccgtggccccactggcggcatcgtgaggccaggcgtgtctgggagcttgtttttccagagtgccctgtgccagacggctcccggcctcctctgagtcagtcatgtccctgcaggactggaactaggacggccggtcacagagtcagtggtcctgtcgaggctcctgctgtggtgttggggtgggtctccctccagaaccttcactgtgcggggagcacagcaaaaccggaggcctgccaacggcctgcaggctgacgggggtgcgggggcactttctctcttgggtgcgggcttttccctcctggtgccctgcctctgtgcagcacgaagcggtctcctgtggggggagggcctgtgtgccaggctaatgagatgcccggatgtggcggggctgtctgtgtttggggtccctggctgtggtgccttctgaagaggagcccttttctgtggttaactgagcatccaaccctttgcgttctcggctggccttcccgtcctggcaacaccaaggtcattctggtcctcagtggcgttgctgtggctctttatcacctccactgcaattggtttttgtttgtttgttttggggggatggcgcctcgctctgtcatccgtctaggcagtggtgcaatcatggcttactgcggccttgactacccggactcaagcagtcctcccacctcagcctcccgagtagctgggaccacaggtgcacaccaccatgcccagctaatttctgtgttttttgtagagacagggtctcactatgttgctcaggccagtctcaaactcatgagctcaagcgatcctcccacctcagcctcccaaagggctgagattacaggtgtgagcccccgaatccggtgtgcactgctgtttacttagtatttttctttaactagatttatttttaaacaaggctttgtccaaggacatttggctcgcaggcacagagctgattaactcgttatgtatcttttgataataaggcagcgatcattaagaaaaacgtgtagccaatgaaataacatgttctgggccccaccactggactgggaggtgcagcgcatccaagcagaggctgcctcctgccctccacgcctgctgctctcgcaggcaggggctctgctgcttacagcagtgcggccatctcggcttctctccacatcgtctgtcacgcgctggtccccaccatacctctcgccaccccgtgcctctgtccccgtgcggcctgaggagctccagctttccctgccagcggtgctctgggagtggggacgtgatgcagggcgagcatgatgcaacggggcaccccagacccttccctcccgtggggggaggggtgtggcacgcagaggggcagagggcggggacactggccccgtgggggaagaaggtgctgtcacagccgttactgtcccccgtgggaccccagcctggagccccccatcctttggctcctgcctgtggccactcagctctcaggtggccacatgcacatcccctgctccttccctgcgcacctgccctgcccagtggcctttctggtcccagctactgaaaccggtgagctgctccagggtgaggctgctttctggctcctggtgtatttggacacagataggcccttagtgtccagaggcgccccatgcagccctcatggtcagcaggacacccaggatagaccccctccacgcagcacctgggccctgggagcggctgcttttaggatgccacctgttcctgggcgccttgtttttagcttctgacctgaagatgagcgggggagcgcggtggcgagggcacgtgggcgtggctcacggtctcctctctgtggcaggtacatgtcccagagcaagcacacggaggcccgggagctcatgtactcgggagccctgctcttcttcagccatggccagcaaaacagtgcagcagacttgtccatgctggtcctggagtccctggagaaggcggaagtggaggtggctgacgagctgctggaaaatctggctaaagtgttcagcctgatggaccccaactctcctgagcgcgtgacctttgtgtccagagccctgaagtggtccagtgggggctccgggaagctgggccacccccggctgcaccagctgctggccctcaccctgtggaaagaacaaaactattgtgagtcgaggtatcattttctgcactcagcggacggggagggctgtgccaacatgctggtggagtattccacgtcccgcggcttccgcagcgaggtggacatgttcgtggcccaggccgtgctacagtttctctgtttaaaaaacaaaagtagcgcatcggtggtcttcacgacgtacacccagaagcacccgtccatcgaggacgggcctccgtttgtggagccgctgcttaacttcatctggttcctgctgctggctgtggacggtgggaagctgacggtgttcactgtgctgtgtgagcagtaccagccatccctccggcgggaccccatgtacaacgagtacctcgaccgcataggacagctgttcttcggcgtcccgcccaagcagacgtcttcctacgggggcctgctcgggaaccttctgaccagcctcatgggctcctcagagcaggaggatggggaggagagccccagcgacggcagccccatcgagctggactgaactggccaggccacgtggagacaccacggtcgacgacggctggagggacgtttcagaggcgagtcctgggtggctcctcgccttgggggctcctggccctgaggctggcggtggccgcatgccggcgcgtgtctgtttctgtgcggcggctcagggtggcgcggctgctgctcactgtgctgctgggacccaagagtggggcgtcgcccctgctggccgccgcgtcccccgagattgacccacaataaagcacaggccttaccgcggc

SEQ ID NO: 16487 - protein, 274 aa, Homo sapiens; identical to SEQ ID NO: 16485

SEQ ID NO: 16488 - DNA, 285 bp, Homo sapiens
accaacaccacctcacggaaagagatttttgagcagagaagtggggctgtagagcacactgcgccctacagtgacacatgaatcaactggatgtgccaaagcttcaacggctgctcccacaggggccaactgcggtcactgtcatctgatttttatccaatcaacaactactctgtacgtacaaagccaaagctccaaaagtcccgtcctgacacccgctcgcactccctccactcccagaccccgtcctgacacccgctcgcgctccctccactcccagacccc

SEQ ID NO: 16489 - protein, 53 aa, Homo sapiens
MCQSFNGCSHRGQLRSLSSDFYPINNYSVRTKPKLQKSRPDTRSHSLHSQTPS

SEQ ID NO: 16490 - DNA, 2985 bp, Homo sapiens
tgagttcactctgggcagagcccacagtgcacttgtcagcctgacccatgatttttcataagtttaaccaatgttaagaagtattttagaaactccccctttcccgacgggcactggagtgccctacacacgcccctcgcctctcgcccactgccgggaggccctgtggtctctgctgtactcaggcctgcctcggccagttctttcccgcactatctggaaatgcgtggaattgtgagcatctaccccgcggcccctcccgccagctcgctggggcgtcctgcaggccaggctccgggcgctgtctgctcctgcgtggtcccttccgccagctcgggcgctgtctgctcctgcgtggtccctcccgccagctcgctggggcgtcctgcaggccaggctccgggcgctgcctgctccaggggctggccttcgcttcctttctcacgaaagccttacttgtgcccgtcagtttcttcccacagaacaaatatggatttcaaggcgggcgttggggatttgatgtaggatttggggacagacatcctctgacctcagcgttgcccgctgcggagctttgccaggagctggcgtccgtgacttaagtgaaaagctgggtcaaacccagagctccctggctctgcgctacgccgtgtacatgttttctctgggctgacaggggccctgcccctggggcactgagccctccctgtgggtcctcgaacagaagccagggtctgtgcggcacccaccagctgctgggccatggcggagtgttctggtgcgggccagcgcctgaccggtgcgggcggcctcaggagaggagagcttgctcagtgcgtcacgtagtcagggctcaggctggggcccggctccagagcctggtcacattcccaagcttcattctcttcacctgtgaattgcaggcttccctggtgtgccctgcacatgagggaagacacgcgtgaagcactgggtccctccatggccttgggccgcaggaaccgtgggcgcacgagcttgggaaggacatgtcggaggccggcgcctgtgcgggcagaagctgtgtcctccagcccttccaccaccagcatgttctcatttccaggtttctctgtttaaaaaacaaaagtagcgcatcggtggtcttcacgacgtacacccagaagcacccgtccatcgaggacgggcctccgtttgtggagccgctgcttaacttcatctggttcctgctgctggctgtggacgggtgcgtcttgggatcctgcagggggagggggctgtgaatgtgcgggttgtgtgtagacgtggtgtggatagctgtgtgggtgtgtgtgcaagtgtagccatggtgtgggtagccgtgtgggtatatgcatagggtatgagtgctgggtgtagacgtggcataggtgtgtgtgcaggtctgttgggtgtagacatggtagtgcgggtagctgtgtgggtgtatgtgcaagtgtagacatggcgtgggggagtgtaggtgttgggcctctggtagtgtgggtgtgtgcaggtgtggggtggtgtgggtgcagacgtctggggggttgtgtgcgggtgttgggtatccatgtggtgtgggggtgtgtagacgtgtatacaggtgtgagtgcaggtgtagacggcgtatgtgcaggtgttgcgtgtctggtgtgggtagttggggtgcgtgcaggtatgtgtgttgtgtgtagacgtgtgggtagctgtgggggtgtgcaggtgtgtgtactgggtatagacgtggcatgggttgctgggtgtgtgcaggtgttgggtgtttgcaggtaagtgttgggggcgggcgtggtggtgtttgcaggtgaggggtgtaggcgtgtgtgcaggtgagtgttgggtgtgggcgtggtggtgtgtgcaggcgagtgttgggtgcgggcgtggtgatgtgtgcaggcaagtgttgggtgtaggcgtggtgtgtgcaggtgagtgttgggtgtaggcgtggtggtgtttgcaggtgagtgttgggcgcgggcgcggtggtgtgtgcaggtgagtgttgggcgtgggcgtggtggtgtgtgcaggtgagtgttgggcgcgggcgcggtggtgtgtgcaggtgagtgttgggcgcgggcgcggtggtgtgtgcaggtgagtgttgggcgcgggcgtggtggtggttgcaggtgagtgttgggtgtgggcgtggtgtgtgcaggtgagtgttgggcgtgggcgcggtggtgtgtgcaggtgagtgttgggtgcaggcatggttgcaggtgagtgttgggcgcgggcgcggtggtttgtgcaggtgagtgttgggtgcgggcatggtggttgcaggtgagtctgcggtcaccaaagcaggtgctggccctcggacctgagagcccagccagggcccatgtggtctgcaaatgggagcggctgtttttgaacacggggtcattctgcagtcaggacgaaccggtccccgtcgcagacggagtgcacgtgccctgcgccacatcctcacgctcggtggagggacgcgtgcggcgggacggtgcctacgggtacttgcagctgtgtcccatgtggcatcccagagctgcgccctgctggtctctgtgagcgccacgctgctgtgctggaaatgccgctttaaaaagggataccgtgggactctgcccgtctctttcataacgcaatatttatttgtattgggtgatgattgattctttcgacctaacattttgggttttaaccaaataaccggtccaggagtgagcagctccgttctgtcagatgctactccaaatgttaccagaacgatgacaaaaggggagacgctctattttttcacagttaaatgacagttgtagattgatacgcagttgtgcatgggaaggggaaacgcacagctttatttactgtaaagtggaatttcaggaaggcttgtgtgaaccgttgcgcataaataaaccctttctaccgggctgtgca

SEQ ID NO: 16491 - protein, 109 aa, Homo sapiens
MAWGSVGVGPLVVWVCAGVGWCGCRRLGGCVRVLGIHVVWGCVDVYTGVSAGVDGVCAGVACLVWVVGVRAGMCVVCRRVGSCGGVQVCVLGIDVAWVAGCVQVLGVCR

SEQ ID NO: 16492 - DNA, 2280 bp, Homo sapiens
agccaagagtaaagatgggcacctttccagaggtcaccagctccaggctgtaggctgaacaggaggcccagggcgcaggttataatgtcatggggccaagggtctgggcagaccccaggaggggcgctgggtctaggggcaggggacagccaggctgaagtctagacccagagggcacccgacgtggggctgggtgccaggcctgggctatgggccctctgttccagggtgctggcccaccccacgctctccagaggaccagggcggctccctggagagcagttttgctctctgcccactctcggtaggggccacagctccaagggcgtttataaacagatgagcctcccttctcccaccaccccaagacttgcttgagctacaaaataaggatcttcataaaaatagcaccatctgaaaggaaggcaagttggcccaggccccagcagcaccagggccacagagtgagcttggatggcagcccccgaccctgtccagcccggcccggcccggcccttcggcccttcggcccttctcaggacttcgccgggggaggctgcacctgccctcccgcagaggggcagcccctgtgtagcagccccggcctcagcgtgggcacaggggccaggcctgcggcaggactgctgggagctgaggtgccggggaggaggaaggggctgggctctgggggaagcggcccctctgtggggaccccagcccctctgtggggaccccagcgctgcagcctcctcagcccaagcctgtgcccacctttgcccctaggagattgtggactggttcaatgcactccgagctgctcgcttccactacctgcaggtggcattcccaggggccggcgacgcagatctggtgccaaagctctccaggaactacctgaaggaaggctacatggagaagacggggcccaagcaaacggaaggcttccggaagcgctggttcaccatggatgaccgcaggctcatgtacttcaaagaccccctggacgccttcgcccgaggggaagtcttcattggcagcaaggagagtggctacacggtgctgcatgggttcccgccgtccacccagggccaccactggccacatggcatcaccatcgtcacgcccgaccgcaagtttctgtttgcctgcgagacggagtccgaccagagggagtgggtggcggccttccagaaggcggtggacaggcccatgctgccccaggagtacgcagtggaggcgcacttcaagcataaaccttagcgagtgcggctggaggaccacggacattggactcactgtggctggacggaggggacccgtggatgggggggctctggcgtcctgaggccacctggccccacctgctcctcagggcagcccggcgcggccaggtagggcccgagcttcagcttccaggatgcttctctggaacctcaaggcaggcagcccaggccctgggcctgatctctaaccccgtcatgctgctgctgaccacacccagccaacctgcccctccctgacccggggccccctttcctccagggcccagtctggctcccgagctcagacacagcccccaggagccgcccaccacggctgtgggaacttccaggcctcagcgcagagccctgcttggggccagcacggtgggcagctgccggccgctggggactgggccctgctcgcatgccgccccgccctccccccacctccacgactatttattgagcgcctgttgtgtgtcacggggctatgagggccgtggggtgtttgggtggattatccacacaggtcccggcccctgcccgggctggagttgccacagcctgtgctcctggtcctcacctggaggggccagcaggctgccgtcccaccacacgtggcctctgcgcccagcacggtgctcgccgacagtggtgtctgaacccttggggacgagggcctgggccgcggtgaggccaccagaggcaggagtggccctgggggtcccgggcactgtcgcgcttgctgcaggcggcccagccgtgtatttatttttcacctatctccttcctgtcaaggcaggccgggctccagggctccccttgcgtggggcatgtaggtgggggaggcgtctgcaggtcacctggggggcccagccctctcccagccttgcctggctgagctgtgttccaggggagccctggacaagccctcataggcagggagggggtttccgaggccaggcatccgccgccccgtgtcgcatcctggaataaaatgtggctctggcatggttcc

SEQ ID NO: 16493 - protein, 125 aa, Homo sapiens
MTAGSCTSKTPWTPSPEGKSSLAARRVATRCCMGSRRPPRATTGHMASPSSRPTASFCLPARRSPTRGSGWRPSRRRWTGPCCPRSTQWRRTSSINLSECGWRTTDIGLTVAGRRGPVDGGALAS

SEQ ID NO: 16494 - DNA, 2301 bp, Homo sapiens
tttccctttctccctttctcctttcctcctttctcctttctcctttctcctttccctttctcctttctccctttctcctttctccctttctcctttctccctttctcctttctccctttctcctttccctttctcctttctcctttctctcctttccctttctcctttctcctttctcctttccctttcctttctcctttccctttctcctttccctttctcctttctctttctcctttccctttctcctttctcctttccctttctccctttctccctttctcctttctcctttctctttctccctttctcctttctcctttctcctttctcctttctcctttccctttccctttccctgcccatcttcctatctccctgtctcctccatgtcccctctccccgtccgtctccccctgtccgtgtcccccgtccgtgtcccccgtgtcttctccccatgtcccctctgtcctgtccatcgtcactccttttgtttcctcccccccatccactgtcaccgactcgtgtcccctttcccccacagggtaccgtgagggttttctctggaagcgtggccgggacaacgggcagtttttgagccggaagtttgtgctgacagaacgagagggtgctctgaagtatttcaacagaaatgatgccaaggagcccaaggccgtgatgaagatcgagcacctgaacgccaccttccagccggccaagatcggccacccccacggcctgcaggtcacctacctgaaggacaacagcacccgtaacatcttcatctaccatgaggacgggaaggagattgtggactggttcaatgcactccgagctgctcgcttccactacctgcaggtggcattcccaggggccggcgacgcagatctggtgccaaagctctccaggaactacctgaaggaaggctacatggagaagacggggcccaagcaaacggaaggcttccggaagcgctggttcaccatggatgaccgcaggctcatgtacttcaaagaccccctggacgccttcgcccgaggggaagtcttcattggcagcaaggagagtggctacacggtgctgcatgggttcccgccgtccacccagggccaccactggccacatggcatcaccatcgtcacgcccgaccgcaagtttctgtttgcctgcgagacggagtccgaccagagggagtgggtggcggccttccagaaggcggtggacaggcccatgctgccccaggagtacgcagtggaggcgcacttcaagcataaaccttagcgagtgcggctggaggaccacggacattggactcactgtggctggacggaggggacccgtggatgggggggctctggcgtcctgaggccacctggccccacctgctcctcagggcagcccggcgcggccaggtagggcccgagcttcagcttccaggatgcttctctggaacctcaaggcaggcagcccaggccctgggcctgatctctaaccccgtcatgctgctgctgaccacacccagccaacctgcccctccctgacccggggccccctttcctccagggcccagtctggctcccgagctcagacacagcccccaggagccgcccaccacggctgtgggaacttccaggcctcagcgcagagccctgcttggggccagcacggtgggcagctgccggccgctggggactgggccctgctcgcatgccgccccgccctccccccacctccacgactatttattgagcgcctgttgtgtgtcacggggctatgagggccgtggggtgtttgggtggattatccacacaggtcccggcccctgcccgggctggagttgccacagcctgtgctcctggtcctcacctggaggggccagcaggctgccgtcccaccacacgtggcctctgcgcccagcacggtgctcgccgacagtggtgtctgaacccttggggacgagggcctgggccgcggtgaggccaccagaggcaggagtggccctgggggtcccgggcactgtcgcgcttgctgcaggcggcccagccgtgtatttatttttcacctatctccttcctgtcaaggcaggccgggctccagggctccccttgcgtggggcatgtaggtgggggaggcgtctgcaggtcacctggggggcccagccctctcccagccttgcctggctgagctgtgttccaggggagccctggacaagccctcataggcagggagggggtttccgaggccaggcatccgccgccccgtgtcgcatcctggaataaaatgtggctctggcatggttcc

SEQ ID NO: 16495 - protein, 200 aa, Homo sapiens
MKIEHLNATFQPAKIGHPHGLQVTYLKDNSTRNIFIYHEDGKEIVDWFNALRAARFHYLQVAFPGAGDADLVPKLSRNYLKEGYMEKTGPKQTEGFRKRWFTMDDRRLMYFKDPLDAFARGEVFIGSKESGYTVLHGFPPSTQGHHWPHGITIVTPDRKFLFACETESDQREWVAAFQKAVDRPMLPQEYAVEAHFKHKP

SEQ ID NO: 16496 - DNA, 2090 bp, Homo sapiens
ccttctccctcagcctgtttcgtaaacatgttctgggtccctgcagtgtgtccctgcagagtcccctcagagactctgtcctagccacatctgggtctctcgctcaccagcccatctccaggcccccgtgtctggcgcctgttggctctttgctaaatttcatggcctcccacgggaacgacgccgcgagagccaggtttgagtccaaagtaccctccttctactaccggcccacgccctccgactgccagctccttcgagagcagtggatccgggccaagtacgagcgacaggagttcatctacccggagaagcaggagccctactcggcagggtaccgtgagggttttctctggaagcgtggccgggacaacgggcagtttttgagccggaagtttgtgctgacagaacgagagggtgctctgaagtatttcaacagaaatgatgccaaggagcccaaggccgtgatgaagatcgagcacctgaacgccaccttccagccggccaagatcggccacccccacggcctgcaggtcacctacctgaaggacaacagcacccgtaacatcttcatctaccatgaggacgggaaggagattgtggactggttcaatgcactccgagctgctcgcttccactacctgcaggtggcattcccaggggccggcgacgcagatctggtgccaaagctctccaggaactacctgaaggaaggctacatggagaagacggggcccaagcaaacggaaggcttccggaagcgctggttcaccatggatgaccgcaggctcatgtacttcaaagaccccctggacgccttcgcccgaggggaagtcttcattggcagcaaggagagtggctacacggtgctgcatgggttcccgccgtccacccagggccaccactggccacatggcatcaccatcgtcacgcccgaccgcaagtttctgtttgcctgcgagacggagtccgaccagagggagtgggtggcggccttccagaaggcggtggacaggcccatgctgccccaggagtacgcagtggaggcgcacttcaagcataaaccttagcgagtgcggctggaggaccacggacattggactcactgtggctggacggaggggacccgtggatgggggggctctggcgtcctgaggccacctggccccacctgctcctcagggcagcccggcgcggccaggtagggcccgagcttcagcttccaggatgcttctctggaacctcaaggcaggcagcccaggccctgggcctgatctctaaccccgtcatgctgctgctgaccacacccagccaacctgcccctccctgacccggggccccctttcctccagggcccagtctggctcccgagctcagacacagcccccaggagccgcccaccacggctgtgggaacttccaggcctcagcgcagagccctgcttggggccagcacggtgggcagctgccggccgctggggactgggccctgctcgcatgccgccccgccctccccccacctccacgactatttattgagcgcctgttgtgtgtcacggggctatgagggccgtggggtgtttgggtggattatccacacaggtcccggcccctgcccgggctggagttgccacagcctgtgctcctggtcctcacctggaggggccagcaggctgccgtcccaccacacgtggcctctgcgcccagcacggtgctcgccgacagtggtgtctgaacccttggggacgagggcctgggccgcggtgaggccaccagaggcaggagtggccctgggggtcccgggcactgtcgcgcttgctgcaggcggcccagccgtgtatttatttttcacctatctccttcctgtcaaggcaggccgggctccagggctccccttgcgtggggcatgtaggtgggggaggcgtctgcaggtcacctggggggcccagccctctcccagccttgcctggctgagctgtgttccaggggagccctggacaagccctcataggcagggagggggtttccgaggccaggcatccgccgccccgtgtcgcatcctggaataaaatgtggctctggcatggttcc

SEQ ID NO: 16497 - protein, 302 aa, Homo sapiens
MASHGNDAARARFESKVPSFYYRPTPSDCQLLREQWIRAKYERQEFIYPEKQEPYSAGYREGFLWKRGRDNGQFLSRKFVLTEREGALKYFNRNDAKEPKAVMKIEHLNATFQPAKIGHPHGLQVTYLKDNSTRNIFIYHEDGKEIVDWFNALRAARFHYLQVAFPGAGDADLVPKLSRNYLKEGYMEKTGPKQTEGFRKRWFTMDDRRLMYFKDPLDAFARGEVFIGSKESGYTVLHGFPPSTQGHHWPHGITIVTPDRKFLFACETESDQREWVAAFQKAVDRPMLPQEYAVEAHFKHKP

SEQ ID NO: 16498 - DNA, 2347 bp, Homo sapiens
ggcacgaggcgaccgcggcggagacacgagcggcggcggcggagcccagagggcggcgggaatgcggaaccggcgcgcgggctgaggccgcccgggatggcgcaggggcggcggcggcgggcggcctgcgcggggccctagcgagccgggctgacgctcccggccccggccccggcatcggcatcgcgggcgcatcgcggccatggccaaggagcggcgcagggcggtcctggagctgctgcagcggccggggaacgcgcgctgcgcggactgcggcgccccggatcccgactgggcctcctacactctgggcgtcttcatctgcctgagctgctcgggaatccaccggaatatcccccaggtcagcaaggtgaagtccgtccgcctggacgcctgggaggaggcccaagtggagttcatggcctcccacgggaacgacgccgcgagagccaggtttgagtccaaagtaccctccttctactaccggcccacgccctccgactgccagctccttcgagagcagtggatccgggccaagtacgagcgacaggagttcatctacccggagaagcaggagccctactcggcagggtaccgtgagggttttctctggaagcgtggccgggacaacgggcagtttttgagccggaagtttgtgctgacagaacgagagggtgctctgaagtatttcaacagaaatgatgccaaggagcccaaggccgtgatgaagatcgagcacctgaacgccaccttccagccggccaagatcggccacccccacggcctgcaggtcacctacctgaaggacaacagcacccgtaacatcttcatctaccatgaggacgggaaggagattgtggactggttcaatgcactccgagctgctcgcttccactacctgcaggtggcattcccaggggccggcgacgcagatctggtgccaaagctctccaggaactacctgaaggaaggctacatggagaagacggggcccaagcaaacggaaggcttccggaagcgctggttcaccatggatgaccgcaggctcatgtacttcaaagaccccctggacgccttcgcccgaggggaagtcttcattggcagcaaggagagtggctacacggtgctgcatgggttcccgccgtccacccagggccaccactggccacatggcatcaccatcgtcacgcccgaccgcaagtttctgtttgcctgcgagacggagtccgaccagagggagtgggtggcggccttccagaaggcggtggacaggcccatgctgccccaggagtacgcagtggaggcgcacttcaagcataaaccttagcgagtgcggctggaggaccacggacattggactcactgtggctggacggaggggacccgtggatgggggggctctggcgtcctgaggccacctggccccacctgctcctcagggcagcccggcgcggccaggtagggcccgagcttcagcttccaggatgcttctctggaacctcaaggcaggcagcccaggccctgggcctgatctctaaccccgtcatgctgctgctgaccacacccagccaacctgcccctccctgacccggggccccctttcctccagggcccagtctggctcccgagctcagacacagcccccaggagccgcccaccacggctgtgggaacttccaggcctcagcgcagagccctgcttggggccagcacggtgggcagctgccggccgctggggactgggccctgctcgcatgccgccccgccctccccccacctccacgactatttattgagcgcctgttgtgtgtcacggggctatgagggccgtggggtgtttgggtggattatccacacaggtcccggcccctgcccgggctggagttgccacagcctgtgctcctggtcctcacctggaggggccagcaggctgccgtcccaccacacgtggcctctgcgcccagcacggtgctcgccgacagtggtgtctgaacccttggggacgagggcctgggccgcggtgaggccaccagaggcaggagtggccctgggggtcccgggcactgtcgcgcttgctgcaggcggcccagccgtgtatttatttttcacctatctccttcctgtcaaggcaggccgggctccagggctccccttgcgtggggcatgtaggtgggggaggcgtctgcaggtcacctggggggcccagccctctcccagccttgcctggctgagctgtgttccaggggagccctggacaagccctcataggcagggagggggtttccgaggccaggcatccgccgccccgtgtcgcatcctggaataaaatgtggctctggcatggttcc

SEQ ID NO: 16499 - protein, 374 aa, Homo sapiens
MAKERRRAVLELLQRPGNARCADCGAPDPDWASYTLGVFICLSCSGIHRNIPQVSKVKSVRLDAWEEAQVEFMASHGNDAARARFESKVPSFYYRPTPSDCQLLREQWIRAKYERQEFIYPEKQEPYSAGYREGFLWKRGRDNGQFLSRKFVLTEREGALKYFNRNDAKEPKAVMKIEHLNATFQPAKIGHPHGLQVTYLKDNSTRNIFIYHEDGKEIVDWFNALRAARFHYLQVAFPGAGDADLVPKLSRNYLKEGYMEKTGPKQTEGFRKRWFTMDDRRLMYFKDPLDAFARGEVFIGSKESGYTVLHGFPPSTQGHHWPHGITIVTPDRKFLFACETESDQREWVAAFQKAVDRPMLPQEYAVEAHFKHKP

SEQ ID NO: 16500 - DNA, 3117 bp, Homo sapiens
gtgagggtgtgagggtcgcgctcctgctgtctggactttttctgtcctactgagacacggccgacatgagatgatgaacctcaagtaccaccccagacaacaaggctgcttcatcaggacacaaacctgcctgtaccaggacctctgacctgtgtgcagcagagacactgaggataccattggcatcaatgtcaaaagtgacttcaatctgaggaacaccttggggttcaggaggtatgcccgtgaattcaaacttgccaagcaggttgttatccttggacatggcacgctcaccttcataaacctgaataagcacaccaggctggttgtcagaataggtaatgaaggtctgtgtctgcttggtaggaatggtggtattacagttgatgaggatggtcatgactccactagcagtttcaataccaagggaaagaggagtgacgtccaagagcagcaaatcttgaacattttcagacttgtctccagacaggatggctgcctggacagccataagcaacagcttcatcatggctgatgctcttattcagttcttttccattgaagaagtcttggagaagcttctgaatcttggggatactaatagaaccaccaaccaggacaatatcatgaatttgtgacttgtctggtttggcatctcgaagggctttctctactgggtccagggtgccacagaacaggtcagcattcaattcttcaaactgggcacaggtaatggaggtatagaagtcaattcctacatagagagaatcgatctcaatactgacttgggtgctggaagagagagtacgcttagcatgttcacaagcagtacggaggcatcttacagctctcttgctctcactgatgtccttcttatgcttgcgcttgagctcagcaataaaatggttgaccattcggttgtcaaaatcttctccacccaagtggttgtctctggctgtagacttgacctcaaagattccatcctcaatagtgaggattgacacaccgaaagtgccaccccccaggtcaaagataagcacgtttctttgtgctccaacctttttgtctgaacttttgtaaacaatagcagcaacagttggctcattaataattctaagtacattgagaccagcaatagttccagcatctttggtaacctgaaactgagagtcattaaagtaagctggcactgtgaccacagcactggtaacagtcttcccaaggtaggcttctgcaatttccttcatctttgtcagaacaatagaggatacctcctctggatagaagcttttggtctctcccttgtattctacttggacctggggcctgtcagcatcattcactaccatgaagggccaatgcttcatatcagactggacaacagcatcatcaaatctgcgtccaatcagacgtttggcatcaaaaactgtgttggtggggttcattgcaacttgatgctttgcggcatcaccaatcaactgtttagtgtccataaaggcgacatagcttggagtggttcagtttccctgatcattggcaattatctctacttttccgtgctggaaaacacccacgtaagagtaggtggtgctaagatcaataccaactgcaggtcccttggacatggttgctggcatgtagccctggctccgataaagaagaaagccacaggaacccgagagctgcaggcgagttcaatgagctaggatttcttaatatatatgtgataatgttttaactttgataattgacttttataatgacttgagtagtcttaaattgtctttcatttaaaacttttgttcttttaaaaaagcaccaagtctatgctactaacaaaaatttccttttaccatgtagactacttgggatgaaaataacttttcataattactatcatgaagggaggagagtggaaagttgccagatactgcagcaagatataaagatgaattcttcaaatgaggaagcaaactttatcaagtggttgaatttcttagatcaccttgttggacataatttcttgtaaacaaattatgcagtcagtgtcacgttcatgcagagtcttttaacttaaaattcattacaggtaacactttcaaaaagaagttctgtagtcttgcatactatttaccacaccatatttactgcacttagcttcattatggaggaaagaacaatagtaaactatcaataactgagacaataatcatattcattagtgatgagtcaaacaggttatacttattttttaaaataaaaacatttgtaaatttttctctacgtttttaaaacaacagtttaacaatagcagttctgttattttagctttaattttttgtaccaacagttaatttgctcatgcccaaagatttacatttataaaaaatgttctgccatgcaagttttaagagatttttgaattgttgacaatactcagcacagtcacatgtctctcataaatccacccagacttaagaaccaattttcagtgcaactcatgaagacaaagaatagccattataaacacattgttgaaaatcatttaaaaaatcattaaatttttttgcatttaatattttttcagctttcttaagatataattaacaaaaattgtatatattcaagttgtgttatgtgaggttttgatacatgtatacatagtaaaataattaccacagttaagctaattatactatacatagtaaaataattaccacaatcaagctaattaatatatttattatcacacataattctttttcttgttgtggtgagaatacttaagatctactctcttagaaaatttcaggtatataatacattattattaaccatagttgccatgctatacattagggctccagaacttattcatttcataacttcaagttataaaagtcacgataaaagtttgtgccttttgcaagtttgtaccttttgatgaacatcttcccatatcttcccattttcctcagtcccctgcacctggaaaccacccttctaaactgtttatatgagttcaccttttttcagattccacatataagtgagatcatgcagtgcttgtgtttctgtgtctggcttatttcacttagcataaagtcttccaagttc

SEQ ID NO: 16501 - protein, 115 aa, Homo sapiens
MLHIRLDNSIIKSASNQTFGIKNCVGGVHCNLMLCGITNQLFSVHKGDIAWSGSVSLIIGNYLYFSVLENTHVRVGGAKINTNCRSLGHGCWHVALAPIKKKATGTRELQASSMS

SEQ ID NO: 16502 - DNA, 804 bp, Homo sapiens
agctatgatcttgaagaacaagaacaaagtaacagaaactgttaaaagatctgcttcactgaaggcaacaagacacaaatttcaggaagggcctatatcagaaagaaggaacggacgcacacctccccaaggagccctggcactaactacaacacacacagggtttggccagacctggaccagcttttggaaaacactaactcaactgtcatccaacttgctgcagttaaccacccgtcagtcacccatcagggggcatgaagctctggtttgatcactttgctaagggctgcacaaggaagaaaaaaagtcataaaacactatattgtcaagcagtactcactgcttctcctcttcactgtcctctaccttgagtccctcaaaatatttcacctgcatgacatttcttcacttgagatgctgtttgccctttaaatggcatcttagcatttgaggtcctctagctgtcttctttcttttccttaggctgacaattctgctgaaagtttgtgaaaagacttgacattcacaaaatctaaggtcttctggtgataccaaatgtaacaggaatggaagcatcatcagcactgtgcaacattatgtttctttagcatggtttggctcaggttacaaaacctgggcagctgtaccacagacagaggctatggccatttcccctctattttatgatcatccctgtttcattactttgtgctttcactacatcctggcctagcagtctgtagcagcaggctagagagataaggccttctggtaataaataaagtagaaggttaaaaccac

SEQ ID NO: 16503 - protein, 89 aa, Homo sapiens
MILKNKNKVTETVKRSASLKATRHKFQEGPISERRNGRTPPQGALALTTTHTGFGQTWTSFWKTLTQLSSNLLQLTTRQSPIRGHEALV

SEQ ID NO: 16504 - DNA, 2170 bp, Homo sapiens
ctcggcacatgtaaatgttttttgccttcacttgcacatttgcagttgaaaaacaatagacaatcaaaagattgattcatcattattctatgcacttttctgtatatcactttattaattaaatggaaaggttttgtgaaagccagataaaaagtatcttgtgatagggattctgtgttctaccttttttctaattgattacatgagattgcttattatagatcctctacctgtttcaacttcataatgaaataacaccatacctcatctaatagaaaataagattgatctgttcaaaaatgtattcttagtacaaaacactaaatagtgctttattattataacagtcgtaatgttttatttcttttagttgggacagaaataacccagagccctggaacaaactgggtcccaatgatcaatacaagttctactcagtgaatgtggattacagcaagctgaagaaggaacgtccagatttctaaatgaaatgtttcactataacgctgctttagaatgaaggtcttccagaagccacatccgcacaattttccacttaaccaggaaatatttctcctctaaatgcatgaaatcatgttggagatctctattgtaatctctattggagattacaatgattaaatcaataaataactgaaacttgatatgtgtcacttttttatgctgaaagtatgctctgaactttagagtataggaaattaactattagaatttaaagaatttcttgaatttctgtagtttgaaaatacgactttaagctgctttagtaaaacacttccattttgtgtatagactgttggtaacttcactagagcatacataacaactggaactggaaattatacaaaagtaaattgggaaggatactccagcatctgacactggcaaaatggaaacctttgagtttctcttactggctgttgaagtgtgtgcagtttttaacaatggtttttacttggcatctctttgttgtgattttcaaggttataagttgctttggtcctaggattgaagttgaaatctgagtttatcagtgctaaccatggtgctagtagtcaagagatcttgagaattttggctgctgagtcttggtgcagggtgcaggttttcttttcttttttcttttttttttttttgagatagtctctgtcacccaggctggagtgcagtggtacaaacatggatcactgcagcctctacctcccgggcttaagtgatcctcctgcctcagcccctaagtagccgggactacaggtatgtgccaccatgcccagttaatttttgtaattttttttagagacagggttttgccatgttgcccaggctggtctcaaactcttgagctcaagcgatccattctcctcagcctcccagggtgctgggattacaggcgtgagccattgcgcttagccatggtgcaggttttcaaaggccaggaagtatattcataattttaagatggggaatatagcaagttttcacataggtgtgtgtaagtcatcacatcatagaaacttgaggaattcagtgacattaattttggattttcatacgtaagtatacaattaaatgtttacagggtagtagaagcacattttaaatgtcaggaactgaactaagtatttgaattacgtggattatctcaaaaattttgaaattgttaaacgagttgaattacttgaattcattctgttagtcaaatggtggatatttacacccatgtagttttgaatttagagtgtgtagagtgttttcagttaccagactccatgcttttacctcctatgtgtcaggtataatttgaacctctaagaacagggtttctcaaccttgccactgttgactatttctgaaagacagtttggtttagcagaccatcccatgcgctttagcttgtttagtagctaacttgggctctgccactacagacaaaaagcactctttccctccaattcccacaggctatgagaagaatggagacattaccaaatgtccattggtgggcaaaattgcttcattcctacctctgttgagaattactctagatcctttggcacaaattacctcaaagtttaaaattgtgtaaacaaacagtgtgtcatgtaattgaaaaacattaagcaactccaaataaatgctacattaagaa

SEQ ID NO: 16505 - protein, 64 aa, Homo sapiens
MCHHAQLIFVIFFRDRVLPCCPGWSQTLELKRSILLSLPGCWDYRREPLRLAMVQVFKGQEVYS

SEQ ID NO: 16506 - DNA, 1953 bp, Homo sapiens
gtcctgggtgactttggaagtccgtagtgtctcattgcagataatttttagcttagggcctggtggctaggtcggttctctcctttccagtcggagacctctgccgcaaacatgctccgccagatcatcggtcaggccaagaagcatccgagcttgggacagaaataacccagagccctggaacaaactgggtcccaatgatcaatacaagttctactcagtgaatgtggattacagcaagctgaagaaggaacgtccagatttctaaatgaaatgtttcactataacgctgctttagaatgaaggtcttccagaagccacatccgcacaattttccacttaaccaggaaatatttctcctctaaatgcatgaaatcatgttggagatctctattgtaatctctattggagattacaatgattaaatcaataaataactgaaacttgatatgtgtcacttttttatgctgaaagtatgctctgaactttagagtataggaaattaactattagaatttaaagaatttcttgaatttctgtagtttgaaaatacgactttaagctgctttagtaaaacacttccattttgtgtatagactgttggtaacttcactagagcatacataacaactggaactggaaattatacaaaagtaaattgggaaggatactccagcatctgacactggcaaaatggaaacctttgagtttctcttactggctgttgaagtgtgtgcagtttttaacaatggtttttacttggcatctctttgttgtgattttcaaggttataagttgctttggtcctaggattgaagttgaaatctgagtttatcagtgctaaccatggtgctagtagtcaagagatcttgagaattttggctgctgagtcttggtgcagggtgcaggttttcttttcttttttcttttttttttttttgagatagtctctgtcacccaggctggagtgcagtggtacaaacatggatcactgcagcctctacctcccgggcttaagtgatcctcctgcctcagcccctaagtagccgggactacaggtatgtgccaccatgcccagttaatttttgtaattttttttagagacagggttttgccatgttgcccaggctggtctcaaactcttgagctcaagcgatccattctcctcagcctcccagggtgctgggattacaggcgtgagccattgcgcttagccatggtgcaggttttcaaaggccaggaagtatattcataattttaagatggggaatatagcaagttttcacataggtgtgtgtaagtcatcacatcatagaaacttgaggaattcagtgacattaattttggattttcatacgtaagtatacaattaaatgtttacagggtagtagaagcacattttaaatgtcaggaactgaactaagtatttgaattacgtggattatctcaaaaattttgaaattgttaaacgagttgaattacttgaattcattctgttagtcaaatggtggatatttacacccatgtagttttgaatttagagtgtgtagagtgttttcagttaccagactccatgcttttacctcctatgtgtcaggtataatttgaacctctaagaacagggtttctcaaccttgccactgttgactatttctgaaagacagtttggtttagcagaccatcccatgcgctttagcttgtttagtagctaacttgggctctgccactacagacaaaaagcactctttccctccaattcccacaggctatgagaagaatggagacattaccaaatgtccattggtgggcaaaattgcttcattcctacctctgttgagaattactctagatcctttggcacaaattacctcaaagtttaaaattgtgtaaacaaacagtgtgtcatgtaattgaaaaacattaagcaactccaaataaatgctacattaagaa

SEQ ID NO: 16507 - protein, 64 aa, Homo sapiens; identical to SEQ ID NO: 16505

SEQ ID NO: 16508 - DNA, 2062 bp, Homo sapiens
aagggtccttcaggtaggaggtcctgggtgactttggaagtccgtagtgtctcattgcagataatttttagcttagggcctggtggctaggtcggttctctcctttccagtcggagacctctgccgcaaacatgctccgccagatcatcggtcaggccaagaagcatccgagcttgatccccctctttgtatttattggaactggagctactggagcaacactgtatctcttgcgtctggcattgttcaatccagatgtttgttgggacagaaataacccagagccctggaacaaactgggtcccaatgatcaatacaagttctactcagtgaatgtggattacagcaagctgaagaaggaacgtccagatttctaaatgaaatgtttcactataacgctgctttagaatgaaggtcttccagaagccacatccgcacaattttccacttaaccaggaaatatttctcctctaaatgcatgaaatcatgttggagatctctattgtaatctctattggagattacaatgattaaatcaataaataactgaaacttgatatgtgtcacttttttatgctgaaagtatgctctgaactttagagtataggaaattaactattagaatttaaagaatttcttgaatttctgtagtttgaaaatacgactttaagctgctttagtaaaacacttccattttgtgtatagactgttggtaacttcactagagcatacataacaactggaactggaaattatacaaaagtaaattgggaaggatactccagcatctgacactggcaaaatggaaacctttgagtttctcttactggctgttgaagtgtgtgcagtttttaacaatggtttttacttggcatctctttgttgtgattttcaaggttataagttgctttggtcctaggattgaagttgaaatctgagtttatcagtgctaaccatggtgctagtagtcaagagatcttgagaattttggctgctgagtcttggtgcagggtgcaggttttcttttcttttttcttttttttttttttgagatagtctctgtcacccaggctggagtgcagtggtacaaacatggatcactgcagcctctacctcccgggcttaagtgatcctcctgcctcagcccctaagtagccgggactacaggtatgtgccaccatgcccagttaatttttgtaattttttttagagacagggttttgccatgttgcccaggctggtctcaaactcttgagctcaagcgatccattctcctcagcctcccagggtgctgggattacaggcgtgagccattgcgcttagccatggtgcaggttttcaaaggccaggaagtatattcataattttaagatggggaatatagcaagttttcacataggtgtgtgtaagtcatcacatcatagaaacttgaggaattcagtgacattaattttggattttcatacgtaagtatacaattaaatgtttacagggtagtagaagcacattttaaatgtcaggaactgaactaagtatttgaattacgtggattatctcaaaaattttgaaattgttaaacgagttgaattacttgaattcattctgttagtcaaatggtggatatttacacccatgtagttttgaatttagagtgtgtagagtgttttcagttaccagactccatgcttttacctcctatgtgtcaggtataatttgaacctctaagaacagggtttctcaaccttgccactgttgactatttctgaaagacagtttggtttagcagaccatcccatgcgctttagcttgtttagtagctaacttgggctctgccactacagacaaaaagcactctttccctccaattcccacaggctatgagaagaatggagacattaccaaatgtccattggtgggcaaaattgcttcattcctacctctgttgagaattactctagatcctttggcacaaattacctcaaagtttaaaattgtgtaaacaaacagtgtgtcatgtaattgaaaaacattaagcaactccaaataaatgctacattaagaa

SEQ ID NO: 16509 - protein, 81 aa, Homo sapiens; identical to SEQ ID NO: 1912

SEQ ID NO: 16510 - DNA, 664 bp, Homo sapiens
ctcggcacatgtaaatgttttttgccttcacttgcacatttgcagttgaaaaacaatagacaatcaaaagattgattcatcattattctatgcacttttctgtatatcactttattaattaaatggaaaggttttgtgaaagccagataaaaagtatcttgtgatagggattctgtgttctaccttttttctaattgattacatgagattgcttattatagatcctctacctgtttcaacttcataatgaaataacaccatacctcatctaatagaaaataagattgatctgttcaaaaatgtattcttagtacaaaacactaaatagtgctttattattataacagtcgtaatgttttatttcttttagttgggacagaaataacccagagccctggaacaaactgggtcccaatgatcaatacaagttctactcagtgaatgtggattacagcaagctgaagaaggaacgtccagatttctaaatgaaatgtttcactataacgctgctttagaatgaaggtcttccagaagccacatccgcacaattttccacttaaccaggaaatatttctcctctaaatgcatgaaatcatgttggagatctctattgtaatctctattggagattacaatgattaaatcaataaataactgaaacttg

SEQ ID NO: 16511 - protein, 43 aa, Homo sapiens
CFISFSWDRNNPEPWNKLGPNDQYKFYSVNVDYSKLKKERPDF

SEQ ID NO: 16512 - DNA, 447 bp, Homo sapiens
gtcctgggtgactttggaagtccgtagtgtctcattgcagataatttttagcttagggcctggtggctaggtcggttctctcctttccagtcggagacctctgccgcaaacatgctccgccagatcatcggtcaggccaagaagcatccgagcttgggacagaaataacccagagccctggaacaaactgggtcccaatgatcaatacaagttctactcagtgaatgtggattacagcaagctgaagaaggaacgtccagatttctaaatgaaatgtttcactataacgctgctttagaatgaaggtcttccagaagccacatccgcacaattttccacttaaccaggaaatatttctcctctaaatgcatgaaatcatgttggagatctctattgtaatctctattggagattacaatgattaaatcaataaataactgaaacttg

SEQ ID NO: 16513 - protein, 65 aa, Homo sapiens
VGSLLSSRRPLPQTCSARSSVRPRSIRAWDRNNPEPWNKLGPNDQYKFYSVNVDYSKLKKERPDF

SEQ ID NO: 16514 - DNA, 556 bp, Homo sapiens
aagggtccttcaggtaggaggtcctgggtgactttggaagtccgtagtgtctcattgcagataatttttagcttagggcctggtggctaggtcggttctctcctttccagtcggagacctctgccgcaaacatgctccgccagatcatcggtcaggccaagaagcatccgagcttgatccccctctttgtatttattggaactggagctactggagcaacactgtatctcttgcgtctggcattgttcaatccagatgtttgttgggacagaaataacccagagccctggaacaaactgggtcccaatgatcaatacaagttctactcagtgaatgtggattacagcaagctgaagaaggaacgtccagatttctaaatgaaatgtttcactataacgctgctttagaatgaaggtcttccagaagccacatccgcacaattttccacttaaccaggaaatatttctcctctaaatgcatgaaatcatgttggagatctctattgtaatctctattggagattacaatgattaaatcaataaataactgaaacttg

SEQ ID NO: 16515 - protein, 81 aa, Homo sapiens; identical to SEQ ID NO: 1912

SEQ ID NO: 16516 - DNA, 5379 bp, Homo sapiens
gtatccgggtcgctgctttccctattgtctgaggcagccgccctcgcgctgtgcaatttctggtctttcgttgcttctggtccaggctaataaagtttttctttctttaattttttttcttctagttttaacgggagaaattaactccccggggccgccgggttgactgcgctgcctgggccggaggtcttctccggccagggagcgctgtgggaaggggctcgagcggccagggccaggcgaggccgggggggcggggggttaggggaccgcggggctactcttgggagcgcccctgtccggctggctgcgcgccggttttaaatagcatctttcggacttgtcttcgcggccccagtccccgacctcggcgctgcctgggctcctgcagcctctccctaagtcttctccaaacgaccacctcacggattccttatggatcgcagctccaagaggaggcaggtgaagcctttggcagcttctctgctggaagctcttgattatgatagttcagatgacagtgattttaaagttggagatgcctcagattctgaagggagtggtaatggaagtgaagatgcttcaaaggacagtggagaaggttcctgtagtgattctgaagaaaatattttagaagaagaactgaatgaagatattaaagtaaaagaagaacaacttaaaaattctgcagaggaagaagtactatcatcagaaaaacaattaattaaaatggaaaagaaggaagaagaagaaaatggagaaagacctagaaagaaaaaggagaaagagaaggaaaaagaaaaggaaaaggagaaagagaaggaaagagagaaggaaaaagaaaaagcaacagtatctgagaatgtggctgcttctgctgctgccaccacaccagccacaagtcctcctgctgttaacacatccccttctgttcccactacgacaaccgctacagaggaacaagtcagcgagccaaaaaaatggaaccttcgacgaaaccgaccacttctggattttgtgtccatggaagagctgaatgacatggatgactatgacagtgaggatgacaatgattggcgacctactgtagtaaagagaaaagggagatctgcgtctcagaaagagggaagtgatggagacaatgaggatgatgaagatgagggaagcgggagtgatgaagacgagaatgatgaaggcaatgatgaagatcatagtagccctgccagtgaagggggttgcaagaagaagaagagtaaagttcttagcagaaacagtgctgatgatgaggaactgaccaatgatagcctgaccctatctcaaagcaagagtaatgaggactcgctgattcttgagaagagtcaaaactggagctctcaaaaaatggaccatattctgatttgctgtgtttgtctgggagataatagtgaggacgctgatgaaataattcagtgtgacaattgtggcattacagtccatgaaggttgttatggagttgatggagagagtgactctattatgagttcagcttctgaaaactccactgaaccttggttttgtgatgcctgtaaatgtggtgtttctcctagctgtgaactgtgtcctaatcaggatggaattttcaaggagacagatgctggaagatgggttcatattgtttgtgccctgtatgttcctggagtagcctttggagatattgacaaattacgaccagtaacactaacggaaatgaactattccaaatatggtgccaaggagtgtagcttttgtgaagaccctcgctttgctagaactggggtttgcattagctgtgatgcagggatgtgcagagcctatttccatgtgacctgtgctcaaaaggaaggtctgctttcagaggcagcggcggaagaggatatagcagatccattctttgcttattgtaagcaacatgcagataggttagacagaaagtggaagagaaaaaactacttggctctacagtcctattgtaaaatgtctttgcaagagagagagaagcaactatcaccagaagcacaggcaaggatcaatgcccggcttcagcagtatcgtgccaaagcagaactagctcgatctaccagaccccaggcctgggttccaagggaaaaattgcccagaccactcaccagcagtgcttcagctattcgtaaacttatgcggaaagcagaactcatggggatcagtacagatatctttccagtggacaattcagatactagttctagtgtggatggaaggagaaaacataagcaaccagctctcactgcagattttgtgaattattattttgagagaaatatgcgcatgattcaaattcaggaaaatatggctgaacaaaagaatataaaagataaattagagaatgaacaagaaaagcttcatgtagaatataataagctatgtgaatctttagaagaactacaaaacctgaatggaaaacttcgaagtgaaggacaaggaatatgggctttactaggcagaatcacagggcagaagttgaatataccggcaattttgcgagcacccaaggagagaaaaccaagtaaaaaagaaggaggcacacaaaagacatctactcttcctgcagtactttatagttgtgggatttgtaagaagaaccatgatcagcatcttcttttattgtgtgatacctgtaaactacattaccatcttggatgtctggatcctcctcttacaaggatgccaagaaagaccaaaaacagttattggcagtgctcggaatgtgaccaggcagggagcagtgacatggaagcagatatggccatggaaaccctaccagatggaaccaaacgatcaaggaggcagattaaggaaccagtgaaatttgttccacaggatgtgccaccagaacccaagaagattccgataagaaacacgagaaccagaggacgaaaacgaagcttcgttcctgaggaagaaaaacatgaggaaagagttcctagagagagaagacaaagacagtctgtgttgcaaaagaagcccaaggctgaagatttaagaactgaatgtgcaacttgcaagggaactggagacaatgaaaatcttgtcagatacccttcatgagacccaactctgccacagctcatcctcggaggcaatcccggaaacctcttttataagtgtgattttaaaaatgtggattaaactctcgatagagtacataaagtaaaggagaacagctatattgtcctttctataagcttgtcactgcaaaaagttgccttttgcttgtcaggtttggatagaatataattgattggtttgttacttggactaacaaggcagtagatttgcctgtgtggaattttttttcctatttttcttctttttgctttttttgcacttatcagaaatatttgatgtgtgcattgttgaaaaatactggatacatgtcttgtcagaattgtcgtattaagtaatgtctttccctcttgcttctttggcaaatgttgatacacagtgtttggacttactgaagagttactgaagcctgtgggacttaataaatacaatatgctactccctgttgtgattgaacaatacaaataacaaacaagaaagacaatgcattccattagtctgctattctgtttccttcaacttcatacatagattcatatatgaagtactgcattgtaaaacaactatagactcatattaaatgttatttctatttataatattcagcaaaagtgaaagacttgtgaagcatatgacattctatttttgacttattagtcctagtgtgaaagcattaatattattagcatgaaatttttacttcagattttaagctcatgaataaagatatatctgtgttgatctctagatatttttagtaatacccaaatatattcagtccttattgttttaatataagctttctgtgttcagtataattttatttttctcaaccttaaatatgaacttaggaaataaggagggaagtacaaagattattgactatacaacctaccagctgaaagaaagatcttcatcaacatctgtatctttccagaggtatacagaattaaaatttgatcttcaagctttaatgatccagttttaagtcaacggcagaagtatgttgaatatttcatcactcaatcttgaactgatttagaagagactctttgctgaaattgaattgcacttatacatgtaaattgtcaacatgtaatttggaattttctgattaataaatgtggttttggacatcttttcgggtatagtgacaatggaaaatagtttaaactttaggaatagagtaggtaatgttatagataatcaaaagcaattgtaattgtaaagctgctgtaatctagtgatctctagttacagtgaggaacgctatgattggatgagatgtttgataaaagtaaaatgtgtatgaaattacatataaacagattattagcttattgaaagatctcataacattggaggaaaaatattcataatctttagcaaaactagtagacttttgtttaaaagaataagataggactagttgtcactatattagcttaaggaaatgttggtaattattactgttgctgaactctggctgcttttaagcaaaatgacagattgccattttctaagtggaatatactaatccattagaccatggccctcttttaatatttagtgagaaattactcgcagttgctttattttaggttttttgagaaactcttaggccttgttttggtatcactgttaatcaaaatccttttcactttgattccaattataatactatattatcatcattttccatcttgcattttcagtggtggtggatattctattccacatttggtgctagtcctaagaatctttgtcacatgttatacatatagactgcaaaattcataagatataggtcctgcaaaaagtatagttgaagtaagaaaacttgaagtaactagaatagaatactttctcctaataatctcttaaatgctctcatatccacagtataaaattattccgtgtccataatcggtccaactactataaggagaaaattgatgtgtgcttaagaaaatatgtactaaatgattcatatttcacagacctacataagaaaaaaatggcacatcaggtaaatgatagttgtttatcacacagtagggaaaggaagaaacatgaaaatatcaggaaggagatgaaatgtctctgaaatacaggaagaatgacataatagcaagtagtggttctcaaacgttgtgcattggaatcacaggaaggatttgtaaaaacacaggtgactaccctattcctctcctggatctgccctctgcccactttactccctcccccttcaccctggag

SEQ ID NO: 16517 - protein, 888 aa, Homo sapiens; identical to SEQ ID NO: 1916

SEQ ID NO: 16518 - DNA, 3414 bp, Homo sapiens
gtatccgggtcgctgctttccctattgtctgaggcagccgccctcgcgctgtgcaatttctggtctttcgttgcttctggtccaggctaataaagtttttctttctttaattttttttcttctagttttaacgggagaaattaactccccggggccgccgggttgactgcgctgcctgggccggaggtcttctccggccagggagcgctgtgggaaggggctcgagcggccagggccaggcgaggccgggggggcggggggttaggggaccgcggggctactcttgggagcgcccctgtccggctggctgcgcgccggttttaaatagcatctttcggacttgtcttcgcggccccagtccccgacctcggcgctgcctgggctcctgcagcctctccctaagtcttctccaaacgaccacctcacggattccttatggatcgcagctccaagaggaggcaggtgaagcctttggcagcttctctgctggaagctcttgattatgatagttcagatgacagtgattttaaagttggagatgcctcagattctgaagggagtggtaatggaagtgaagatgcttcaaaggacagtggagaaggttcctgtagtgattctgaagaaaatattttagaagaagaactgaatgaagatattaaagtaaaagaagaacaacttaaaaattctgcagaggaagaagtactatcatcagaaaaacaattaattaaaatggaaaagaaggaagaagaagaaaatggagaaagacctagaaagaaaaaggagaaagagaaggaaaaagaaaaggaaaaggagaaagagaaggaaagagagaaggaaaaagaaaaagcaacagtatctgagaatgtggctgcttctgctgctgccaccacaccagccacaagtcctcctgctgttaacacatccccttctgttcccactacgacaaccgctacagaggaacaagtcagcgagccaaaaaaatggaaccttcgacgaaaccgaccacttctggattttgtgtccatggaagagctgaatgacatggatgactatgacagtgaggatgacaatgattggcgacctactgtagtaaagagaaaagggagatctgcgtctcagaaagagggaagtgatggagacaatgaggatgatgaagatgagggaagcgggagtgatgaagacgagaatgatgaaggcaatgatgaagatcatagtagccctgccagtgaagggggttgcaagaagaagaagagtaaagttcttagcagaaacagtgctgatgatgaggaactgaccaatgatagcctgaccctatctcaaagcaagagtaatgaggactcgctgattcttgagaagagtcaaaactggagctctcaaaaaatggaccatattctgatttgctgtgtttgtctgggagataatagtgaggacgctgatgaaataattcagtgtgacaattgtggcattacagtccatgaaggttgttatggagttgatggagagagtgactctattatgagttcagcttctgaaaactccactgaaccttggttttgtgatgcctgtaaatgtggtgtttctcctagctgtgaactgtgtcctaatcaggatggaattttcaaggagacagatgctggaagatgggttcatattgtttgtgccctgtatgttcctggagtagcctttggagatattgacaaattacgaccagtaacactaacggaaatgaactattccaaatatggtgccaaggagtgtagcttttgtgaagaccctcgctttgctagaactggggtttgcattagctgtgatgcagggatgtgcagagcctatttccatgtgacctgtgctcaaaaggaaggtctgctttcagaggcagcggcggaagaggatatagcagatccattctttgcttattgtaagcaacatgcagataggttagacagaaagtggaagagaaaaaactacttggctctacagtcctattgtaaaatgtctttgcaagagagagagaagcaactatcaccagaagcacaggcaaggatcaatgcccggcttcagcagtatcgtgccaaagcagaactagctcgatctaccagaccccaggcctgggttccaagggaaaaattgcccagaccactcaccagcagtgcttcagctattcgtaaacttatgcggaaagcagaactcatggggatcagtacagatatctttccagtggacaattcagatactagttctagtgtggatggaaggagaaaacataagcaaccagctctcactgcagattttgtgaattattattttgagagaaatatgcgcatgattcaaattcaggaaaatatggctgaacaaaagaatataaaagataaattagagaatgaacaagaaaagcttcatgtagaatataataagctatgtgaatctttagaagaactacaaaacctgaatggaaaacttcgaagtgaaggacaaggaatatgggctttactaggcagaatcacagggcagaagttgaatataccggcaattttgcgagcacccaaggagagaaaaccaagtaaaaaagaaggaggcacacaaaagacatctactcttcctgcagtactttatagttgtgggatttgtaagaagaaccatgatcagcatcttcttttattgtgtgatacctgtaaactacattaccatcttggatgtctggatcctcctcttacaaggatgccaagaaagaccaaaaacagttattggcagtgctcggaatgtgaccaggcagggagcagtgacatggaagcagatatggccatggaaaccctaccagatggaaccaaacgatcaaggaggcagattaaggaaccagtgaaatttgttccacaggatgtgccaccagaacccaagaagattccgataagaaacacgagaaccagaggacgaaaacgaagcttcgttcctgaggaagaaaaacatgaggaaagagttcctagagagagaagacaaagacagtctgtgttgcaaaagaagcccaaggctgaagatttaagaactgaatgtgcaacttgcaagggaactggagacaatgaaaatcttgtcaggtgtgatgaatgcagactctgctaccattttggctgtttggatcctcctttgaaaaagtctcctaaacagacaggctacggatggatatgtcaggaatgtgattcttcatcttccaaggaagatgaaaatgaagctgaaagaaaaaatatatctcaggagctcaacatggaacagaaaaatccaaagaaataaaagattttctgtagtgtttttgaaaagtttgcagcttatgtaatagcagataaaatttctaattgtaaaatgttaaattgtaaaatctaatttgcaaaatgttctcaataaagtcattcaaaatgaaatagg

SEQ ID NO: 16519 - protein, 948 aa, Homo sapiens; identical to SEQ ID NO: 1914

SEQ ID NO: 16520 - DNA, 3619 bp, Homo sapiens
gtatccgggtcgctgctttccctattgtctgaggcagccgccctcgcgctgtgcaatttctggtctttcgttgcttctggtccaggctaataaagtttttctttctttaattttttttcttctagttttaacgggagaaattaactccccggggccgccgggttgactgcgctgcctgggccggaggtcttctccggccagggagcgctgtgggaaggggctcgagcggccagggccaggcgaggccgggggggcggggggttaggggaccgcggggctactcttgggagcgcccctgtccggctggctgcgcgccggttttaaatagcatctttcggacttgtcttcgcggccccagtccccgacctcggcgctgcctgggctcctgcagcctctccctaagtcttctccaaacgaccacctcacggattccttatggatcgcagctccaagaggaggcaggtgaagcctttggcagcttctctgctggaagctcttgattatgatagttcagatgacagtgattttaaagttggagatgcctcagattctgaagggagtggtaatggaagtgaagatgcttcaaaggacagtggagaaggttcctgtagtgattctgaagaaaatattttagaagaagaactgaatgaagatattaaagtaaaagaagaacaacttaaaaattctgcagaggaagaagtactatcatcagaaaaacaattaattaaaatggaaaagaaggaagaagaagaaaatggagaaagacctagaaagaaaaaggagaaagagaaggaaaaagaaaaggaaaaggagaaagagaaggaaagagagaaggaaaaagaaaaagcaacagtatctgagaatgtggctgcttctgctgctgccaccacaccagccacaagtcctcctgctgttaacacatccccttctgttcccactacgacaaccgctacagaggaacaagtcagcgagccaaaaaaatggaaccttcgacgaaaccgaccacttctggattttgtgtccatggaagagctgaatgacatggatgactatgacagtgaggatgacaatgattggcgacctactgtagtaaagagaaaagggagatctgcgtctcagaaagagggaagtgatggagacaatgaggatgatgaagatgagggaagcgggagtgatgaagacgagaatgatgaaggcaatgatgaagatcatagtagccctgccagtgaagggggttgcaagaagaagaagagtaaagttcttagcagaaacagtgctgatgatgaggaactgaccaatgatagcctgaccctatctcaaagcaagagtaatgaggactcgctgattcttgagaagagtcaaaactggagctctcaaaaaatggaccatattctgatttgctgtgtttgtctgggagataatagtgaggacgctgatgaaataattcagtgtgacaattgtggcattacagtccatgaaggttgttatggagttgatggagagagtgactctattatgagttcagcttctgaaaactccactgaaccttggttttgtgatgcctgtaaatgtggtgtttctcctagctgtgaactgtgtcctaatcaggatggaattttcaaggagacagatgctggaagatgggttcatattgtttgtgccctgtatgttcctggagtagcctttggagatattgacaaattacgaccagtaacactaacggaaatgaactattccaaatatggtgccaaggagtgtagcttttgtgaagaccctcgctttgctagaactggggtttgcattagctgtgatgcagggatgtgcagagcctatttccatgtgacctgtgctcaaaaggaaggtctgctttcagaggcagcggcggaagaggatatagcagatccattctttgcttattgtaagcaacatgcagataggttagacagaaagtggaagagaaaaaactacttggctctacagtcctattgtaaaatgtctttgcaagagagagagaagcaactatcaccagaagcacaggcaaggatcaatgcccggcttcagcagtatcgtgccaaagcagaactagctcgatctaccagaccccaggcctgggttccaagggaaaaattgcccagaccactcaccagcagtgcttcagctattcgtaaacttatgcggaaagcagaactcatggggatcagtacagatatctttccagtggacaattcagatactagttctagtgtggatggaaggagaaaacataagcaaccagctctcactgcagattttgtgaattattattttgagagaaatatgcgcatgattcaaattcaggaaaatatggctgaacaaaagaatataaaagataaattagagaatgaacaagaaaagcttcatgtagaatataataagctatgtgaatctttagaagaactacaaaacctgaatggaaaacttcgaagtgaaggacaaggaatatgggctttactaggcagaatcacagggcagaagttgaatataccggcaattttgcgagcacccaaggagagaaaaccaagtaaaaaagaaggaggcacacaaaagacatctactcttcctgcagtactttatagttgtgggatttgtaagaagaaccatgatcagcatcttcttttattgtgtgatacctgtaaactacattaccatcttggatgtctggatcctcctcttacaaggatgccaagaaagaccaaaaacagttattggcagtgctcggaatgtgaccaggcagggagcagtgacatggaagcagatatggccatggaaaccctaccagatggaaccaaacgatcaaggaggcagattaaggaaccagtgaaatttgttccacaggatgtgccaccagaacccaagaagattccgataagaaacacgagaaccagaggacgaaaacgaagcttcgttcctgaggaagaaaaacatgaggaaagagttcctagagagagaagacaaagacagtctgtgttgcaaaagaagcccaaggctgaagatttaagaactgaatgtgcaacttgcaagggaactggagacaatgaaaatcttgtcaggtgtgatgaatgcagactctgctaccattttggctgtttggatcctcctttgaaaaagtctcctaaacagacaggctacggatggatatgtcaggaatgtgattcttcatcttccaaggaagatgaaaatgaagctgaaagaaaaaatatatctcaggagctcaacatggaacagaaaaatccaaagaaataaaagattttctgtagtgtttttgaaaagtttgcagcttatgtaatagcagataaaatttctaattgtaaaatgttaaattgtaaaatctaatttgcaaaatgttctcaataaagtcattcaaaatgaaataggagcttgtatttggaattcgtatattttagagtaatttcgacttttttattcaaaagctggacctttaaaagtttttaaaaggagaaaaattcttaactcaaatttgagaacagagacagaatgttattttttttgtaacctaactgttaacacatttaaatgacctaaaaaaaaaacctctgaaagtcttttttcttcttactag

SEQ ID NO: 16521 - protein, 948 aa, Homo sapiens; identical to SEQ ID NO: 1914

SEQ ID NO: 16522 - DNA, 607 bp, Homo sapiens
gggagtacaaatgttcactatttttctgtgctttctttgtataggatatagcagatccattctttgcttattgtaagcaacatgcagataggttagacagaaagtggaagagaaaaaactacttggctctacagtcctattgtaaaatgtctttgcaagagagagagaagcaactatcaccagaagcacaggcaaggatcaatgcccggcttcagcagtatcgtgccaaagcagaactagctcgatctaccagaccccaggcctgggttccaagggaaaaattgcccagaccactcaccagcagtgcttcagctattcgtaaacttatgcggaaagcagaactcatggggatcagtacagatatctttccagtggacaattcagatactagttctagtgtggatggaaggagaaaacataagcaaccagctctcactgcagattttgtgaattattattttggtcagtatagacactggtacatgcacattttcactgagaacaatttgttaatgaaaatgtttgatatactgttaatttttagaaatttattagccatgctgcatatatcatagagggatgtttattttcctaatatgttgtgggt

SEQ ID NO: 16523 - protein, 142 aa, Homo sapiens
MSLQEREKQLSPEAQARINARLQQYRAKAELARSTRPQAWVPREKLPRPLTSSASAIRKLMRKAELMGISTDIFPVDNSDTSSSVDGRRKHKQPALTADFVNYYFGQYRHWYMHIFTENNLLMKMFDILLIFRNLLAMLHIS

SEQ ID NO: 16524 - DNA, 1497 bp, Homo sapiens
acagattcatagtttataaatttactttttttgaatgactaatttagttgactcttggttatctaggaacagattaaatggtaagtagttagccatggtattaaataacagtgtacttgatatgaagaattgaaattaatgtaagaaaatattaatatatttatactataatgtaattctgtttagaattatttggtacctactctagcttgggaatgttccttgatctcagctgtcaaagtaatttttggaagcagtgcctgcattctcttccagtctctagggaacagtggtctgcatatggggctgtgctgtgattggtggatatttctaacatattggctgcaaatactaatgtagttacagttcttttaaacgtttgtatgcgttctttcaaatggtaaatgtattctgaaatataggatgtgaattttagctaaattagtttaaaatgtcattttatgtggcattttaattagttttatgttaactaggattttggatatgtgagaacttttccttctacttttttttggctgcttaagaattatttctttacataaacatgtatgcacatgcatatatgtaggcaaacaatgtgtgtagtatgatcccaggtttagcatttcagctatataagtgatgtgataagttatgaaaatttaaatgctctgagtaaatcataattatggacaattatgaagtgtggagaaaatcctttaaaataattttggagaattcattttttttctatcagatacatgtttatttaaaagtaaagtactataaagtatatttaatttgttactttttatttcctatggcataaatggtaacaaagtgcagtagtccaatatagtattaattagaaataactaattttgcaagtgcctaacctaagcaataacatttaacagaggaaatttatatttattattaattaaacattagatatactgtggatttttgttttttgtttttttttttgtttttttccagagaaccagaggacgaaaacgaagcttcgttcctgaggaagaaaaacatgaggaaagagttcctagagagagaagacaaagacagtctgtgttgcaaaagaagcccaaggctgaagatttaagaactgaatgtgcaacttgcaagggaactggagacaatgaaaatcttgtcaggtgtgatgaatgcagactctgctaccattttggctgtttggatcctcctttgaaaaagtctcctaaacagacaggctacggatggatatgtcaggaatgtgattcttcatcttccaaggaagatgaaaatgaagctgaaagaaaaaatatatctcaggagctcaacatggaacagaaaaatccaaagaaataaaagattttctgtagtgtttttgaaaagtttgcagcttatgtaatagcagataaaatttctaattgtaaaatgttaaattgtaaaatctaatttgcaaaatgttctcaataaagtcattcaaaatgaaatagg

SEQ ID NO: 16525 - protein, 46 aa, Homo sapiens
MDNYEVWRKSFKIILENSFFFYQIHVYLKVKYYKVYLICYFLFPMA

SEQ ID NO: 16526 - DNA, 1702 bp, Homo sapiens
acagattcatagtttataaatttactttttttgaatgactaatttagttgactcttggttatctaggaacagattaaatggtaagtagttagccatggtattaaataacagtgtacttgatatgaagaattgaaattaatgtaagaaaatattaatatatttatactataatgtaattctgtttagaattatttggtacctactctagcttgggaatgttccttgatctcagctgtcaaagtaatttttggaagcagtgcctgcattctcttccagtctctagggaacagtggtctgcatatggggctgtgctgtgattggtggatatttctaacatattggctgcaaatactaatgtagttacagttcttttaaacgtttgtatgcgttctttcaaatggtaaatgtattctgaaatataggatgtgaattttagctaaattagtttaaaatgtcattttatgtggcattttaattagttttatgttaactaggattttggatatgtgagaacttttccttctacttttttttggctgcttaagaattatttctttacataaacatgtatgcacatgcatatatgtaggcaaacaatgtgtgtagtatgatcccaggtttagcatttcagctatataagtgatgtgataagttatgaaaatttaaatgctctgagtaaatcataattatggacaattatgaagtgtggagaaaatcctttaaaataattttggagaattcattttttttctatcagatacatgtttatttaaaagtaaagtactataaagtatatttaatttgttactttttatttcctatggcataaatggtaacaaagtgcagtagtccaatatagtattaattagaaataactaattttgcaagtgcctaacctaagcaataacatttaacagaggaaatttatatttattattaattaaacattagatatactgtggatttttgttttttgtttttttttttgtttttttccagagaaccagaggacgaaaacgaagcttcgttcctgaggaagaaaaacatgaggaaagagttcctagagagagaagacaaagacagtctgtgttgcaaaagaagcccaaggctgaagatttaagaactgaatgtgcaacttgcaagggaactggagacaatgaaaatcttgtcaggtgtgatgaatgcagactctgctaccattttggctgtttggatcctcctttgaaaaagtctcctaaacagacaggctacggatggatatgtcaggaatgtgattcttcatcttccaaggaagatgaaaatgaagctgaaagaaaaaatatatctcaggagctcaacatggaacagaaaaatccaaagaaataaaagattttctgtagtgtttttgaaaagtttgcagcttatgtaatagcagataaaatttctaattgtaaaatgttaaattgtaaaatctaatttgcaaaatgttctcaataaagtcattcaaaatgaaataggagcttgtatttggaattcgtatattttagagtaatttcgacttttttattcaaaagctggacctttaaaagtttttaaaaggagaaaaattcttaactcaaatttgagaacagagacagaatgttattttttttgtaacctaactgttaacacatttaaatgacctaaaaaaaaaacctctgaaagtcttttttcttcttactag

SEQ ID NO: 16527 - protein, 46 aa, Homo sapiens; identical to SEQ ID NO: 16525

SEQ ID NO: 16528 - DNA, 1511 bp, Homo sapiens
gtggatttttgttttttgtttttttttttgtttttttccagagaaccagaggacgaaaacgaagcttcgttcctgaggaagaaaaacatgaggaaagagttcctagagagagaagacaaagacagtctgtgttgcaaaagaagcccaaggctgaagatttaagaactgaatgtgcaacttgcaagggaactggagacaatgaaaatcttgtcaggtaagttggatgctaaaaccttgtctttaggggatgaaagttctatatttattttctcatcacagaaaaaatgaaaaaacaattgcaggataagacctttcttaaaatattatatagtggaaacagtactttagaaacagatttcatccacttcttaacctctcacacatggttatactctggatttaaatgtaaataagagtgataatctgcctgtttaacacagggaattatttttctcttgacaagagaaattgacagtgctctctatttagaggccatgaaagtaatttgatctaaacactgtgtactaagattattatgttttatgtcagaaaacaataaagttactaagctctgttagcatattctaaatgtttgaaatttagaagcaatggtgagaagacagactttttattgacaagaacttaattagcactttcttattgcttatcaaaacaaatgtgttaaatgcttctcccttacgaaataaagaaaggtgaaaagatggcctaggttgattttattttttgttttgtctttgtttctttgtttcgttttggtactttatttttttttaatcagacataatgctaatcagaaatcttagctgatgctgcacattggcttttcccaacggtccagaggctgctaattttagcggaaatgaagacattgatcaaagctctggtgagatgggggagtgagtgtgtgaacaaaaagagagctaatttaaaagaggcatcagactttcaaaggacagtgtcacaaaagttcttacagttcttacagggactttgtaagggaatccattcttatttctttaaaaaattgtcttctggtaaagccctgttaaattaactgaggacacagaaattaaacatttcaaaaagaataaacatattgataaaacaaatatattagtgttgttgtatgtttttaaatacttacttccaaatgatttaatctattttggtcattaaaatatgtcttaatttctcaaagaaaggcatgaagtcttaaattttatgagttttttatgctatcaatgagaaagataaagtaaaaattacagtagaaaaagacaaagtccttcaacaaagttaagaaagtttataataattggctaatttttttgaggtagttcatgtagagtgtgttgggagctatcctgaaggttaagtttattaaaatttagggtaaagtagtaagtagttccaagttcaggagatacacctgaataattctgaccacagtataaattttgcaatatgtcgaaaatgaaatcccaagcata

SEQ ID NO: 16529 - protein, 64 aa, Homo sapiens
MKTLIKALVRWGSECVNKKRANLKEASDFQRTVSQKFLQFLQGLCKGIHSYFFKKLSSGKALLN

SEQ ID NO: 16530 - DNA, 1990 bp, Homo sapiens
cataatttgaaaattattatgacacagagttataaagtaaatatgcagtaattaggtagtaaattgatgtgaactaggaaaatgttaatacttcatcaagaactttgattattagcaatctgaactctggcgcactacccaaaaacctaaagttaaggagaaaagactatagttaacaaacaaaattgagcccatttacttaactcagtagcaattatcattttcatgtatttttactgtcagtttacatagcctcagtaagttttagtggtctggtttctgaatccataacagattgttgttggggaatttatgcttaagcaaacacaccgaaaatatcaggaagcagtggctgatagttttcaggcaagtgaggaccctgaaaatctacaaaaattgaatacaagaattcaaatagaacagctgactcctggtcctcattccaaggacaaaaggctgacacactgctagacctgtagcagcatatgttattcttactgatgacctgagatgacaaatataaattatatttaatatgtttatttgatgaaacgagcaatgtgatttttaaatttcgcatcaaagatgattaaaactccagtttttatgtatgaaggagtatgctctcagttatttagaaatctcagccttctcataaactcagaaatacttatactttgaaggtttctatatccataggtttaatcgaaattttggctaatgaaaggtaaatatgttgtactgagaaagagcataaaattatgtgggcttgccagtctctttatgtcacatttgaacttagcttatattatttattattctttcttaatgccagaacaacaggtatttgaacattttaactgcttttaaatatatttttagatgtgtgatattgtcatagtaaataaagtactgttggtcctattggtcctatttgattttatctattcctgtagctagaactgtcatagtaagcattttttaaagtcttgaatctacaaggtttttggaaaagtacataagcttattttattcataaggagaaagttgtagaggaagaaatgcataaacttaggacattcatttgtgttttaaacttctttatatctgagtaacttaattaagttgcttaacttttctggaactcttgattccccaaatgagtttttggaagattggacttttgtatcataatatgaaatttctactaaaaatgtagatttacagtcccttttattatgatggtttcttaaagtcaattgtttttctttgtgtgttgtttatgtaagaagagcttcttcccccttttttcctaaaaggttattgaatagtagtttttaactttaatcaagtaatatatgttctataaattttccccttggtttcttaattgcagatttcttgacatttgaagttttaaatcagtgaaagataaacaataaagaaaatctgacagattggttgagaaagtattattgtttaattttttttaaactatgaaatgaggaatgtaatcccttctataagatgtatactctttgttatttgttgttaaattttggtcttgttattccaactgatgcaaaattctttttacaaagcactgaaataatacagatttttcttcattgtcagcaggatgagattgtctgaaacgaagaataggtgtgatgaatgcagactctgctaccattttggctgtttggatcctcctttgaaaaagtctcctaaacagacaggctacggatggatatgtcaggaatgtgattcttcatcttccaaggaagatgaaaatgaagctgaaagaaaaaatatatctcaggagctcaacatggaacagaaaaatccaaagaaataaaagattttctgtagtgtttttgaaaagtttgcagcttatgtaatagcagataaaatttctaattgtaaaatgttaaattgtaaaatctaatttgcaaaatgttctcaataaagtcattcaaaatgaaatagg

SEQ ID NO: 16531 - protein, 72 aa, Homo sapiens
MRLSETKNRCDECRLCYHFGCLDPPLKKSPKQTGYGWICQECDSSSSKEDENEAERKNISQELNMEQKNPKK

SEQ ID NO: 16532 - DNA, 2195 bp, Homo sapiens
cataatttgaaaattattatgacacagagttataaagtaaatatgcagtaattaggtagtaaattgatgtgaactaggaaaatgttaatacttcatcaagaactttgattattagcaatctgaactctggcgcactacccaaaaacctaaagttaaggagaaaagactatagttaacaaacaaaattgagcccatttacttaactcagtagcaattatcattttcatgtatttttactgtcagtttacatagcctcagtaagttttagtggtctggtttctgaatccataacagattgttgttggggaatttatgcttaagcaaacacaccgaaaatatcaggaagcagtggctgatagttttcaggcaagtgaggaccctgaaaatctacaaaaattgaatacaagaattcaaatagaacagctgactcctggtcctcattccaaggacaaaaggctgacacactgctagacctgtagcagcatatgttattcttactgatgacctgagatgacaaatataaattatatttaatatgtttatttgatgaaacgagcaatgtgatttttaaatttcgcatcaaagatgattaaaactccagtttttatgtatgaaggagtatgctctcagttatttagaaatctcagccttctcataaactcagaaatacttatactttgaaggtttctatatccataggtttaatcgaaattttggctaatgaaaggtaaatatgttgtactgagaaagagcataaaattatgtgggcttgccagtctctttatgtcacatttgaacttagcttatattatttattattctttcttaatgccagaacaacaggtatttgaacattttaactgcttttaaatatatttttagatgtgtgatattgtcatagtaaataaagtactgttggtcctattggtcctatttgattttatctattcctgtagctagaactgtcatagtaagcattttttaaagtcttgaatctacaaggtttttggaaaagtacataagcttattttattcataaggagaaagttgtagaggaagaaatgcataaacttaggacattcatttgtgttttaaacttctttatatctgagtaacttaattaagttgcttaacttttctggaactcttgattccccaaatgagtttttggaagattggacttttgtatcataatatgaaatttctactaaaaatgtagatttacagtcccttttattatgatggtttcttaaagtcaattgtttttctttgtgtgttgtttatgtaagaagagcttcttcccccttttttcctaaaaggttattgaatagtagtttttaactttaatcaagtaatatatgttctataaattttccccttggtttcttaattgcagatttcttgacatttgaagttttaaatcagtgaaagataaacaataaagaaaatctgacagattggttgagaaagtattattgtttaattttttttaaactatgaaatgaggaatgtaatcccttctataagatgtatactctttgttatttgttgttaaattttggtcttgttattccaactgatgcaaaattctttttacaaagcactgaaataatacagatttttcttcattgtcagcaggatgagattgtctgaaacgaagaataggtgtgatgaatgcagactctgctaccattttggctgtttggatcctcctttgaaaaagtctcctaaacagacaggctacggatggatatgtcaggaatgtgattcttcatcttccaaggaagatgaaaatgaagctgaaagaaaaaatatatctcaggagctcaacatggaacagaaaaatccaaagaaataaaagattttctgtagtgtttttgaaaagtttgcagcttatgtaatagcagataaaatttctaattgtaaaatgttaaattgtaaaatctaatttgcaaaatgttctcaataaagtcattcaaaatgaaataggagcttgtatttggaattcgtatattttagagtaatttcgacttttttattcaaaagctggacctttaaaagtttttaaaaggagaaaaattcttaactcaaatttgagaacagagacagaatgttattttttttgtaacctaactgttaacacatttaaatgacctaaaaaaaaaacctctgaaagtcttttttcttcttactag

SEQ ID NO: 16533 - protein, 72 aa, Homo sapiens; identical to SEQ ID NO: 16531

SEQ ID NO: 16534 - DNA, 339 bp, Homo sapiens
aactgagaatgaggggtcatatgcctttcacagagtcaaaccaatagttaagtgccaaagcaggattcaaaataagatttgtctgacaccaaagcctgtgcattttctgctgtgctcatgtagatgttttaggaagatgaaaatgaagctgaaagaaaaaatatatctcaggagctcaacatggaacagaaaaatccaaagaaataaaagattttctgtagtgtttttgaaaagtttgcagcttatgtaatagcagataaaatttctaattgtaaaatgttaaattgtaaaatctaatttgcaaaatgttctcaataaagtcattcaaaatgaaatagg

SEQ ID NO: 16535 - protein, 37 aa, Homo sapiens
MKMKLKEKIYLRSSTWNRKIQRNKRFSVVFLKSLQLM

SEQ ID NO: 16536 - DNA, 544 bp, Homo sapiens
aactgagaatgaggggtcatatgcctttcacagagtcaaaccaatagttaagtgccaaagcaggattcaaaataagatttgtctgacaccaaagcctgtgcattttctgctgtgctcatgtagatgttttaggaagatgaaaatgaagctgaaagaaaaaatatatctcaggagctcaacatggaacagaaaaatccaaagaaataaaagattttctgtagtgtttttgaaaagtttgcagcttatgtaatagcagataaaatttctaattgtaaaatgttaaattgtaaaatctaatttgcaaaatgttctcaataaagtcattcaaaatgaaataggagcttgtatttggaattcgtatattttagagtaatttcgacttttttattcaaaagctggacctttaaaagtttttaaaaggagaaaaattcttaactcaaatttgagaacagagacagaatgttattttttttgtaacctaactgttaacacatttaaatgacctaaaaaaaaaacctctgaaagtcttttttcttcttactag

SEQ ID NO: 16537 - protein, 37 aa, Homo sapiens; identical to SEQ ID NO: 16535

SEQ ID NO: 16538 - DNA, 1193 bp, Homo sapiens
gtggggccggcacctcccggcagcagcggcagctgagactcacggtcaagctacggcgaggagtgggtggctgaagccatactattttatagaattaatggaaagcagaaaagacatcacaaaccaagaagaaatttggaaaatgaagcctaggagaaatttagaagacaacgattatttgcaaacagcccatgctgatgaatttgactgcccttcagaacttcagcacgcacaggaactctttccacagtggcacttgccaattaaaatagctgctgttatggcatctctgacttttctttacactcttctgagggaagtaattcaccctttagcaacttcccatcaacaatatttttataaaattccaatcctggtcatcaacaaagtcttgccaatggtttccatcactctcttggcattggtttacctaccaggtgtgatagcagcaattgtccaagttcataatggaaccaagtataagaagtttccacattggttggataagtggatgttaacaagaaagcagtttgggcttctcagtttgttttttgctgtactgcatgcaatttatactctgtcttacgcaatgaggcgatcctacagatacaagttgctaaactgggcatatcaacaggtccaacaaaataaagaagatgcctggattgagcatgatgtttggagaatggagatttatgtgtctctgggaattgtgggactggcaatactggctctgttggctgtgacatctattccatctgtgagtgactctttgacatggagagaatttcactatattcaggtacatggtaggatcaacttcctgaccttgtgacagatcctgccagtaacatgagaggaaatgagaacgaggctttggagcacagcattggattgctcatgcagaacaccacccagtgccctttccctctgccacaatgaacagccatgctgcaggtgacggctgctctgtcaacatggatccggcagggcagatgagtggatcccccagcggactcatgagagagcaaacaaaaagtccatatgtgttgtgctaatccactgagattgtgttggttgttacggagcctaacctagcctatcccgacacgaggatcagacatgataatcaaatgtgtttataaagtgttggatggaaatattctgacaacattaaaagactctacccaagg

SEQ ID NO: 16539 - protein, 245 aa, Homo sapiens
MESRKDITNQEEIWKMKPRRNLEDNDYLQTAHADEFDCPSELQHAQELFPQWHLPIKIAAVMASLTFLYTLLREVIHPLATSHQQYFYKIPILVINKVLPMVSITLLALVYLPGVIAAIVQVHNGTKYKKFPHWLDKWMLTRKQFGLLSLFFAVLHAIYTLSYAMRRSYRYKLLNWAYQQVQQNKEDAWIEHDVWRMEIYVSLGIVGLAILALLAVTSIPSVSDSLTWREFHYIQVHGRINFLTL

SEQ ID NO: 16540 - DNA, 1353 bp, Homo sapiens
atgctcaattccaaacacagtctatcaactcatcagagcccgactggtgagaaagccaaggctggcggcaggtttggtgccacctcttggtgccagagccacctgcacacagcatggagcaagggaatagccagggtgccctggagccagttccttccagaagccagcagccctagggctcctctatcccactcccagcaagaagaagctgccatgaatatgaaggacgttcccgaaccctgcggacgcggggcgccagcaggtggcgctggacgcgcaactgacaaggaggcggggcctgcagcaggcttggaggcttcgcgctctggaggctcaggcgccgcgtggggccggcacctcccggcagcagcggcagctgagactcacggtcaagctacggcgaggagtgggtggctgaagccatactattttatagaattaatggaaagcagaaaagacatcacaaaccaagaagaaatttggaaaatgaagcctaggagaaatttagaagacaacgattatttgcatgaggacacgggagagaccagcatgctaaaaagacctgtgcttttgcatttgcagcaaacagcccatgctgatgaatttgactgcccttcagaacttcagcacgcacaggaactctttccacagtggcacttgccaattaaaatagctgctgttatggcatctctgacttttctttacactcttctgagggaagtaattcaccctttagcaacttcccatcaacaatatttttataaaattccaatcctggtcatcaacaaagtcttgccaatggtttccatcactctcttggcattggtttacctaccaggtgtgatagcagcaattgtccaagttcataatggaaccaagtataagaagtttccacattggttggataagtggatgttaacaagaaagcagtttgggcttctcagtttgttttttgctgtactgcatgcaatttatactctgtcttacgcaatgaggcgatcctacagatacaagttgctaaactgggcatatcaacaggtccaacaaaataaagaagatgcctggattgagcatgatgtttggagaatggagatttatgtgtctctgggaattgtgggactggcaatactggctctgttggctgtgacatctattccatctgtgagtgactctttgacatggagagaatttcactatattcagggtggggagtacagctttacggacaccttcctggggaaagcactgagtgagctgagaaggctgagccaggagtccgagagtgtgggatgtcatcatccccagggcagcctgagtgaaggccctgaaacaggatccaccaggaagggctag

SEQ ID NO: 16541 - protein, 450 aa, Homo sapiens
MLNSKHSLSTHQSPTGEKAKAGGRFGATSWCQSHLHTAWSKGIARVPWSQFLPEASSPRAPLSHSQQEEAAMNMKDVPEPCGRGAPAGGAGRATDKEAGPAAGLEASRSGGSGAAWGRHLPAAAAAETHGQATARSGWLKPYYFIELMESRKDITNQEEIWKMKPRRNLEDNDYLHEDTGETSMLKRPVLLHLQQTAHADEFDCPSELQHAQELFPQWHLPIKIAAVMASLTFLYTLLREVIHPLATSHQQYFYKIPILVINKVLPMVSITLLALVYLPGVIAAIVQVHNGTKYKKFPHWLDKWMLTRKQFGLLSLFFAVLHAIYTLSYAMRRSYRYKLLNWAYQQVQQNKEDAWIEHDVWRMEIYVSLGIVGLAILALLAVTSIPSVSDSLTWREFHYIQGGEYSFTDTFLGKALSELRRLSQESESVGCHHPQGSLSEGPETGSTRKG

SEQ ID NO: 16542 - DNA, 743 bp, Homo sapiens
tttcgcaacgggtttgccgccagaacacaggtgtcgtgaaaactacccctaaaagccaaaatgggaaaggaaaagactcatatcaacattgtcgtcattggacacgtagattcaggcaagtccaccactaggctcacattgcatgcaagtttgctgagctgaaggaaaagattgatcgccgttctggtaaaaagctggaagatggccctaaattcttgaagtctggtgatgctgccattgttgatatggttcctggcaagcccatgtgtgttgagagcttctcagactatccacctttgggtcgctttgctgttcgtgatatgagacagacagttgcggtgggtgtcatcaaagcagtggacaagaaggctgctggagctggcaaggtcaccaagtctgcccagaaagctcagaaggctaaatgaatattatccctaatacctgccaccccactcttaatcagtggtggaagaatggtctcagaactgtttgtttcaattggccatttaagtttagtagtaaaagactggttaatgataacaatgcatcgtaaaaccttcagaaggaaaggagaatgttttgtggaccactttggttttcttttttgcgtgtggcagttttaagttattagtttttaaaatcagtactttttaatggaaacaactggaccaaaaatttgtcacagaattttgagacccattaaaaaagttaaatgagaaaaaaaaaaaaagaatcaaaatttt

SEQ ID NO: 16543 - protein, 33 aa, Homo sapiens
MGKEKTHINIVVIGHVDSGKSTTRLTLHASLLS

SEQ ID NO: 16544 - DNA, 1514 bp, Homo sapiens
ttttcgcaacgggtttgccgccagaacacaggtgtcgtgaaaactacccctaaaagccaaaatgggaaaggaaaagactcatatcaacattgtcgtcattggacacgtagattcaggcaagtccaccactactggccatctgatctataaatgcggtggcatcgacaaaagaaccattgaactggtatctccaagaatgggcagacccgagagcatgcccttctggcttacacactgggtgtgaaacaactaattgtcggtgttaacaaaatggattccactgagccaccctacagccagaagagatatgaggaaattgttaaggaatcagcacttacattaagaaaattggctacaaccccgacacagtagcatttgtgccaatttctggttggaatggtgacaacatgctggagccaagtgctaacatgccttggttcaagggatggaaagtcacccgtaaggatggcaatgccagtggaaccacgctgcttgaggctctggactgcatcctaccaccaactcatccaactgacaagcccttgcgcctgcctctccaggatgtctacaaaattggtggtattggtactgttcctgttggccgagtggagactggtgttctcaaacccggtatggtggtcacctttgctccagtcaacgttacaacggaagtaaaatctgtcgaaatgcaccatgaagctttgagtgaagctcttcctggggacaatgtgggcttcaatgtcaagaatgtgtctgtcaaggatgttcgtcgtggcaacgtcgctggtgacagcaaaaatgacccaccaatggaagcagcgggcttcactgctcaggtgattatcctgaaccatccaggccaaataagcaccggctatgcccctgtattggattgccacacggctcacattgcatgcaagtttgctgagctgaaggaaaagattgatcgccgttctggtaaaaagctggaagatggccctaaattcttgaagtctggtgatgctgccattgttgatatggttcctggcaagcccatgtgtgttgagagcttctcagactatccacctttgggtcgctttgctgttcgtgatatgagacagacagttgcggtgggtgtcatcaaagcagtggacaagaaggctgctggagctggcaaggtcaccaagtctgcccagaaagctcagaaggctaaatgaatattatccctaatacctgccaccccactcttaatcagtggtggaagaatggtctcagaactgtttgtttcaattggccatttaagtttagtagtaaaagactggttaatgataacaatgcatcgtaaaaccttcagaaggaaaggagaatgttttgtggaccactttggttttcttttttgcgtgtggcagttttaagttattagtttttaaaatcagtactttttaatggaaacaactggaccaaaaatttgtcacagaattttgagacccattaaaaaagttaaatgagaaaaaaaaaaaaagaatcaaaatttt

SEQ ID NO: 16545 - protein, 60 aa, Homo sapiens
MGKEKTHINIVVIGHVDSGKSTTTGHLIYKCGGIDKRTIELVSPRMGRPESMPFWLTHWV

SEQ ID NO: 16546 - DNA, 715 bp, Homo sapiens
ttttcgcaacgggtttgccgccagaacacaggtgtcgtgaaaactacccctaaaagccaaaatgggaaaggaaaagactcatatcaacattgtcgtcattggacacgtagattcaggcaagtccaccactactggccatctgatctataaatgcggtggcatcgacaaaagaaccattgaaaaatttgagaagtctggtgatgctgccattgttgatatggttcctggcaagcccatgtgtgttgagagcttctcagactatccacctttgggtcgctttgctgttcgtgatatgagacagacagttgcggtgggtgtcatcaaagcagtggacaagaaggctgctggagctggcaaggtcaccaagtctgcccagaaagctcagaaggctaaatgaatattatccctaatacctgccaccccactcttaatcagtggtggaagaatggtctcagaactgtttgtttcaattggccatttaagtttagtagtaaaagactggttaatgataacaatgcatcgtaaaaccttcagaaggaaaggagaatgttttgtggaccactttggttttcttttttgcgtgtggcagttttaagttattagtttttaaaatcagtactttttaatggaaacaactggaccaaaaatttgtcacagaattttgagacccattaaaaaagttaaatgagaaaaaaaaaaaaagaatcaaaatttt

SEQ ID NO: 16547 - protein, 111 aa, Homo sapiens
MGKEKTHINIVVIGHVDSGKSTTTGHLIYKCGGIDKRTIEKFEKSGDAAIVDMVPGKPMCVESFSDYPPLGRFAVRDMRQTVAVGVIKAVDKKAAGAGKVTKSAQKAQKAK

SEQ ID NO: 16548 - DNA, 1596 bp, Homo sapiens
ctttttcgcaacgggtttgccgccagaacacaggtgtcgtgaaaactacccctaaaagccaaaatgggaaaggaaaagactcatatcaacattgtcgtcattggacacgtagattcaggcaagtccaccactactggccatctgatctataaatgcggtggcatcgacaaaagaaccattgaaaaatttgagaaggaggctgctgagatgggaaagggctccttcaagtatgcctgggtcttggataaactgaaagctgagcgtgaacgtggtatcaccattgatatctccttgtggaaatttgagaccagcaagtactatgtgactatcattgatgccccaggacacagggacttcatcaaaaacatgattacagggacatctcaggctgactgtgctgtcctgattgttgctgctggtgttggtgaatttgaagctggtatctccaagaatgggcagacccgagagcatgcccttctggcttacacactgggtgtgaaacaactaattgtcggtgttaacaaaggatggaaagtcacccgtaaggatggcaatgccagtggaaccacgctgcttgaggctctggactgcatcctaccaccaactcatccaactgacaagcccttgcgcctgcctctccaggatgtctacaaaattggtggtattggtactgttcctgttggccgagtggagactggtgttctcaaacccggtatggtggtcacctttgctccagtcaacgttacaacggaagtaaaatctgtcgaaatgcaccatgaagctttgagtgaagctcttcctggggacaatgtgggcttcaatgtcaagaatgtgtctgtcaaggatgttcgtcgtggcaacgtcgctggtgacagcaaaaatgacccaccaatggaagcagcgggcttcactgctcaggtgattatcctgaaccatccaggccaaataagcaccggctatgcccctgtattggattgccacacggctcacattgcatgcaagtttgctgagctgaaggaaaagattgatcgccgttctggtaaaaagctggaagatggccctaaattcttgaagtctggtgatgctgccattgttgatatggttcctggcaagcccatgtgtgttgagagcttctcagactatccacctttgggtcgctttgctgttcgtgatatgagacagacagttgcggtgggtgtcatcaaagcagtggacaagaaggctgctggagctggcaaggtcaccaagtctgcccagaaagctcagaaggctaaatgaatattatccctaatacctgccaccccactcttaatcagtggtggaagaatggtctcagaactgtttgtttcaattggccatttaagtttagtagtaaaagactggttaatgataacaatgcatcgtaaaaccttcagaaggaaaggagaatgttttgtggaccactttggttttcttttttgcgtgtggcagttttaagttattagtttttaaaatcagtactttttaatggaaacaactggaccaaaaatttgtcacagaattttgagacccattaaaaaagttaaatgagaaaaaaaaaaaaagaatcaaaatttt

SEQ ID NO: 16549 - protein, 404 aa, Homo sapiens
MGKEKTHINIVVIGHVDSGKSTTTGHLIYKCGGIDKRTIEKFEKEAAEMGKGSFKYAWVLDKLKAERERGITIDISLWKFETSKYYVTIIDAPGHRDFIKNMITGTSQADCAVLIVAAGVGEFEAGISKNGQTREHALLAYTLGVKQLIVGVNKGWKVTRKDGNASGTTLLEALDCILPPTHPTDKPLRLPLQDVYKIGGIGTVPVGRVETGVLKPGMVVTFAPVNVTTEVKSVEMHHEALSEALPGDNVGFNVKNVSVKDVRRGNVAGDSKNDPPMEAAGFTAQVIILNHPGQISTGYAPVLDCHTAHIACKFAELKEKIDRRSGKKLEDGPKFLKSGDAAIVDMVPGKPMCVESFSDYPPLGRFAVRDMRQTVAVGVIKAVDKKAAGAGKVTKSAQKAQKAK

SEQ ID NO: 16550 - DNA, 1673 bp, Homo sapiens
ctttttcgcaacgggtttgccgccagaacacaggtgtcgtgaaaactacccctaaaagccaaaatgggaaaggaaaagactcatatcaacattgtcgtcattggacacgtagattcaggcaagtccaccactactggccatctgatctataaatgcggtggcatcgacaaaagaaccattgaaaaatttgagaaggaggctgctgagatgggaaagggctccttcaagtatgcctgggtcttggataaactgaaagctgagcgtgaacgtggtatcaccattgatatctccttgtggaaatttgagaccagcaagtactatgtgactatcattgatgccccaggacacagggacttcatcaaaaacatgattacagggacatctcaggctgactgtgctgtcctgattgttgctgctggtgttggtgaatttgaagctggtatctccaagaatgggcagacccgagagcatgcccttctggcttacacactgggtgtgaaacaactaattgtcggtgttaacaaaatggattccactgagccaccctacagccagaagagatatgaggaaattgttaaggaatcagcacttacattaagaaaattggctacaaccccgacacagtagcatttgtgccaatttctggttggaatggtgacaacatgctggagccaagtgctaacatgccttggttcaagggatggaaagtcacccgtaaggatggcaatgccattggtggtattggtactgttcctgttggccgagtggagactggtgttctcaaacccggtatggtggtcacctttgctccagtcaacgttacaacggaagtaaaatctgtcgaaatgcaccatgaagctttgagtgaagctcttcctggggacaatgtgggcttcaatgtcaagaatgtgtctgtcaaggatgttcgtcgtggcaacgtcgctggtgacagcaaaaatgacccaccaatggaagcagcgggcttcactgctcaggtgattatcctgaaccatccaggccaaataagcaccggctatgcccctgtattggattgccacacggctcacattgcatgcaagtttgctgagctgaaggaaaagattgatcgccgttctggtaaaaagctggaagatggccctaaattcttgaagtctggtgatgctgccattgttgatatggttcctggcaagcccatgtgtgttgagagcttctcagactatccacctttgggtcgctttgctgttcgtgatatgagacagacagttgcggtgggtgtcatcaaagcagtggacaagaaggctgctggagctggcaaggtcaccaagtctgcccagaaagctcagaaggctaaatgaatattatccctaatacctgccaccccactcttaatcagtggtggaagaatggtctcagaactgtttgtttcaattggccatttaagtttagtagtaaaagactggttaatgataacaatgcatcgtaaaaccttcagaaggaaaggagaatgttttgtggaccactttggttttcttttttgcgtgtggcagttttaagttattagtttttaaaatcagtactttttaatggaaacaactggaccaaaaatttgtcacagaattttgagacccattaaaaaagttaaatgagaaaaaaaaaaaaagaatcaaaatttt

SEQ ID NO: 16551 - protein, 230 aa, Homo sapiens
MLEPSANMPWFKGWKVTRKDGNAIGGIGTVPVGRVETGVLKPGMVVTFAPVNVTTEVKSVEMHHEALSEALPGDNVGFNVKNVSVKDVRRGNVAGDSKNDPPMEAAGFTAQVIILNHPGQISTGYAPVLDCHTAHIACKFAELKEKIDRRSGKKLEDGPKFLKSGDAAIVDMVPGKPMCVESFSDYPPLGRFAVRDMRQTVAVGVIKAVDKKAAGAGKVTKSAQKAQKAK

SEQ ID NO: 16552 - DNA, 867 bp, Homo sapiens
ctttttcgcaacgggtttgccgccagaacacaggtgtcgtgaaaactacccctaaaagccaaaatgggaaaggaaaagactcatatcaacattgtcgtcattggacacgtagattcaggcaagtccaccactactggccatctgatctataaatgcggtggcatcgacaaaagaaccattgaaaaatttgagaaggaggctgctgagatgggaaagggctccttcaagtatgcctgggtcttggataaacacacggctcacattgcatgcaagtttgctgagctgaaggaaaagattgatcgccgttctggtaaaaagctggaagatggccctaaattcttgaagtctggtgatgctgccattgttgatatggttcctggcaagcccatgtgtgttgagagcttctcagactatccacctttgggtcgctttgctgttcgtgatatgagacagacagttgcggtgggtgtcatcaaagcagtggacaagaaggctgctggagctggcaaggtcaccaagtctgcccagaaagctcagaaggctaaatgaatattatccctaatacctgccaccccactcttaatcagtggtggaagaatggtctcagaactgtttgtttcaattggccatttaagtttagtagtaaaagactggttaatgataacaatgcatcgtaaaaccttcagaaggaaaggagaatgttttgtggaccactttggttttcttttttgcgtgtggcagttttaagttattagtttttaaaatcagtactttttaatggaaacaactggaccaaaaatttgtcacagaattttgagacccattaaaaaagttaaatgagaaaaaaaaaaaaagaatcaaaatttt

SEQ ID NO: 16553 - protein, 161 aa, Homo sapiens
MGKEKTHINIVVIGHVDSGKSTTTGHLIYKCGGIDKRTIEKFEKEAAEMGKGSFKYAWVLDKHTAHIACKFAELKEKIDRRSGKKLEDGPKFLKSGDAAIVDMVPGKPMCVESFSDYPPLGRFAVRDMRQTVAVGVIKAVDKKAAGAGKVTKSAQKAQKAK

SEQ ID NO: 16554 - DNA, 1464 bp, Homo sapiens
ctttttcgcaacgggtttgccgccagaacacaggtgtcgtgaaaactacccctaaaagccaaaatgggaaaggaaaagactcatatcaacattgtcgtcattggacacgtagattcaggcaagtccaccactactggccatctgatctataaatgcggtggcatcgacaaaagaaccattgaaaaatttgagaaggaggctgctgagatgggaaagggctccttcaagtatgcctgggtcttggataaactgaaagctgagcgtgaacgtggtatcaccattgatatctccttgtggaaatttgagaccagcaagtactatgtgactatcattgatgccccaggacacagggacttcatcaaaaacatgattacagggacatctcaggctgactgtgctgtcctgattgttgctgctggtgttggtgaatttgaagctggtatctccaagaatgggcagacccgagagcatgcccttctggcttacacactgggtgtgaaacaactaattgtcggtgttaacaaaatggattccactgagccaccctacagccagaagagatatgaggaaattgttaaggaatcagcacttacattaagaaaattggctacaaccccgacacagtagcatttgtgccaatttctggttggaatggtgacaacatgctggagccaagtgctaacatgccttggttcaagggatggaaagtcacccgtaaggatggcaatgccagtggaaccacgctgcttgaggctctggactgcatcctaccaccaactcatccaactgacaagcccttgcgcctgcctctccaggatgtctacaaaattggtggtattggtactgttcctgttggccgagtggagactggtgttctcaaacccggtatggtggtcacctttgctccagtcaacgttacaacggaagtaaaatctgtcgaaatgcaccatgaagctttgagtgaagctcttcctggggacaatgtgggcttcaatgtcaagaatgtgtctgtcaaggatgttcgtcgtggcaacgtcgctggtgacagcaaaaatgacccaccaatggaagcagcgggcttcactgctcaggtgattatcctgaaccatccaggccaaataagcaccggctatgcccctgtattggattgccacacggctcacattgcatgcaagtttgctgagctgaaggaaaagattgatcgccgttctggtaaaaagctggaagatggccctaaattcttgaagtctggtgatgctgccattgttgatatggttcctggcaagcccatgtgtgttgagagcttctcagactatccacctttgggtcgctttgctgttcgtgatatgagacagacagttgcggtgggtgtcatcaaagcagtggacaagaaggctgctggagctggcaaggtcaccaagtctgcccagaaattaaatgagaaaaaaaaaaaaagaatcaaaa

SEQ ID NO: 16555 - protein, 266 aa, Homo sapiens
MLEPSANMPWFKGWKVTRKDGNASGTTLLEALDCILPPTHPTDKPLRLPLQDVYKIGGIGTVPVGRVETGVLKPGMVVTFAPVNVTTEVKSVEMHHEALSEALPGDNVGFNVKNVSVKDVRRGNVAGDSKNDPPMEAAGFTAQVIILNHPGQISTGYAPVLDCHTAHIACKFAELKEKIDRRSGKKLEDGPKFLKSGDAAIVDMVPGKPMCVESFSDYPPLGRFAVRDMRQTVAVGVIKAVDKKAAGAGKVTKSAQKLNEKKKKRI

SEQ ID NO: 16556 - DNA, 1418 bp, Homo sapiens
tggccatctgatctataaatgcggtggcatcgacaaaagaaccattgaaaaatttgagaaggaggctgctgagatgggaaagggctccttcaagtatgcctgggtcttggataaactgaaagctgagcgtgaacgtggtatcaccattgatatctccttgtggaaatttgagaccagcaagtactatgtgactatcattgatgccccaggacacagggacttcatcaaaaacatgattacagggacatctcaggctgactgtgctgtcctgattgttgctgctggtgttggtgaatttgaagctggtatctccaagaatgggcagacccgagagcatgcccttctggcttacacactgggtgtgaaacaactaattgtcggtgttaacaaaatggattccactgagccaccctacagccagaagagatatgaggaaattgttaaggaatcagcacttacattaagaaaattggctacaaccccgacacagtagcatttgtgccaatttctggttggaatggtgacaacatgctggagccaagtgctaacatgccttggttcaagggatggaaagtcacccgtaaggatggcaatgccagtggaaccacgctgcttgaggctctggactgcatcctaccaccaactcatccaactgacaagcccttgcgcctgcctctccaggatgtctacaaaattggtggtattggtactgttcctgttggccgagtggagactggtgttctcaaacccggtatggtggtcacctttgctccagtcaacgttacaacggaagtaaaatctgtcgaaatgcaccatgaagctttgagtgaagctcttcctggggacaatgtgggcttcaatgtcaagaatgtgtctgtcaaggatgttcgtcgtggcaacgtcgctggtgacagcaaaaatgacccaccaatggaagcagcgggcttcactgctcaggtgattatcctgaaccatccaggccaaataagcaccggctatgcccctgtattggattgccacacggctcacattgcatgcaagtttgctgagctgaaggaaaagattgatcgccgttctggtaaaaagctggaagatggccctaaattcttgaagtctggtgatgctgccattgttgatatggttcctggcaagcccatgtgtgttgagagcttctcagatgtttgtttcaattggccatttaagtttagtagtaaaagactggttaatgataacaatgcatcgtaaaaccttcagaaggaaaggagaatgttttgtggaccactttggttttcttttttgcgtgtggcagttttaagttattagtttttaaaatcagtactttttaatggaaacaactggaccaaaaatttgtcacagaattttgagacccattaaaaaagttaaatgagaaaaaaaaa

SEQ ID NO: 16557 - protein, 238 aa, Homo sapiens
MLEPSANMPWFKGWKVTRKDGNASGTTLLEALDCILPPTHPTDKPLRLPLQDVYKIGGIGTVPVGRVETGVLKPGMVVTFAPVNVTTEVKSVEMHHEALSEALPGDNVGFNVKNVSVKDVRRGNVAGDSKNDPPMEAAGFTAQVIILNHPGQISTGYAPVLDCHTAHIACKFAELKEKIDRRSGKKLEDGPKFLKSGDAAIVDMVPGKPMCVESFSDVCFNWPFKFSSKRLVNDNNAS

SEQ ID NO: 16558 - DNA, 1193 bp, Homo sapiens
cgggtttgccgccagaacacaggtgtcgtgaaaactacccctaaaagccaaaatgggaaaggaaaagactcatatcaacattgtcgtcattggacacgtagattcaggcaagtccaccactactggccatctgatctataaatgcggtggcatcgacaaaagaaccattgaaaaatttgagaaggaggctgctgagatgggaaagggctccttcaagtatgcctgggtcttggataaactgaaagctgagcgtgaacgtggtatcaccattgatatctccttgtggaaatttgagaccagcaagtactatgtgactatcattgatgccccaggacacagggacttcatcaaaaacatgattacagggacatctcaggctgactgtgctgtcctgattgttgctgctggtgttggtgaatttgaagctggtatctccaagaattaagaaaattggctacaaccccgacacagtagcatttgtgccaatttctggttggaatggtgacaacatgctggagccaagtgctaacatgccttggttcaagggatggaaagtcacccgtaaggatggcaatgccagtggaaccacgctgcttgaggctctggactgcatcctaccaccaactcatccaactgacaagcccttgcgcctgcctctccaggatgtctacaaaattggtggtattggtactgttcctgttggccgagtggagactggtgttctcaaacccggtatggtggtcacctttgctccagtcaacgttacaacggaagtaaaatctgtcgaaatgcacagacagttgcggtgggtgtcatcaaagcagtggacaagaaggctgctggagctggcaaggtcaccaagtctgcccagaaagctcagaaggctaaatgaatattatccctaatacctgccaccccactcttaatcagtggtggaagaatggtctcagaactgtttgtttcaattggccatttaagtttagtagtaaaagactggttaatgataacaatgcatcgtaaaaccttcagaaggaaaggagaatgttttgtggaccactttggttttcttttttgcgtgtggcagttttaagttattagtttttaaaatcagtactttttaatggaaacaactggaccaaaaatttgtcacagaattttgagacccattaaaaaagttaaatgagaaaaaaaaa

SEQ ID NO: 16559 - protein, 131 aa, Homo sapiens
MLEPSANMPWFKGWKVTRKDGNASGTTLLEALDCILPPTHPTDKPLRLPLQDVYKIGGIGTVPVGRVETGVLKPGMVVTFAPVNVTTEVKSVEMHRQLRWVSSKQWTRRLLELARSPSLPRKLRRLNEYYP

SEQ ID NO: 16560 - DNA, 1385 bp, Homo sapiens
ttttttttctcatttaacttttttaatgggtctcaaaattctgtgacaaatttttggtccagttgtttccattaaaaagtactgattttaaaaactaataacttaaaactgccacacgcaaaaaagaaaaccaaagtggtccacaaaacattctcctttccttctgaaggttttacgatgcattgttatcattaaccagtcttttactactaaacttaaatggccaattgaaacaaacagttctgagaccattcttccaccactgattaagagtggggtggcaggtattagggataatattcatttagccttctgagctttctgggcagacttggtgaccttgccagctccagcagccttcttgtccactgctttgatgacacccaccgcaactgtctgtctcatatcacgaacagcaaagcgacccaaaggtggatagtctgagaagctctcaacacacatgggcttgccaggaaccatatcaacaatggcagcatcaccagacttcaagaatttagggccatcttccagctttttaccagaacggcgatcaatcttttccttcagctcagcaaacttgcatgcaatgtgagccgtgtggcaatccaatacaggggcatagccggtgcttatttggcctggatggttcaggataatcacctgagcagtgaagcccgctgcttccattggtgggtcatttttgctgtcaccagcgacgttgccacgacgaacatccttgacagacacattcttgacattgaagcccacattgtccccaggaagagcttcactcaaagcttcatggtgcatttcgacagattttacttccgttgtaacgttgactggagcaaaggtgaccaccataccgggtttgagaacaccagtctccactcggccaacaggaacagtaccaataccaccaattttgtagacatcttggagataccagcttcaaattcaccaacaccagcagcaacaatcaggacagcacagtcagcctgagatgtccctgtaatcatgtttttgatgaagtccctgtgtcctggggcatcaatgatagtcacatagtacttgctggtctcaaatttccacaaggagatatcaatggtgataccacgttcacgctcagctttcagtttatccaagacccaggcatacttgaaggagccctttcccatctcagcagcctccttctcaaatttttcaatggttcttttgtcgatgccaccgcatttatagatcagatggccagtagtggtggacttgcctgaatctacgtgtccaatgacgacaatgttgatatgagtcttttcctttcccattttggcttttaggggtagttttcacgacacctgtgttctggcggcaaacccgttgcgaaaaag

SEQ ID NO: 16561 - protein, 119 aa, Homo sapiens
MVQDNHLSSEARCFHWWVIFAVTSDVATTNILDRHILDIEAHIVPRKSFTQSFMVHFDRFYFRCNVDWSKGDHHTGFENTSLHSANRNSTNTTNFVDILEIPASNSPTPAATIRTAQSA

SEQ ID NO: 16562 - DNA, 1265 bp, Homo sapiens
gattacagggacatctcaggctgactgtgctgtcctgattgttgctgctggtgttggtgaatttgaagctggtatctccaagaatgggcagacccgagagcatgcccttctggcttacacactgggtgtgaaacaactaattgtcggtgttaacaaaatggattccactgagccaccctacagccagaagagatatgaggaaattgttaaggaatcagcacttacattaagaaaattggctacaaccccgacacagtagcatttgtgccaatttctggttggaatggtgacaacatgctggagccaagtgctaacatgccttggttcaagggatggaaagtcacccgtaaggatggcaatgccagtggaaccacgctgcttgaggctctggactgcatcctaccaccaactcatccaactgacaagcccttgcgcctgcctctccaggatgtctacaaaattggtggtattggtactgttcctgttggccgagtggagactggtgttctcaaacccggtatggtggtcacctttgctccagtcaacgttacaacggaagtaaaatctgtcgaaatgcaccatgaagctttgagtgaagctcttcctggggacaatgtgggcttcaatgtcaagaatgtgtctgtcaaggatgttcgtcgtggcaacgtcgctggtgacagcaaaaatgacccaccaatggaagcagcgggcttcactgctcaggtgattatcctgaaccatccaggccaaataagcaccggctatgcccctgtattggattgccacacggctcacattgcatgcaagtttgctgagctgaaggaaaagattgatcgccgttctggtaaaaagctggaagatggccctaaattcttgaagtctggtgatgctgccattgttgatatggttcctggcaagcccatgtgtgttgagagcttctcagactatccacctttgggtcgctttgctgttcgtgatatgagacagacagttgcggtgggtgtcatcaaagcagtggacaagaaggctgctggagctggcaaggtcaccaagtctgcccagaaagctcagaaggctaaatgaatattatccctaatacctgccaccccactcttaatcagtggtggaagaatggtctcagaactgtttgtttcaattggccatttaagtttagtagtaaaagactggttaatgataacaatgcatcgtaaaaccaaaaatttgtcacagaattttgagacccattaaaaaagttaaatgagaaa

SEQ ID NO: 16563 - protein, 38 aa, Homo sapiens
MVSELFVSIGHLSLVVKDWLMITMHRKTKNLSQNFETH

SEQ ID NO: 16564 - DNA, 1488 bp, Homo sapiens
ttttcgcaacgggtttgccgccagaacacaggtgtcgtgaaaactacccctaaaagccaaaatgggaaaggaaaagactcatatcaacattgtcgtcattggacacgtagattcaggcaagtccaccactactggccatctgatctataaatgcggtggcatcgacaaaagaaccattgaactggtatctccaagaatgggcagacccgagagcatgcccttctggcttacacactgggtgtgaaacaactaattgtcggtgttaacaaaatggattccactgagccaccctacagccagaagagatatgaggaaattgttaaggaatcagcacttacattaagaaaattggctacaaccccgacacagtagcatttgtgccaatttctggttggaatggtgacaacatgctggagccaagtgctaacatgccttggttcaagggatggaaagtcacccgtaaggatggcaatgccagtggaaccacgctgcttgaggctctggactgcatcctaccaccaactcatccaactgacaagcccttgcgcctgcctctccaggatgtctacaaaattggtggtattggtactgttcctgttggccgagtggagactggtgttctcaaacccggtatggtggtcacctttgctccagtcaacgttacaacggaagtaaaatctgtcgaaatgcaccatgaagctttgagtgaagctcttcctggggacaatgtgggcttcaatgtcaagaatgtgtctgtcaaggatgttcgtcgtggcaacgtcgctggtgacagcaaaaatgacccaccaatggaagcagcgggcttcactgctcaggtgattatcctgaaccatccaggccaaataagcaccggctatgcccctgtattggattgccacacggctcacattgcatgcaagtttgctgagctgaaggaaaagattgatcgccgttctggtaaaaagctggaagatggccctaaattcttgaagtctggtgatgctgccattgttgatatggttcctggcaagcccatgtgtgttgagagcttctcagactatccacctttgggtcgctttgctgttcgtgatatgagacagacagttgcggtgggtgtcatcaaagcagtggacaagaaggctgctggagctggcaaggtcaccaagtctgcccagaaagctcagaaggctaaatgaatattatccctaatacctgccaccccactcttaatcagtggtggaagaatggtctcagaactgtttgtttcaattggccatttaagtttagtagtaaaagactggttaatgataacaatgcatcgtaaaaccttcagaaggaaaggagaatgttttgtggaccactttggttttcttttttgcgtgtggcagttttaagttattagtttttaaaatcagtactttttaatggaaacaactggaccaaaaatttgtcacagaattttgagacccattaaaaaagttaaatgag

SEQ ID NO: 16565 - protein, 60 aa, Homo sapiens; identical to SEQ ID NO: 16545

SEQ ID NO: 16566 - DNA, 841 bp, Homo sapiens
ctttttcgcaacgggtttgccgccagaacacaggtgtcgtgaaaactacccctaaaagccaaaatgggaaaggaaaagactcatatcaacattgtcgtcattggacacgtagattcaggcaagtccaccactactggccatctgatctataaatgcggtggcatcgacaaaagaaccattgaaaaatttgagaaggaggctgctgagatgggaaagggctccttcaagtatgcctgggtcttggataaacacacggctcacattgcatgcaagtttgctgagctgaaggaaaagattgatcgccgttctggtaaaaagctggaagatggccctaaattcttgaagtctggtgatgctgccattgttgatatggttcctggcaagcccatgtgtgttgagagcttctcagactatccacctttgggtcgctttgctgttcgtgatatgagacagacagttgcggtgggtgtcatcaaagcagtggacaagaaggctgctggagctggcaaggtcaccaagtctgcccagaaagctcagaaggctaaatgaatattatccctaatacctgccaccccactcttaatcagtggtggaagaatggtctcagaactgtttgtttcaattggccatttaagtttagtagtaaaagactggttaatgataacaatgcatcgtaaaaccttcagaaggaaaggagaatgttttgtggaccactttggttttcttttttgcgtgtggcagttttaagttattagtttttaaaatcagtactttttaatggaaacaactggaccaaaaatttgtcacagaattttgagacccattaaaaaagttaaatgag

SEQ ID NO: 16567 - protein, 161 aa, Homo sapiens; identical to SEQ ID NO: 16553

SEQ ID NO: 16568 - DNA, 1570 bp, Homo sapiens
ctttttcgcaacgggtttgccgccagaacacaggtgtcgtgaaaactacccctaaaagccaaaatgggaaaggaaaagactcatatcaacattgtcgtcattggacacgtagattcaggcaagtccaccactactggccatctgatctataaatgcggtggcatcgacaaaagaaccattgaaaaatttgagaaggaggctgctgagatgggaaagggctccttcaagtatgcctgggtcttggataaactgaaagctgagcgtgaacgtggtatcaccattgatatctccttgtggaaatttgagaccagcaagtactatgtgactatcattgatgccccaggacacagggacttcatcaaaaacatgattacagggacatctcaggctgactgtgctgtcctgattgttgctgctggtgttggtgaatttgaagctggtatctccaagaatgggcagacccgagagcatgcccttctggcttacacactgggtgtgaaacaactaattgtcggtgttaacaaaggatggaaagtcacccgtaaggatggcaatgccagtggaaccacgctgcttgaggctctggactgcatcctaccaccaactcatccaactgacaagcccttgcgcctgcctctccaggatgtctacaaaattggtggtattggtactgttcctgttggccgagtggagactggtgttctcaaacccggtatggtggtcacctttgctccagtcaacgttacaacggaagtaaaatctgtcgaaatgcaccatgaagctttgagtgaagctcttcctggggacaatgtgggcttcaatgtcaagaatgtgtctgtcaaggatgttcgtcgtggcaacgtcgctggtgacagcaaaaatgacccaccaatggaagcagcgggcttcactgctcaggtgattatcctgaaccatccaggccaaataagcaccggctatgcccctgtattggattgccacacggctcacattgcatgcaagtttgctgagctgaaggaaaagattgatcgccgttctggtaaaaagctggaagatggccctaaattcttgaagtctggtgatgctgccattgttgatatggttcctggcaagcccatgtgtgttgagagcttctcagactatccacctttgggtcgctttgctgttcgtgatatgagacagacagttgcggtgggtgtcatcaaagcagtggacaagaaggctgctggagctggcaaggtcaccaagtctgcccagaaagctcagaaggctaaatgaatattatccctaatacctgccaccccactcttaatcagtggtggaagaatggtctcagaactgtttgtttcaattggccatttaagtttagtagtaaaagactggttaatgataacaatgcatcgtaaaaccttcagaaggaaaggagaatgttttgtggaccactttggttttcttttttgcgtgtggcagttttaagttattagtttttaaaatcagtactttttaatggaaacaactggaccaaaaatttgtcacagaattttgagacccattaaaaaagttaaatgag

SEQ ID NO: 16569 - protein, 404 aa, Homo sapiens; identical to SEQ ID NO: 16549

SEQ ID NO: 16570 - DNA, 1647 bp, Homo sapiens
ctttttcgcaacgggtttgccgccagaacacaggtgtcgtgaaaactacccctaaaagccaaaatgggaaaggaaaagactcatatcaacattgtcgtcattggacacgtagattcaggcaagtccaccactactggccatctgatctataaatgcggtggcatcgacaaaagaaccattgaaaaatttgagaaggaggctgctgagatgggaaagggctccttcaagtatgcctgggtcttggataaactgaaagctgagcgtgaacgtggtatcaccattgatatctccttgtggaaatttgagaccagcaagtactatgtgactatcattgatgccccaggacacagggacttcatcaaaaacatgattacagggacatctcaggctgactgtgctgtcctgattgttgctgctggtgttggtgaatttgaagctggtatctccaagaatgggcagacccgagagcatgcccttctggcttacacactgggtgtgaaacaactaattgtcggtgttaacaaaatggattccactgagccaccctacagccagaagagatatgaggaaattgttaaggaatcagcacttacattaagaaaattggctacaaccccgacacagtagcatttgtgccaatttctggttggaatggtgacaacatgctggagccaagtgctaacatgccttggttcaagggatggaaagtcacccgtaaggatggcaatgccattggtggtattggtactgttcctgttggccgagtggagactggtgttctcaaacccggtatggtggtcacctttgctccagtcaacgttacaacggaagtaaaatctgtcgaaatgcaccatgaagctttgagtgaagctcttcctggggacaatgtgggcttcaatgtcaagaatgtgtctgtcaaggatgttcgtcgtggcaacgtcgctggtgacagcaaaaatgacccaccaatggaagcagcgggcttcactgctcaggtgattatcctgaaccatccaggccaaataagcaccggctatgcccctgtattggattgccacacggctcacattgcatgcaagtttgctgagctgaaggaaaagattgatcgccgttctggtaaaaagctggaagatggccctaaattcttgaagtctggtgatgctgccattgttgatatggttcctggcaagcccatgtgtgttgagagcttctcagactatccacctttgggtcgctttgctgttcgtgatatgagacagacagttgcggtgggtgtcatcaaagcagtggacaagaaggctgctggagctggcaaggtcaccaagtctgcccagaaagctcagaaggctaaatgaatattatccctaatacctgccaccccactcttaatcagtggtggaagaatggtctcagaactgtttgtttcaattggccatttaagtttagtagtaaaagactggttaatgataacaatgcatcgtaaaaccttcagaaggaaaggagaatgttttgtggaccactttggttttcttttttgcgtgtggcagttttaagttattagtttttaaaatcagtactttttaatggaaacaactggaccaaaaatttgtcacagaattttgagacccattaaaaaagttaaatgag

SEQ ID NO: 16571 - protein, 230 aa, Homo sapiens; identical to SEQ ID NO: 16551

SEQ ID NO: 16572 - DNA, 1606 bp, Homo sapiens
acgggtttgccgccagaacacaggtgtcgtgaaaactacccctaaaagccaaaatgggaaaggaaaagactcatatcaacattgtcgtcattggacacgtagattcaggcaagtccaccactactggccatctgatctataaatgcggtggcatcgacaaaagaaccattgaaaaatttgagaaggaggctgctgagatgggaaagggctccttcaagtatgcctgggtcttggataaactgaaagctgagcgtgaacgtggtatcaccattgatatctccttgtggaaatttgagaccagcaagtactatgtgactatcattgatgccccaggacacagggacttcatcaaaaacatgattacagggacatctcaggctgactgtgctgtcctgattgttgctgctggtgttggtgaatttgaagctggtatctccaagaatgggcagacccgagagcatgcccttctggcttacacactgggtgtgaaacaactaattgtcggtgttaacaaaatggattccactgagccaccctacagccagaagagatatgaggaaattgttaaggaatcagcacttacattaagaaaattggctacaaccccgacacagtagcatttgtgccaatttctggttggaatggtgacaacatgctggagccaagtgctaacatgccttggttcaagggatggaaagtcacccgtaaggatggcaatgccagtggaaccacgctgcttgaggctctggactgcatcctaccaccaactcatccaactgacaagcccttgcgcctgcctctccaggatgtctacaaaattggtggtattggtactgttcctgttggccgagtggagactggtgttctcaaacccggtatggtggtcacctttgctccagtcaacgttacaacggaagtaaaatctgtcgaaatgcaccatgaagctttgagtgaagctcttcctggggacaatgtgggcttcaatgtcaagaatgtgtctgtcaaggatgttcgtcgtggcaacgtcgctggtgacagcaaaaatgacccaccaatggaagcagcgggcttcactgctcaggtgattatcctgaaccatccaggccaaataagcaccggctatgcccctgtattggattgccacacggctcacattgcatgcaagtttgctgagctgaaggaaaagattgatcgccgttctggtaaaaagctggaagatggccctaaattcttgaagtctggtgatgctgccattgttgatatggttcctggcaagcccatgtgtgttgagagcttctcagactatccacctttgggtcgctttgctgttcgtgatatgagacagacagttgcggtgggtgtcatcaaagcagtggacaagaaggctgctggagctggcaaggtcaccaagtctgcccagaaagctcagaaggctaaatgaatattatccctaatacctgccaccccactcttaatcagtggtggaagaatggtctcagaactgtttgtttcaattggccatttaagtttagtagttttcttttttgcgtgtggcagttttaagttattagtttttaaaatcagtactttttaatggaaacaactg

SEQ ID NO: 16573 - protein, 41 aa, Homo sapiens
MNIIPNTCHPTLNQWWKNGLRTVCFNWPFKFSSFLFCVWQF

SEQ ID NO: 16574 - DNA, 2425 bp, Homo sapiens
agcagagccgcccagcagcaaccacattaggaaggaatcggaaaccaacgctccgctggctgtcaccccttacccacttgctgtcagaccacagcctgaggcagccaaacccatttccttggggatccagcgcaaaccagagagtgtggacaggccgatggaagaatgttggaccagctttaagaatgggctgttctaagtcatgaatattgtaggaagcagctctaaggaccacagggctggagggtgcacaggaaggggccagtgcatacaggtgtccaaacagtgtcatccggtgtcctgacatgcggccccaatggactgatccagggtggaaaggaagagtgagaagaaatcagacagaagaattcaggagatgtggcaacagagtggatgtagcagaagggacatagagagtgcctaaagatgagtctttggtcagcatgtgatgaaaagaatgaagacactggggaagtggggagcagaagcggatgtgggcccaggaggaagaagattccagagagcagagatggcaaaaagatgcatggaagagagacacagcagggtcgggttctggcctcaggagccaagggggaagtgcctgaggagacccccaaatgaggcctgtgtcaatgaggtctttaggggactggtttccatgtatgccaggccatactccctggattcccagcattgagaagaccaaacacttctacacatttattactgaagccccctgcaagctgaaggcggaggaagtggccaatctcctaagccgtgtgtggctgaggcagttgtcagagctgtgatgagggaaatgctcattattcttctatccctcacttggccaaataaagaacttcttagaattcttcccctgtgacaaaacggggctgtgatttggaaagcctcaggcaagtttgctagggccgcggtaaccaagcaccacagactgggtggcttcaaaactggacggcttcaacagaaagttattgttgctcagttctggaagccagaagtccaaaatcaaggtacttgcagggtcagttcgatctgagggctgcgagggaaggatctgttgtagacctctctcctaggtttgcaggcattggtcctgatgttcacagggcatccttcctgtgccttcacatcatcttctctctgaatgtatctctgggtccaaatttccctattttaaaataaggaaatcagtcctattgggttagcaccccgcccctcactttaacttgattacctctgtaaagaccctacctccaaataagatcacattctgcgtactgagggctaggacctcaacatctgaattcagggtgggtggatgcacaattcattccataacattaagaaggaagggataagtgcccaaggaatcacatgctcgcttggggagagttccaagcgtgcagagctggtggtcatagcctagcctcaggccttcggaaatcccctgaatctggttttcccagttctcataatctcatttcaccaaaatacggcatctcaatacattccatgcatttctggtgacaagctcattctggtgcacgctaagcaatgtgctaactacgtcttaactagggtggtttaactggtttggttaacatagatctctgagtcatttcacgcattccttaagcctaaacaaatctcatccaggtgtttaagacattgcacaatattagaccatctgaagctccatctccttggggcaatgatgatgatggtgatgaaagtggctggtgactgttctcagtctcatcgccataatggaaccctacgttgtgttcctccacactggtgtgagggacactactaagtgcggcagagtttgcactcaggatagagaaatatggactcacgcacagattccagctgagtccctccgatgtgctaggtactatgtccagccccccaggattcacctgtaagcaggacagtcttttggatgacagagggaattctcatatatccacaggcagatggaatttacaagtggaaagacctagaagttcagagacagggggactgaactttttgctttcagtcagaatctttgcttacggttgtgcaaatgcttgcattggtgggtttccatgccatataacgtgctacatatttttacgttacccttgcacataagcatactgttgggagggaaaatgaagagggtggaggtggtaacaaactcaagctaaggaaatggaatttggatgggtacaaagtccagagaattagcttgaggaaaatgaaccaggattcacacaggagttttcaaacatctcaatatcaggacccctttaccctcttaaaacttacttcgtgaggaccttaaagagcttttgtttgtgtgacttatatgtattaatatttactatattagaaattaaaagtaaggaatggttgt

SEQ ID NO: 16575 - protein, 82 aa, Homo sapiens [sequence omitted]

SEQ ID NO: 16576 - DNA, 1282 bp, Homo sapiens
gacccaggtggctggggtggcagctgatcatgtcaggaggactcctctgcacaacatcacaagcacaggagagaatgctaaacttgattgggagctcacagaagacccctggaacccagagcaataagggaaatttggacccagagatacattcagagagaagatgatgtgaaggcacaggaaggatgccctgtgaacatcaggaccaatgcctgcaaacctaggagagaggtctacaacagatccttccctcgcagccctcagatcgaactgaccctgcaagtaccttgattttggacttctggcttccagaactgagcaacaataactttctgttgaagccgtccagttttgaagccacccagtctgtggtgcttggttaccgcggccctagcaaacttgcctgaggctttccaaatcacagccccgttttgtcacaggggaagaattctaagaagttctttatttggccaagtgagggatagaagaataatgagcatttccctcatcacagctctgacaactgcctcagccacacacggcttaggagattggccacttcctccgccttcagcttgcagggggcttcagtaataaatgtgtagaagtgtttggtcttctcaatgctgggaatccagggagtatggcctggcatacatggaaaccagtcccctaaagacctcattgacacaggcctcatttgggggtctcctcaggcacttcccccttggctcctgaggccagaacccgaccctgctgtgtctctcttccatgcatctttttgccatctctgctctctggaatctgcaacaatatgagggtgctcaggactttgatgttgctactgacctcagcatgccccagtccaaacctaccttcttcctcctgggcccacatccgcttctgctccccacttccccagtgtcttcattcttttcatcacatgctgaccaaagactcatctttaggcactctctatgtcccttctgctacatccactctgttgccacatctcctgaattcttctgtctgatttcttctcactcttcctttccaccctggatcagtccattggggccgcatgtcaggacaccggatgacactgtttggacacctggaaggatcgggtaaaagatacagagaagtctaaggagggatagggtgagtctgggatgggctgtggattaggcaccaggtaaagctaattggggggtgggtgaggaatggggtgagggtatctattgcatctattttatggtaataaaaggaagttgaaagttca

SEQ ID NO: 16577 - protein, 45 aa, Homo sapiens
MSGGLLCTTSQAQERMLNLIGSSQKTPGTQSNKGNLDPEIHSERR

SEQ ID NO: 16578 - DNA, 557 bp, Homo sapiens
ctagacttctttctccaggctcccgttgtgtggcttggctgcccactacctcattcccatcaatggacaatggctgggagagaaagcctccgtgactgtatcacggaacagtctccactccaggttatggatccactgttgggcagttctacactgctcacatccggatgccgattctgccagcaaatccatctgattctatctctctctccggtctgtctaactctaggttctgcacatgtctaacatgtggttgtgtgagtgccagagtgcaagctcttgggaggcaggggacacatttattgatgttgtatcaccaacatttagtacatgcctgctaaaaagttactgtcaacatatttgttgaacaatgattactggatgggtggatgaaacatcaatatgacttgcccaagggcagttatgaatgtctccaaaactatttcaggggtaattcatgaacatgtcctctgaggattcttcttccatctctaagtcagttcctatgatatgactacctcagggcaagaaagtcactgtgtccctgctacaacaaa

SEQ ID NO: 16579 - protein, 58 aa, Homo sapiens
MAGRESLRDCITEQSPLQVMDPLLGSSTLLTSGCRFCQQIHLILSLSPVCLTLGSAHV

SEQ ID NO: 16580 - DNA, 1362 bp, Homo sapiens
ctgagatgccgtcgaggatgtaccgaatttgtttgtcaattcgttctgaagagccccccaagcctgggattatgaagaaggtaatactaccagtcatctgagttcttctgtgttctggctctccctgtgagcggctgttgtagaactgcctggccatcctcaaatttcgtgcagttacttcaaggcgtctccaggtggagtgtgtgactcctttttgccaccgcgtggcttctgccactttcttcacctgcttcagcccacttagaggaggttggctgctgccctgccctctcccaagtgaccccttgggaatcctcccagtgaggactttgctctctgtgccagaggtttgccttgtgctgccagtgctctccccattgccactgagtctcttcaccactgtttcactggggcacctgcatgggccccaggtctcctggagccctgaaattactgaagcccacttggttcagggcagaaagggggagaatactactcacctctttgttggggatgtcaaaggaggaccttgtggcatcttgcagagtttgtgtttatcgctccctctccctgtaagtcttgatttgaaatcaaaagaagctagaaggaaactacggacgcaggcacggctctaggctctgaatctgcttccgcgtcggcacccaagaatttcttattgggtcaagctggttcagaagccctcttccctcaggatggtgtctcttgcaggaggatccttggtctcatgcaaatgggctctagactaggttgtccctccagtctccagagacccagacagctctgagatggcttcaggctgaaaccagacccttgcacaacaccaaaacacttatttaccaaacatggtgttaccttcacaatcggtttctttgctttgctaagaagagatctcttcaagatcgataaaacagtgacctctgttgggcatttactcaagttttgtttcgtgcataacatttcaggacccgcctgttggggaaagtgaggtcatccattcttcaccgattgtctaaacagagacggtggtcctctgccgcggtgggattctttggtgtgaaaatgaaaatgggggaggatggctggatggtttcatttttagtgctctcctgtcttaagcaacgtagacactcctgaaccaagttctctttcctgcatgaaacgaagccactgctcccagctccgcagccgtgcactgtgatccgtctatgtaatgtgagcttgcttttactcaactatctattttttagaaaatacaattcaataaatttcaagtacttgaactgagtgacacaatacaacacacagatttatcttttcaataaaaagtgttttttaaatagg

SEQ ID NO: 16581 - protein, 31 aa, Homo sapiens
MPSRMYRICLSIRSEEPPKPGIMKKVILPVI

SEQ ID NO: 16582 - DNA, 1527 bp, Homo sapiens
aggtaacaccatgtttggtaaataagtgttttggtgttgtgcaagggtctggtttcagcctgaagccatctcagagctgtctgggtctctggagactggagggacaacctagtctagagcccatttgcatgagaccaaggatcctcctgcaagagacaccatcctgagggaagagggcttctgaaccagcttgacccaataagaaattcttgggtgccgacgcggaagcagattcagagcctagagccgtgcctgcgtccgtagtttccttctagcttcttttgatttcaaatcaagacttacagggagagggagcgataaacacaaactctgcaagatgccacaaggtcctcctttgacatccccaacaaagaggactggagatgtctgaggctcattctgccctcgagcccaccgggaacgaaagagaagctctatctcccctccaggagcccagctatgaactccttctccacaagcgccttcggtccagttgccttctccctggggctgctcctggtgttgcctgctgccttccctgccccagtacccccaggagaagattccaaagatgtagccgccccacacagacagccactcacctcttcagaacgaattgacaaacaaattcggtacatcctcgacggcatctcagccctgagaaaggagacatgtaacaagagtaacatgtgtgaaagcagcaaagaggcactggcagaaaacaacctgaaccttccaaagatggctgaaaaagatggatgcttccaatctggattcaatgaggagacttgcctggtgaaaatcatcactggtcttttggagtttgaggtatacctagagtacctccagaacagatttgagagtagtgaggaacaagccagagctgtgcagatgagtacaaaagtcctgatccagttcctgcagaaaaaggcaaagaatctagatgcaataaccacccctgacccaaccacaaatgccagcctgctgacgaagctgcaggcacagaaccagtggctgcaggacatgacaactcatctcattctgcgcagctttaaggagttcctgcagtccagcctgagggctcttcggcaaatgtagcatgggcacctcagattgttgttgttaatgggcattccttcttctggtcagaaacctgtccactgggcacagaacttatgttgttctctatggagaactaaaagtatgagcgttaggacactattttaattatttttaatttattaatatttaaatatgtgaagctgagttaatttatgtaagtcatatttatatttttaagaagtaccacttgaaacattttatgtattagttttgaaataataatggaaagtggctatgcagtttgaatatcctttgtttcagagccagatcatttcttggaaagtgtaggcttacctcaaataaatggctaacttatacatatttttaaagaaatatttatattgtatttatataatgtataaatggtttttataccaataaatggcattttaaaaaattcagcaa

SEQ ID NO: 16583 - protein, 212 aa, Homo sapiens; identical to SEQ ID NO: 1918

SEQ ID NO: 16584 - DNA, 808 bp, Homo sapiens
ctgccctcgagcccaccgggaacgaaagagaagctctatctcccctccaggagcccagctatgaactccttctccacaagcgccttcggtccagttgccttctccctggggctgctcctggtgttgcctgctgccttccctgccccagtacccccaggagaagattccaaagatgtagccgccccacacagacagccactcacctcttcagaacgaattgacaaacaaattcggtacatcctcgacggcatctcagccctgagaaaggagacatgtaacaagagtaacatgtgtgaaagcagcaaagaggcactggcagaaaacaacctgaaccttccaaagatggctgaaaaagatggatgcttccaatctggattcaatgaggagacttgcctggtgaaaatcatcactggtcttttggagtttgaggtatacctagagtacctccagaacagatttgagagtagtgaggaacaagccagagctgtgcagatgagtacaaaagtcctgatccagttcctgcagaaaaaggtgggtgtgtcctcattccctcaacttggtgtgggggaagacaggctcaaagacagtgtcctggacaactcagggatgcaatgccacttccaaaagagaaggctacacgtaaacaaaagagtctgagaaatagtttctgattgttattgttaaatctttttttgtttgtttggttggttggctctcttctgcaaaggacatcaataactgtattttaaactatatattaactgaggtggattttaacatcaatttttaatagtgcaagagatttaaa

SEQ ID NO: 16585 - protein, 198 aa, Homo sapiens
MNSFSTSAFGPVAFSLGLLLVLPAAFPAPVPPGEDSKDVAAPHRQPLTSSERIDKQIRYILDGISALRKETCNKSNMCESSKEALAENNLNLPKMAEKDGCFQSGFNEETCLVKIITGLLEFEVYLEYLQNRFESSEEQARAVQMSTKVLIQFLQKKVGVSSFPQLGVGEDRLKDSVLDNSGMQCHFQKRRLHVNKRV

SEQ ID NO: 16586 - DNA, 926 bp, Homo sapiens
cccaccgggaacgaaagagaagctctatctcccctccaggagcccagctatgaactccttctccacaaacatgtaacaagagtaacatgtgtgaaagcagcaaagaggcactggcagaaaacaacctgaaccttccaaagatggctgaaaaagatggatgcttccaatctggattcaatgaggagacttgcctggtgaaaatcatcactggtcttttggagtttgaggtatacctagagtacctccagaacagatttgagagtagtgaggaacaagccagagctgtgcagatgagtacaaaagtcctgatccagttcctgcagaaaaaggcaaagaatctagatgcaataaccacccctgacccaaccacaaatgccagcctgctgacgaagctgcaggcacagaaccagtggctgcaggacatgacaactcatctcattctgcgcagctttaaggagttcctgcagtccagcctgagggctcttcggcaaatgtagcatgggcacctcagattgttgttgttaatgggcattccttcttctggtcagaaacctgtccactgggcacagaacttatgttgttctctatggagaactaaaagtatgagcgttaggacactattttaattatttttaatttattaatatttaaatatgtgaagctgagttaatttatgtaagtcatatttatatttttaagaagtaccacttgaaacattttatgtattagttttgaaataataatggaaagtggctatgcagtttgaatatcctttgtttcagagccagatcatttcttggaaagtgtaggcttacctcaaataaatggctaacttatacatatttttaaagaaatatttatattgtatttatataatgtataaatggtttttataccaataaatggcattttaaaaaattcagcaa

SEQ ID NO: 16587 - protein, 136 aa, Homo sapiens
MCESSKEALAENNLNLPKMAEKDGCFQSGFNEETCLVKIITGLLEFEVYLEYLQNRFESSEEQARAVQMSTKVLIQFLQKKAKNLDAITTPDPTTNASLLTKLQAQNQWLQDMTTHLILRSFKEFLQSSLRALRQM

SEQ ID NO: 16588 - DNA, 1038 bp, Homo sapiens
acgaaagagaagctctatctcccctccaggagcccagctatgaactccttctccacaatacccccaggagaagattccaaagatgtagccgccccacacagacagccactcacctcttcagaacgaattgacaaacaaattcggtacatcctcgacggcatctcagccctgagaaaggagacatgtaacaagagtaacatgtgtgaaagcagcaaagaggcactggcagaaaacaacctgaaccttccaaagatggctgaaaaagatggatgcttccaatctggattcaatgaggagacttgcctggtgaaaatcatcactggtcttttggagtttgaggtatacctagagtacctccagaacagatttgagagtagtgaggaacaagccagagctgtgcagatgagtacaaaagtcctgatccagttcctgcagaaaaaggcaaagaatctagatgcaataaccacccctgacccaaccacaaatgccagcctgctgacgaagctgcaggcacagaaccagtggctgcaggacatgacaactcatctcattctgcgcagctttaaggagttcctgcagtccagcctgagggctcttcggcaaatgtagcatgggcacctcagattgttgttgttaatgggcattccttcttctggtcagaaacctgtccactgggcacagaacttatgttgttctctatggagaactaaaagtatgagcgttaggacactattttaattatttttaatttattaatatttaaatatgtgaagctgagttaatttatgtaagtcatatttatatttttaagaagtaccacttgaaacattttatgtattagttttgaaataataatggaaagtggctatgcagtttgaatatcctttgtttcagagccagatcatttcttggaaagtgtaggcttacctcaaataaatggctaacttatacatatttttaaagaaatatttatattgtatttatataatgtataaatggtttttataccaataaatggcattttaaaaaattcagcaa

SEQ ID NO: 16589 - protein, 189 aa, Homo sapiens
MNSFSTIPPGEDSKDVAAPHRQPLTSSERIDKQIRYILDGISALRKETCNKSNMCESSKEALAENNLNLPKMAEKDGCFQSGFNEETCLVKIITGLLEFEVYLEYLQNRFESSEEQARAVQMSTKVLIQFLQKKAKNLDAITTPDPTTNASLLTKLQAQNQWLQDMTTHLILRSFKEFLQSSLRALRQM

SEQ ID NO: 16590 - DNA, 1094 bp, Homo sapiens
gctgtgctgtcagctcacccctgcgctcgctcccctccggcacaggcgccttcggtccagttgccttctccctggggctgctcctggtgttgcctgctgccttccctgccccagtacccccaggagaagattccaaagatgtagccgccccacacagacagccactcacctcttcagaacgaattgacaaacaaattcggtacatcctcgacggcatctcagccctgagaaaggagacatgtaacaagagtaacatgtgtgaaagcagcaaagaggcactggcagaaaacaacctgaaccttccaaagatggctgaaaaagatggatgcttccaatctggattcaatgaggagacttgcctggtgaaaatcatcactggtcttttggagtttgaggtatacctagagtacctccagaacagatttgagagtagtgaggaacaagccagagctgtgcagatgagtacaaaagtcctgatccagttcctgcagaaaaaggcaaagaatctagatgcaataaccacccctgacccaaccacaaatgccagcctgctgacgaagctgcaggcacagaaccagtggctgcaggacatgacaactcatctcattctgcgcagctttaaggagttcctgcagtccagcctgagggctcttcggcaaatgtagcatgggcacctcagattgttgttgttaatgggcattccttcttctggtcagaaacctgtccactgggcacagaacttatgttgttctctatggagaactaaaagtatgagcgttaggacactattttaattatttttaatttattaatatttaaatatgtgaagctgagttaatttatgtaagtcatatttatatttttaagaagtaccacttgaaacattttatgtattagttttgaaataataatggaaagtggctatgcagtttgaatatcctttgtttcagagccagatcatttcttggaaagtgtaggcttacctcaaataaatggctaacttatacatatttttaaagaaatatttatattgtatttatataatgtataaatggtttttataccaataaatggcattttaaaaaattcagcaa

SEQ ID NO: 16591 - protein, 136 aa, Homo sapiens; identical to SEQ ID NO: 16587

SEQ ID NO: 16592 - DNA, 439 bp, Homo sapiens
ctctctccggtccatgcctccaagatgacaaagaaaagaaggaacaacgttcgtgccaaaaagggccgcggccacgtgcagcctattcgctgcactaactgtgcccgatgcgtgcccaaggacaacgccattaagaaattcgtcattcgaaacatagtggaggctgcagcagtcagggacatttctgaagcgagcgtcttcgatgcctatgtgcttcccaagctgtgtgtgaagctacattactgtgtgagttgtgtaattcacagcaaagtagtcaggaatcgatctcgtgaagcccgcaaggaccgaacacccccaccccgatttagacctgcgggtgctgccgcacgtcccccaccaaagcccatgtaaggagctgagttcttaaagactgaagacagactattctctggagaaaaataaaatggacattgtactt

SEQ ID NO: 16593 - protein, 115 aa, Homo sapiens
MTKKRRNNVRAKKGRGHVQPIRCTNCARCVPKDNAIKKFVIRNIVEAAAVRDISEASVFDAYVLPKLCVKLHYCVSCVIHSKVVRNRSREARKDRTPPPRFRPAGAAARPPPKPM

SEQ ID NO: 16594 - DNA, 1180 bp, Homo sapiens
tcaaggggagccagtttgccattcgctggggctttatccctcttgtgatttacctgggtcagtgggagaagaaccgggaaagtgactggagggaagagggtggcggagacagcagccccatttttggccgtcgggggagggagagaaaaataggggacactgccgtgcacggcccctgaggctgtctggtcaagtggggccgatctaacctgagttcgagttcccgttctatcgctttatagttgcatggtctttaagcagtcttgcaatccctccttttctatttttgcatccttaaagtggaggtcatatttctcgggattgtagggagggttggatgaccccagtggatgtgaaagtcactaattcactctctagcactaggtggttctcggggtgtttttcctcaccgctccatgtggtcctaagtggaaagagtcctgttcagggaatcgagacacctcgtgaaagtaccactgccatgaaagcatgattataataatagtcgttggatgcctctgctttcttacctgtacgatgaagggtttggatgatttctattactgcccccattttacaggatttaagaggggtgcagatcccggaatgcctgaaccaactgttttgagcctactttggggataaaggattatttggtcttctggatttggaggcaatcagcggacagcatggaagatgtgtgctctggctcggataagagatgggacatcattcagtcactagttggatggcacaaggctcttcacagacgcatctgtagcagagtggaacttgtactaacttatgatagaatgtatcagaataaatgtttttaacagtgttatgcttgagtcttttttgaattgaacatgctaggattatcaggtaaaaattaagccttttggtactttctcaaaacagggaatttatgtgtgtacctaggtgctatttaagcctgtaaatcccagcactttgggaggccagggcgggtggatcacgatataaaaaaatttttccaagttattcctgcccattgacctaacatatggattacagtttccctttgcagtgaattaataactccttctaggatattccgaggtagtaagaatacagatagttctgtttgtgacaaaccaagctgttacttcctcctctgcattaaagttctgactgcaag

SEQ ID NO: 16595 - protein, 51 aa, Homo sapiens
MIIIIVVGCLCFLTCTMKGLDDFYYCPHFTGFKRGADPGMPEPTVLSLLWG

SEQ ID NO: 16596 - DNA, 726 bp, Homo sapiens
ctcctttccctttcggattcccgacgctgtggttgctgtaaggggtcctccctgcgccacacggccgtcgccatggtgaagctgagcaaagaggccaagcagagactacagcagctcttcaaggggagccagtttgccattcgctggggctttatccctcttgtgatttacctggcctactttggggataaaggattatttggtcttctggatttggaggcaatcagcggacagcatggaagatgtgtgctctggctcggataagagatgggacatcattcagtcactagttggatggcacaaggctcttcacagacgcatctgtagcagagtggaacttgtactaacttatgatagaatgtatcagaataaatgtttttaacagtgttatgcttgagtcttttttgaattgaacatgctaggattatcaggtaaaaattaagccttttggtactttctcaaaacagggaatttatgtgtgtacctaggtgctatttaagcctgtaaatcccagcactttgggaggccagggcgggtggatcacgatataaaaaaatttttccaagttattcctgcccattgacctaacatatggattacagtttccctttgcagtgaattaataactccttctaggatattccgaggtagtaagaatacagatagttctgtttgtgacaaaccaagctgttacttcctcctctgcattaaagttctgactgcaag

SEQ ID NO: 16597 - protein, 63 aa, Homo sapiens
MVKLSKEAKQRLQQLFKGSQFAIRWGFIPLVIYLAYFGDKGLFGLLDLEAISGQHGRCVLWLG

SEQ ID NO: 16598 - DNA, 723 bp, Homo sapiens
ctcctttccctttcggattcccgacgctgtggttgctgtaaggggtcctccctgcgccacacggccgtcgccatggtgaagctgagcaaagaggccaagcagagactacagcagctcttcaaggatttaagaggggtgcagatcccggaatgcctgaaccaactgttttgagcctactttggggataaaggattatttggtcttctggatttggaggcaatcagcggacagcatggaagatgtgtgctctggctcggataagagatgggacatcattcagtcactagttggatggcacaaggctcttcacagacgcatctgtagcagagtggaacttgtactaacttatgatagaatgtatcagaataaatgtttttaacagtgttatgcttgagtcttttttgaattgaacatgctaggattatcaggtaaaaattaagccttttggtactttctcaaaacagggaatttatgtgtgtacctaggtgctatttaagcctgtaaatcccagcactttgggaggccagggcgggtggatcacgatataaaaaaatttttccaagttattcctgcccattgacctaacatatggattacagtttccctttgcagtgaattaataactccttctaggatattccgaggtagtaagaatacagatagttctgtttgtgacaaaccaagctgttacttcctcctctgcattaaagttctgactgcaag

SEQ ID NO: 16599 - protein, 32 aa, Homo sapiens
MVKLSKEAKQRLQQLFKDLRGVQIPECLNQLF

SEQ ID NO: 16600 - DNA, 796 bp, Homo sapiens
ccgtgtgtggcgcctgcgcacctcctttccctttcggattcccgacgctgtggttgctgtaaggggtcctccctgcgccacacggccgtcgccatggtgaagctgagcaaagaggccaagcagagactacagcagctcttcaaggggagccagtttgccattcgctggggctttatccctcttgtgatttacctgggatttaagaggggtgcagatcccggaatgcctgaaccaactgttttgagcctactttggggataaaggattatttggtcttctggatttggaggcaatcagcggacagcatggaagatgtgtgctctggctcggataagagatgggacatcattcagtcactagttggatggcacaaggctcttcacagacgcatctgtagcagagtggaacttgtactaacttatgatagaatgtatcagaataaatgtttttaacagtgttatgcttgagtcttttttgaattgaacatgctaggattatcaggtaaaaattaagccttttggtactttctcaaaacagggaatttatgtgtgtacctaggtgctatttaagcctgtaaatcccagcactttgggaggccagggcgggtggatcacgatataaaaaaatttttccaagttattcctgcccattgacctaacatatggattacagtttccctttgcagtgaattaataactccttctaggatattccgaggtagtaagaatacagatagttctgtttgtgacaaaccaagctgttacttcctcctctgcattaaagttctgactgcaag

SEQ ID NO: 16601 - protein, 55 aa, Homo sapiens; identical to SEQ ID NO: 1920

SEQ ID NO: 16602 - DNA, 843 bp, Homo sapiens
tcaaggggagccagtttgccattcgctggggctttatccctcttgtgatttacctgggtcagtgggagaagaaccgggaaagtgactggagggaagagggtggcggagacagcagccccatttttggccgtcgggggagggagagaaaaataggggacactgccgtgcacggcccctgaggctgtctggtcaagtggggccgatctaacctgagttcgagttcccgttctatcgctttatagttgcatggtctttaagcagtcttgcaatccctccttttctatttttgcatccttaaagtggaggtcatatttctcgggattgtagggagggttggatgaccccagtggatgtgaaagtcactaattcactctctagcactaggtggttctcggggtgtttttcctcaccgctccatgtggtcctaagtggaaagagtcctgttcagggaatcgagacacctcgtgaaagtaccactgccatgaaagcatgattataataatagtcgttggatgcctctgctttcttacctgtacgatgaagggtttggatgatttctattactgcccccattttacaggatttaagaggggtgcagatcccggaatgcctgaaccaactgttttgagcctactttggggataaaggattatttggtcttctggatttggaggcaatcagcggacagcatggaagatgtgtgctctggctcggataagagatgggacatcattcagtcactagttggatggcacaaggctcttcacagacgcatctgtagcagagtggaacttgtactaacttatgatagaatgtatcagaataaatgtttttaacagtgtt

SEQ ID NO: 16603 - protein, 51 aa, Homo sapiens; identical to SEQ ID NO: 16595

SEQ ID NO: 16604 - DNA, 389 bp, Homo sapiens
ctcctttccctttcggattcccgacgctgtggttgctgtaaggggtcctccctgcgccacacggccgtcgccatggtgaagctgagcaaagaggccaagcagagactacagcagctcttcaaggggagccagtttgccattcgctggggctttatccctcttgtgatttacctggcctactttggggataaaggattatttggtcttctggatttggaggcaatcagcggacagcatggaagatgtgtgctctggctcggataagagatgggacatcattcagtcactagttggatggcacaaggctcttcacagacgcatctgtagcagagtggaacttgtactaacttatgatagaatgtatcagaataaatgtttttaacagtgtt

SEQ ID NO: 16605 - protein, 63 aa, Homo sapiens; identical to SEQ ID NO: 16597

SEQ ID NO: 16606 - DNA, 386 bp, Homo sapiens
ctcctttccctttcggattcccgacgctgtggttgctgtaaggggtcctccctgcgccacacggccgtcgccatggtgaagctgagcaaagaggccaagcagagactacagcagctcttcaaggatttaagaggggtgcagatcccggaatgcctgaaccaactgttttgagcctactttggggataaaggattatttggtcttctggatttggaggcaatcagcggacagcatggaagatgtgtgctctggctcggataagagatgggacatcattcagtcactagttggatggcacaaggctcttcacagacgcatctgtagcagagtggaacttgtactaacttatgatagaatgtatcagaataaatgtttttaacagtgtt

SEQ ID NO: 16607 - protein, 32 aa, Homo sapiens; identical to SEQ ID NO: 16599

SEQ ID NO: 16608 - DNA, 459 bp, Homo sapiens
ccgtgtgtggcgcctgcgcacctcctttccctttcggattcccgacgctgtggttgctgtaaggggtcctccctgcgccacacggccgtcgccatggtgaagctgagcaaagaggccaagcagagactacagcagctcttcaaggggagccagtttgccattcgctggggctttatccctcttgtgatttacctgggatttaagaggggtgcagatcccggaatgcctgaaccaactgttttgagcctactttggggataaaggattatttggtcttctggatttggaggcaatcagcggacagcatggaagatgtgtgctctggctcggataagagatgggacatcattcagtcactagttggatggcacaaggctcttcacagacgcatctgtagcagagtggaacttgtactaacttatgatagaatgtatcagaataaatgtttttaacagtgtt

SEQ ID NO: 16609 - protein, 55 aa, Homo sapiens; identical to SEQ ID NO: 1920

SEQ ID NO: 16610 - DNA, 812 bp, Homo sapiens
ctcctttccctttcggattcccgacgctgtggttgctgtaaggggtcctccctgcgccacacggccgtcgccatggtgaagctgagcaaagaggccaagcagagactacagcagctcttcaaggggagccagtttgccattcgctggggctttatccctcttgtgatttacctgggatttaagaggggtgcagatcccggaatgcctgaaccaactgttttgaggtactgctcttaaaactaaacatttcaggacaaatgttcatacagtagtactgaatcactaagatgtaaaagagtaatagtggcaggccttgaaatggagctttatcagtcagtatagttttgggctattggaaaactgcaactactttctcttccccctcctaatttgtatttactgtaccatgttataactacaatgaagcatattttaacagaaaaagaatttattatcctaccactttaaaatacgaactgttttaaatttctcatattcccgtcttatcctcattcagatgaatacaaccttttatatcgctctgacaagggtatgcaggattttgttttcacctaaaattttagttggctgtcccatatgttttccagttgcggtttacataggtttttcaatttttcagtattttatacaacaatacaattaacatttgggcagggtgtggtggctcacacctgtaatctcagcactttggaaagccaaggtgggaagatcatgggaggattgcttgaagctaggagttcaagaccagcctgggcaacgtagcgagacccatctctaccaaaaaaaaaaaa

SEQ ID NO: 16611 - protein, 54 aa, Homo sapiens
MVKLSKEAKQRLQQLFKGSQFAIRWGFIPLVIYLGFKRGADPGMPEPTVLRYCS

SEQ ID NO: 16612 - DNA, 664 bp, Homo sapiens
tgctgggattacaggcgtgagtcagcgcacccggcctgccaaattgttttttaactattcagtttaaactgtgagagacaccatgtcaaggaagcagtgtgagctagcgtctaaggattgtgaaaactgagcaagtgcccagaactagaaacttcccagccccctgaactcagcctcagggtaagcgagtttaatagtgcttcctttgattttcaaatctgtggaaggtttgtttcagtttttcccagacaaatattgttgggatagtgtttcttttcaaaaatggataggattcaatgctcatcagtgggaagatagtgactcctgaccattttcctcctagctggaaactacagaagactcccaagtatcaggaaatttggagaatttgtacaggaattatattcagagatagcaatttatttactcatcaaagagagctattggatagccaccataaagaccactcattaaaaaacaaaattgcatgatattcttaacattgtctttcactttttttaaccaggcttggtggagtttcaagatgctgatgaacttaaggtctggcgcttgaaagaatcagtgaagcttttcaagtagaggaggtatatttgaatatgtaacctttagtatctacagaatagaggttgcttttttttttttt

SEQ ID NO: 16613 - protein, 64 aa, Homo sapiens [sequence omitted]

SEQ ID NO: 16614 - DNA, 925 bp, Homo sapiens
ggcttggtggagtttcaagatgctgatgaacttaaggtctggcgcttgaaagaatcagtgaagcttttcaagtagaggagtggtgtttccagtgaaatctatggcaagatggtttggggtcactatctacatgaactgccaagttggaaaatcaaaaatacatcaaaatcactcttgggacataagtcacggaagtgactcatgcacacaataaatacccaagaagcaggaccagacggcagttgtgtattggcacgctcatcagtgctgcaaaaattccccttctggatggcaacaacaatgctgtatccacagcagcattttaaatctcacctctgatgtatccattgttgtgggcatgagatggcagaaagtgggatatggaaaatgttgccgtgcgccattccgaatactactgtggcttccctgcagcattactttccatattggctgttttccatttcaggaaagcttaggatgtccttggtaaatactggctaaccaagaaatttgaaaaatgaaaggaggctgagtaattggtcttgggttgaaacggggtgatgctgcataaactacgtggttgactctgaaaagctggctaaaaagccagtctgcattccttgtcctcatttccttggagtaatgaagggtgcttcttagaagagggatagattcaagtatgggttgtgagtcattcttcttttctgtatgtaataggtctaaccacagggcctgttgagccctgccctggtgaccaagagcattttctgacatgaacagagttaggccatcttgcccgtatgagcagagttcttcagatgtcccttaggattctaggtttcataccttccctgccactcccccactaccaaatccccttaccctatagcctagcaatgcagagttgtccaatatagaacctctg

SEQ ID NO: 16615 - protein, 45 aa, Homo sapiens
MAESGIWKMLPCAIPNTTVASLQHYFPYWLFSISGKLRMSLVNTG

SEQ ID NO: 16616 - DNA, 504 bp, Homo sapiens
atggctgaagtgctgaagcacagagggtgcacctggggagaggccacagggttggtgacctctgcgggtgtgaatgaccccaggcactgtttcagtgttgggggagatcaaatgtggcactttgccatgtctgtcttcctggtagaattatatggacataatctgcttttatcagcagtgtttggcttagtggtggctggatatgtattaatatttggggtcttaattggtgattggattgaaaagaaaccaagaaataaagaacgcctccgtcaccgcctgttgcactgtcctgatgcttgtgctcccctacaagaggcagatggaacaaatctgggatggctggctcactgtggcctgctgtgcactggtgaccaccctagtggccttggcaaacctggccggcacggcgctgaccgtcaccatccagagggactggatcgtgagctgacgggtgacaacagaggccagctggttggtgagtggtaccgccctgggtactga

SEQ ID NO: 16617 - protein, 167 aa, Homo sapiens
MAEVLKHRGCTWGEATGLVTSAGVNDPRHCFSVGGDQMWHFAMSVFLVELYGHNLLLSAVFGLVVAGYVLIFGVLIGDWIEKKPRNKERLRHRLLHCPDACAPLQEADGTNLGWLAHCGLLCTGDHPSGLGKPGRHGADRHHPEGLDRELTGDNRGQLVGEWYRPGY

SEQ ID NO: 16618 - DNA, 6314 bp, Homo sapiens
ctgggttgtcagtcagtgagaggagggggaagatggctcaccgggacccgttctgctaggaagaaggggagcaggtggtgctgctactcgggaggaagcagagcagcctccgtcgctgtcgctgagagcctcacgagtcgaggtcctgcaggtggagctccggcagccgccctgacattaccagaaacatctttaccaaattatgccacaaatttgaaagacaagagttctttagtttcatctctctataaagttatccaggagccacaaagtgagttgctagaacctgtctgtcaccagctctttgaattctatcgcagtggagaggagcagttgcttcaatttacgctgcaatttctcccagaactaatttggtgctaccttgcagtctcagccagcagaaatgtgcatagcagtggatgcattgaagctcttcttctaggggtttacaatttggaaatagttgacaaacagggacataccaaagtattgagttttacgattccatctttatccaaaccatctgtataccatgaaccttccagcattgggtccatggctctgactgagagtgcactatcccagcatggtttgtcaaaagtggtatacagtggacctcatcctcaaagggagatgctgacagcacagaatcggtttgaagtgttgacattccttttgttgtgttacaatgctgccttaacttacatgcccagtgtttctcttcagtcactgtgtcaaatttgttcaagaatctgtgtttgtggatatcctcgacaacatgtaagaaaatataaaggtataagtagcaggataccagtttcttcaggattcatggtgcaaatgttaacagggatttattttgccttttataatggagaatgggatctagctcaaaaagcactggatgatattatatacagagcccagctagaattatatccagagccattgctggttgctaatgcaataaaggcttcattgcctcatggtcccatgaaatctaataaggaaggtacaaggtgtattcaagttgaaatcacaccaacttcctctcgaatatcaagaaatgcagtaaccagcatgtcaataaggggtcataggtggaaaagacatgagcaacctgacaacaataatgatgctactgaattgggcatccttgtcattcctgagattagtgtcacaaatgtggccggagagagaaccgggaatggggaaaaaggcagaacactaggagagattgatgctcagcatatacagggtgtgcaggaaacagccacagatcctagaactgagagcaaaggcttgccagagatcaggaggcaaaaatctgtaagaaaaatgatggaggatggaataaactcacctggcagagtgcagttttagcagagcactttataactgcactccaaggaaatacagaattaacaggtcaagaagaactgatggagatatctgaagttgacgagggattttattccagggctgcgtctagtaccagccagtcgggtttatcaaacagtagtcacaattgtagtaacaagccaagtataggaaagaaccacagacggtcaggaggaagcaaaactggaggaaaagaaaaagaaactacaggggaatcttgcaaagatcactttgctcgaaaacaaactcagagagcccaaagtgagaatcttgagcttctctctttgaagagacttactttaacaaccagccaatccctacctaagcctagtagccatggtttggctaagaccgcagcgactgtatttagtaaatcctttgaacaagtcagtggtgtcacagtcccacataacccgtcatctgctgttggttgtggggctgggacagatgccaataggttttccgcttgtagtctccaagaagaaaagcttatttacgtttcagaaagaactgaacttccaatgaagcatcaatcaggtcagcagagacctcctagtattagcattactctgtccacagattaattagtaacatatttttctcccataacctagtgaacctggaaatacaactttgcttctttatgaaagtaccctgggtctttcatccgtattcctgacaggagccctgatgtcttaaattctgaaggctcccctgactttatgaagggaagattgtctaggttgcagtaagttgaaatatggttttgttatttcttgattaagattttttccccttggtttgagtcttttttttccctcctcttatttgttattgttgccctaagattgtcagtgacaataaattttgacaggttgtctaatcaagttggttatgtctcatgtgaggttgtaaggtggtttttcttgttttggtttggtttggttttttaatagctcctattttgatggctgtgtgtttggccttcagagtcaaagggagtctgcatgtatgggaactgttttatagagaatggggcagaggcacaactccaggaattctctagctcctggtcaggaagccaatctgaaaacaggcatgtggaaacacaaaaatgatgtgtatgaaaagcacctgatgaaaatatttgtaagcagatcatctttatgattagaacaatttgctcaaagccctggaaaatgcctggtaacccagtgcctagaatattatatgattccaggggatggctagaggcatttctgttgttatctctgaaacatttttatatcaaaaatcagattgctggtaggtgtgttgttttgaagtgttttatctggatttagcatgtgaagatccctttcaattattaaggtataataggctgtaaagctgatttaccctactgctggactttggaaatcctagttagtttggactcctataattcagagcatacgtcattggaagacttcctggaaatcagtgtaaatcttgcaacatagctctcaagataccactgtataatatgtaattgtttgtctgcaaatgcatttttcatctataaaatgtcatgaaagaaaataaaggtagtgaaatatggacaaaggacatttatatattaactaaagttgtttatgtttgtgttcttaaatttaaaacacgaagaaaaagaaatgtctttcttgttagtgaacaggcctgttttaaatatcttagtatgatatcaaaagaataatcaatttagttacctcccaactaaaaagtaaaaatgaaaaagacgacatggcagaagttgaaacaaacttgtatgtatctgtatgtgacctctagatggaaataaaagtttgatgtttgctagccgtggtccttttggctatggttgcggttcccctgtaaagcaaatgtacttaagtcatcattcagagtgagagagagaaagcacggctgaggctgagtcagttgaccgttgaggaagacctaaggagctgtccagttcttggctctttttcactgtgactgcacagcggtttccttcttcatagtcccttgctgtagtcaccaagagagcatgctagtgttttcctcttgttcctgcttatgcagagctcagatatatgaaaaatttgtatgctttgaaggctgccaaagcatttatactctggacatagttttaactgcaactgctttggctaccagtttaaaccgagttcttcaaaaagcatgaactcgttttcattcattagccctgtttacaatgtggattttgacataaatgaatttgattttcttttagctccagtaacagaatggaataagatctattgccataaattgtagttaagaactgtaaggcaatcgggcagtgaaacttgatattgtattaacttaataggaaccctgtgtacaatttaaaatatttgtaaaatatcactgtgaatttacagatgtctttttgtcattctttaacaatgaatttcccctgtgcatagttattaatagtattggtattattaaaaactaatttggcattttaagattggcattttaagcaagttgaggtgcttaggaaacattgtagaataagtttggggaaatgttagctgacagagctgagagatcagattttcatgttctatcactgtaatggaacctcatttagacctctctagacctttgctagctgtgtggtctgaggaccagtaagtaggattggcattatctggtatcttgttaaaaatgcagaatttcatgccactctaggtctactaaatcagaatttgcattcttaacaaggttcccaagtgatttttatgagaagaaagtatcagagtgcaaacaaattactcgtctaatatgtagaattcccagtggtctcacagccctagatcaaatgtgtcagacactagatcattataatcttcattggttttgacagctaattaattagtttaataatattgacatatggcttcttaagtatttgaattctagattgctaatgatccttatttttgcagtaaaaaagtaacactttatatttttcttgttaactataaatggaatcagagctgtaaatgcctgaaattttaagtgtgaaaaggggtgccacccttttatatactgcacaacaaatttgcatttgtatattctttttaaaaaatctctgaagacttgctcagtgaaatggttctgattttttgcttcaaatgatttgcactaattgattttctggagagcggagttacgttaacaacaaaattcttttatagttcctttgatactatttcaaataaggattacacattgaaagtttttatagaaattatgaaaattggataatcttaactatggtaaccattactattatccatactactttctccccactgaactttcaaatttgaaaattggggtagcttttgtaggtcactttcttataaagatgctgatggtcacagatctcctaagtatccagaataatatttttatcatgagaaggattccacacaaaattggggtcttgcaccccatatttcagaggatctgaacagaaattgtggcttcattgcacattttaaatctctatagattcttgaaatcacccaacctctcacatttgaaaacccaacggcctggagtattctggtggcactggagccagcactagctttttggaatccaagtggggagagaaacaaaaatagacttttcaagggactgtcccagactacccagggcaaatgtcttcccttcccttcctgaagccacaggaaagcaccctggagtcctttgtataccactatggaaatttttaaggcaagctctcaagacttgaagagttggaattctcggcatttaaatgatgcctgaagtttgttttgaaaaagcaatatttcattgctcttttcaattgtgaagcaactgctcagcaaatattactcatttttttaaaaagttgaattaaagggaaatatatttttaaaaccaaaatagatcaaaatgatcccagttttaagggattttgcctattttggaagaataaaactaaaatgttaaaactgttgaattacagagaacagatgtactctgagacataattttaaacaaatatttaaaataaggcaggttaacatttgcgtttaggcacaataaatctgtattaaagggaagcacatcaaggaaatatatacatgttgaataatgtaactgaaaaatattttttaaaaaccacttaaaaagaaaaataatttgatgggtactttaagcattgtagatagaaattaatgtataatagtgtcctcccagtctttgtatgaaaaattaaaactctctagtcctttaatgagcatgaatttatacttctacatttgttgcttagtaaaattatactcagtactttgagttattcagatttatgtttaatattgttaaattcttcatcagagagcataaatatattgtcttctatactttgtaacttgtgcatatctaaagaaactaacaacgaacattttgggagatgtttttgtgtttttttatagtagagttttagagtacatttgtcttaataggaagtttttaccataaacccaagattttatttcacgtattgttgctttctcttatatggaacttattgtgtacctcttacctttatttctaatcatttagtgatactaatcttttcatagtaaatatatttgtttctaattgtattcctagagtttacattcctaaagaataaacgacgactttggctatttttgtgtgttccctaccttcttaaggctatggaaataaactggagtttagttttttgaatttttgtatatttgtgtaaatgttctccatatgtagtactttatacaacaagtgttgcctcttgttttattgaaataaaaactgaaaaaaat

SEQ ID NO: 16619 - protein, 275 aa, Homo sapiens
MALTESALSQHGLSKVVYSGPHPQREMLTAQNRFEVLTFLLLCYNAALTYMPSVSLQSLCQICSRICVCGYPRQHVRKYKGISSRIPVSSGFMVQMLTGIYFAFYNGEWDLAQKALDDIIYRAQLELYPEPLLVANAIKASLPHGPMKSNKEGTRCIQVEITPTSSRISRNAVTSMSIRGHRWKRHEQPDNNNDATELGILVIPEISVTNVAGERTGNGEKGRTLGEIDAQHIQGVQETATDPRTESKGLPEIRRQKSVRKMMEDGINSPGRVQF

SEQ ID NO: 16620 - DNA, 6150 bp, Homo sapiens
gggtccctggtcgtgcctgtcagagaggctggcggcagtggtggctctcccggctgggttgtcagtcagtgagaggagggggaagatggctcaccgggacccgttctgctaggaagaaggggagcaggtggtgctgctactcgggaggaagcagagcagcctccgtcgctgtcgctgagagcctcacgagtcgaggtcctgcaggtggagctccggcagccgccctggttgaaggtttagaacagatgtggaaaaatgtttacttcagagaaaggggttgtggaggaatggttgtcagagtttaagacattaccagaaacatctttaccaaattatgccacaaatttgaaagacaagagttctttagtttcatctctctataaagttatccaggagccacaaagtgagttgctagaacctgtctgtcaccagctctttgaattctatcgcagtggagaggagcagttgcttcaatttacgctgcaatttctcccagaactaatttggtgctaccttgcagtctcagccagcagaaatgtgcatagcagtggatgcattgaagctcttcttctaggggtttacaatttggaaatagttgacaaacagggacataccaaagtattgagttttacgattccatctttatccaaaccatctgtataccatgaaccttccagcattgggtccatggctctgactgagagtgcactatcccagcatggtttgtcaaaagtggtatacagtggacctcatcctcaaagggagatgctgacagcacagaatcggtttgaagtgttgacattccttttgttgtgttacaatgctgccttaacttacatgcccagtgtttctcttcagtcactgtgtcaaatttgttcaagaatctgtgtttgtggatatcctcgacaacatgtaagaaaatataaaggtataagtagcaggataccagtttcttcaggattcatggtgcaaatgttaacagggatttattttgccttttataatggagaatgggatctagctcaaaaagcactggatgatattatatacagagcccagctagaattatatccagagccattgctggttgctaatgcaataaaggcttcattgcctcatggtcccatgaaatctaataaggaaggtacaaggtgtattcaagttgaaatcacaccaacttcctctcgaatatcaagaaatgcagtaaccagcatgtcaataaggggtcataggtggaaaagacatggaaatacagaattaacaggtcaagaagaactgatggagatatctgaagttgacgagggattttattccagggctgcgtctagtaccagccagtcgggtttatcaaacagtagtcacaattgtagtaacaagccaagtataggaaagaaccacagacggtcaggaggaagcaaaactggaggaaaagaaaaagaaactacaggggaatcttgcaaagatcactttgctcgaaaacaaactcagagagcccaaagtgagaatcttgagcttctctctttgaagagacttactttaacaaccagccaatccctacctaagcctagtagccatggtttggctaagaccgcagcgactgtatttagtaaatcctttgaacaagtcagtggtgtcacagtcccacataacccgtcatctgctgttggttgtggggctgggacagatgccaataggttttccgcttgtagtctccaagaagaaaagcttatttacgtttcagaaagaactgaacttccaatgaagcatcaatcaggtcagcagagacctcctagtattagcattactctgtccacagattaattagtaacatatttttctcccataacctagtgaacctggaaatacaactttgcttctttatgaaagtaccctgggtctttcatccgtattcctgacaggagccctgatgtcttaaattctgaaggctcccctgactttatgaagggaagattgtctaggttgcagtaagttgaaatatggttttgttatttcttgattaagattttttccccttggtttgagtcttttttttccctcctcttatttgttattgttgccctaagattgtcagtgacaataaattttgacaggttgtctaatcaagttggttatgtctcatgtgaggttgtaaggtggtttttcttgttttggtttggtttggttttttaatagctcctattttgatggctgtgtgtttggccttcagagtcaaagggagtctgcatgtatgggaactgttttatagagaatggggcagaggcacaactccaggaattctctagctcctggtcaggaagccaatctgaaaacaggcatgtggaaacacaaaaatgatgtgtatgaaaagcacctgatgaaaatatttgtaagcagatcatctttatgattagaacaatttgctcaaagccctggaaaatgcctggtaacccagtgcctagaatattatatgattccaggggatggctagaggcatttctgttgttatctctgaaacatttttatatcaaaaatcagattgctggtaggtgtgttgttttgaagtgttttatctggatttagcatgtgaagatccctttcaattattaaggtataataggctgtaaagctgatttaccctactgctggactttggaaatcctagttagtttggactcctataattcagagcatacgtcattggaagacttcctggaaatcagtgtaaatcttgcaacatagctctcaagataccactgtataatatgtaattgtttgtctgcaaatgcatttttcatctataaaatgtcatgaaagaaaataaaggtagtgaaatatggacaaaggacatttatatattaactaaagttgtttatgtttgtgttcttaaatttaaaacacgaagaaaaagaaatgtctttcttgttagtgaacaggcctgttttaaatatcttagtatgatatcaaaagaataatcaatttagttacctcccaactaaaaagtaaaaatgaaaaagacgacatggcagaagttgaaacaaacttgtatgtatctgtatgtgacctctagatggaaataaaagtttgatgtttgctagccgtggtccttttggctatggttgcggttcccctgtaaagcaaatgtacttaagtcatcattcagagtgagagagagaaagcacggctgaggctgagtcagttgaccgttgaggaagacctaaggagctgtccagttcttggctctttttcactgtgactgcacagcggtttccttcttcatagtcccttgctgtagtcaccaagagagcatgctagtgttttcctcttgttcctgcttatgcagagctcagatatatgaaaaatttgtatgctttgaaggctgccaaagcatttatactctggacatagttttaactgcaactgctttggctaccagtttaaaccgagttcttcaaaaagcatgaactcgttttcattcattagccctgtttacaatgtggattttgacataaatgaatttgattttcttttagctccagtaacagaatggaataagatctattgccataaattgtagttaagaactgtaaggcaatcgggcagtgaaacttgatattgtattaacttaataggaaccctgtgtacaatttaaaatatttgtaaaatatcactgtgaatttacagatgtctttttgtcattctttaacaatgaatttcccctgtgcatagttattaatagtattggtattattaaaaactaatttggcattttaagattggcattttaagcaagttgaggtgcttaggaaacattgtagaataagtttggggaaatgttagctgacagagctgagagatcagattttcatgttctatcactgtaatggaacctcatttagacctctctagacctttgctagctgtgtggtctgaggaccagtaagtaggattggcattatctggtatcttgttaaaaatgcagaatttcatgccactctaggtctactaaatcagaatttgcattcttaacaaggttcccaagtgatttttatgagaagaaagtatcagagtgcaaacaaattactcgtctaatatgtagaattcccagtggtctcacagccctagatcaaatgtgtcagacactagatcattataatcttcattggttttgacagctaattaattagtttaataatattgacatatggcttcttaagtatttgaattctagattgctaatgatccttatttttgcagtaaaaaagtaacactttatatttttcttgttaactataaatggaatcagagctgtaaatgcctgaaattttaagtgtgaaaaggggtgccacccttttatatactgcacaacaaatttgcatttgtatattctttttaaaaaatctctgaagacttgctcagtgaaatggttctgattttttgcttcaaatgatttgcactaattgattttctggagagcggagttacgttaacaacaaaattcttttatagttcctttgatactatttcaaataaggattacacattgaaagtttttatagaaattatgaaaattggataatcttaactatggtaaccattactattatccatactactttctccccactgaactttcaaatttgaaaattggggtagcttttgtaggtcactttcttataaagatgctgatggtcacagatctcctaagtatccagaataatatttttatcatgagaaggattccacacaaaattggggtcttgcaccccatatttcagaggatctgaacagaaattgtggcttcattgcacattttaaatctctatagattcttgaaatcacccaacctctcacatttgaaaacccaacggcctggagtattctggtggcactggagccagcactagctttttggaatccaagtggggagagaaacaaaaatagacttttcaagggactgtcccagactacccagggcaaatgtcttcccttcccttcctgaagccacaggaaagcaccctggagtcctttgtataccactatggaaatttttaaggcaagctctcaagacttgaagagttggaattctcggcatttaaatgatgcctgaagtttgttttgaaaaagcaatatttcattgctcttttcaattgtgaagcaactgctcagcaaatattactcatttttttaaaaagttgaattaaagggaaatatatttttaaaaccaaaatagatcaaaatgatcccagttttaagggattttgcctattttggaagaataaaactaaaatgttaaaactgttgaattacagagaacagatgtactctgagacataattttaaacaaatatttaaaataaggcaggttaacatttgcgtttaggcacaataaatctgtattaaagggaagcacatcaaggaaatatatacatgttgaataatgtaactgaaaaatattttttaaaaaccacttaaaaagaaaaataatttgatgggtactttaagcattgtagatagaaattaatgtataatagtgtcctcccagtctttgtatgaaaaattaaaactctctagtcctttaatgagcatgaatttatacttctacatttgttgcttagtaaaattatactcagtactttgagttattcagatttatgtttaatattgttaaattcttcatcagagagcataaatatattgtcttctatactttgtaacttgtgcatatctaaagaaactaacaacgaacattttgggagatgtttttgtgtttttttatagtagagttttagagtacatttgtcttaataggaagtttttaccataaacccaagattttatttcacgtattgttgctttctcttatatggaacttattgtgtacctcttacctttatttctaatcatttagtgatactaatcttttcatagtaaatatatttgtttctaattgtattcctagagtttacattcctaaagaataaacgacgactttggctatttttgtgtgttccctaccttcttaaggctatggaaataaactggagtttagttttttgaatttttgtatatttgtgtaaatgttctccatatgtagtactttatacaacaagtgttgcctcttgttttattgaaataaaaactgaaaaaaat

SEQ ID NO: 16621 - protein, 521 aa, Homo sapiens; identical to SEQ ID NO: 1922

SEQ ID NO: 16622 - DNA, 3769 bp, Homo sapiens
gggtccctggtcgtgcctgtcagagaggctggcggcagtggtggctctcccggctgggttgtcagtcagtgagaggagggggaagatggctcaccgggacccgttctgctaggaagaaggggagcaggtggtgctgctactcgggaggaagcagagcagcctccgtcgctgtcgctgagagcctcacgagtcgaggtcctgcaggtggagctccggcagccgccctggttgaaggtttagaacagatgtggaaaaatgtttacttcagagaaaggggttgtggaggaatggttgtcagagtttaagacattaccagaaacatctttaccaaattatgccacaaatttgaaagacaagagttctttagtttcatctctctataaagttatccaggagccacaaagtgagttgctagaacctgtctgtcaccagctctttgaattctatcgcagtggagaggagcagttgcttcaatttacgctgcaatttctcccagaactaatttggtgctaccttgcagtctcagccagcagaaatgtgcatagcagtggatgcattgaagctcttcttctaggggtttacaatttggaaatagttgacaaacagggacataccaaagtattgagttttacgattccatctttatccaaaccatctgtataccatgaaccttccagcattgggtccatggctctgactgagagtgcactatcccagcatggtttgtcaaaagtggtatacagtggacctcatcctcaaagggagatgctgacagcacagaatcggtttgaagtgttgacattccttttgttgtgttacaatgctgccttaacttacatgcccagtgtttctcttcagtcactgtgtcaaatttgttcaagaatctgtgtttgtggatatcctcgacaacatgtaagaaaatataaaggtataagtagcaggataccagtttcttcaggattcatggtgcaaatgttaacagggatttattttgccttttataatggagaatgggatctagctcaaaaagcactggatgatattatatacagagcccagctagaattatatccagagccattgctggttgctaatgcaataaaggcttcattgcctcatggtcccatgaaatctaataaggaaggtacaaggtgtattcaagttgaaatcacaccaacttcctctcgaatatcaagaaatgcagtaaccagcatgtcaataaggggtcataggtggaaaagacatggaaatacagaattaacaggtcaagaagaactgatggagatatctgaagttgacgagggattttattccagggctgcgtctagtaccagccagtcgggtttatcaaacagtagtcacaattgtagtaacaagccaagtataggaaagaaccacagacggtcaggaggaagcaaaactggaggaaaagaaaaagaaactacaggggaatcttgcaaagatcactttgctcgaaaacaaactcagagagcccaaagtgagaatcttgagcttctctctttgaagagacttactttaacaaccagccaatccctacctaagcctagtagccatggtttggctaagaccgcagcgactgtatttagtaaatcctttgaacaagtcagtggtgtcacagtcccacataacccgtcatctgctgttggttgtggggctgggacagatgccaataggttttccgcttgtagtctccaagaagaaaagcttatttacgtttcagaaagaactgaacttccaatgaagcatcaatcaggtcagcagagacctcctagtattagcattactctgtccacagattaattagtaacatatttttctcccataacctagtgaacctggaaatacaactttgcttctttatgaaagtaccctgggtctttcatccgtattcctgacaggagccctgatgtcttaaattctgaaggctcccctgactttatgaagggaagattgtctaggttgcagtaagttgaaatatggttttgttatttcttgattaagattttttccccttggtttgagtcttttttttccctcctcttatttgttattgttgccctaagattgtcagtgacaataaattttgacaggttgtctaatcaagttggttatgtctcatgtgaggttgtaaggtggtttttcttgttttggtttggtttggttttttaatagctcctattttgatggctgtgtgtttggccttcagagtcaaagggagtctgcatgtatgggaactgttttatagagaatggggcagaggcacaactccaggaattctctagctcctggtcaggaagccaatctgaaaacaggcatgtggaaacacaaaaatgatgtgtatgaaaagcacctgatgaaaatatttgtaagcagatcatctttatgattagaacaatttgctcaaagccctggaaaatgcctggtaacccagtgcctagaatattatatgattccaggggatggctagaggcatttctgttgttatctctgaaacatttttatatcaaaaatcagattgctggtaggtgtgttgttttgaagtgttttatctggatttagcatgtgaagatccctttcaattattaaggtataataggctgtaaagctgatttaccctactgctggactttggaaatcctagttagtttggactcctataattcagagcatacgtcattggaagacttcctggaaatcagtgtaaatcttgcaacatagctctcaagataccactgtataatatgtaattgtttgtctgcaaatgcatttttcatctataaaatgtcatgaaagaaaataaaggtagtgaaatatggacaaaggacatttatatattaactaaagttgtttatgtttgtgttcttaaatttaaaacacgaagaaaaagaaatgtctttcttgttagtgaacaggcctgttttaaatatcttagtatgatatcaaaagaataatcaatttagttacctcccaactaaaaagtaaaaatgaaaaagacgacatggcagaagttgaaacaaacttgtatgtatctgtatgtgacctctagatggaaataaaagtttgatgtttgctagccgtggtccttttggctatggttgcggttcccctgtaaagcaaatgtacttaagtcatcattcagagtgagagagagaaagcacggctgaggctgagtcagttgaccgttgaggaagacctaaggagctgtccagttcttggctctttttcactgtgactgcacagcggtttccttcttcatagtcccttgctgtagtcaccaagagagcatgctagtgttttcctcttgttcctgcttatgcagagctcagatatatgaaaaatttgtatgctttgaaggctgccaaagcatttatactctggacatagttttaactgcaactgctttggctaccagtttaaaccgagttcttcaaaaagcatgaactcgttttcattcattagccctgtttacaatgtggattttgacataaatgaatttgattttcttttagctccagtaacagaatggaataagatctattgccataaattgtagttaagaactgtaaggcaatcgggcagtgaaacttgatattgtattaacttaataggaaccctgtgtacaatttaaaatatttgtaaaatatcactgtgaatttacagatgtctttttgtcattctttaacaatgaatttcccctgtgcatagttattaatagtattggtattattaaaaactaatttggcatttt

SEQ ID NO: 16623 - protein, 521 aa, Homo sapiens; identical to SEQ ID NO: 1922

SEQ ID NO: 16624 - DNA, 2857 bp, Homo sapiens
gggtccctggtcgtgcctgtcagagaggctggcggcagtggtggctctcccggctgggttgtcagtcagtgagaggagggggaagatggctcaccgggacccgttctgctaggaagaaggggagcaggtggtgctgctactcgggaggaagcagagcagcctccgtcgctgtcgctgagagcctcacgagtcgaggtcctgcaggtggagctccggcagccgccctggttgaaggtttagaacagatgtggaaaaatgtttacttcagagaaaggggttgtggaggaatggttgtcagagtttaagacattaccagaaacatctttaccaaattatgccacaaatttgaaagacaagagttctttagtttcatctctctataaagttatccaggagccacaaagtgagttgctagaacctgtctgtcaccagctctttgaattctatcgcagtggagaggagcagttgcttcaatttacgctgcaatttctcccagaactaatttggtgctaccttgcagtctcagccagcagaaatgtgcatagcagtggatgcattgaagctcttcttctaggggtttacaatttggaaatagttgacaaacagggacataccaaagtattgagttttacgattccatctttatccaaaccatctgtataccatgaaccttccagcattgggtccatggctctgactgagagtgcactatcccagcatggtttgtcaaaagtggtatacagtggacctcatcctcaaagggagatgctgacagcacagaatcggtttgaagtgttgacattccttttgttgtgttacaatgctgccttaacttacatgcccagtgtttctcttcagtcactgtgtcaaatttgttcaagaatctgtgtttgtggatatcctcgacaacatgtaagaaaatataaaggtataagtagcaggataccagtttcttcaggattcatggtgcaaatgttaacagggatttattttgccttttataatggagaatgggatctagctcaaaaagcactggatgatattatatacagagcccagctagaattatatccagagccattgctggttgctaatgcaataaaggcttcattgcctcatggtcccatgaaatctaataaggaaggtacaaggtgtattcaagttgaaatcacaccaacttcctctcgaatatcaagaaatgcagtaaccagcatgtcaataaggggtcataggtggaaaagacatggaaatacagaattaacaggtcaagaagaactgatggagatatctgaagttgacgagggattttattccagggctgcgtctagtaccagccagtcgggtttatcaaacagtagtcacaattgtagtaacaagccaagtataggaaagaaccacagacggtcaggaggaagcaaaactggaggaaaagaaaaagaaactacaggggaatcttgcaaagatcactttgctcgaaaacaaactcagagagcccaaagtgagaatcttgagcttctctctttgaagagacttactttaacaaccagccaatccctacctaagcctagtagccatggtttggctaagaccgcagcgactgtatttagtaaatcctttgaacaagtcagtggtgtcacagtcccacataacccgtcatctgctgttggttgtggggctgggacagatgccaataggttttccgcttgtagtctccaagaagaaaagcttatttacgtttcagaaagaactgaacttccaatgaagcatcaatcaggtcagcagagacctcctagtattagcattactctgtccacagattaattagtaacatatttttctcccataacctagtgaacctggaaatacaactttgcttctttatgaaagtaccctgggtctttcatccgtattcctgacaggagccctgatgtcttaaattctgaaggctcccctgactttatgaagggaagattgtctaggttgcagtaagttgaaatatggttttgttatttcttgattaagattttttccccttggtttgagtcttttttttccctcctcttatttgttattgttgccctaagattgtcagtgacaataaattttgacaggttgtctaatcaagttggttatgtctcatgtgaggttgtaaggtggtttttcttgttttggtttggtttggttttttaatagctcctattttgatggctgtgtgtttggccttcagagtcaaagggagtctgcatgtatgggaactgttttatagagaatggggcagaggcacaactccaggaattctctagctcctggtcaggaagccaatctgaaaacaggcatgtggaaacacaaaaatgatgtgtatgaaaagcacctgatgaaaatatttgtaagcagatcatctttatgattagaacaatttgctcaaagccctggaaaatgcctggtaacccagtgcctagaatattatatgattccaggggatggctagaggcatttctgttgttatctctgaaacatttttatatcaaaaatcagattgctggtaggtgtgttgttttgaagtgttttatctggatttagcatgtgaagatccctttcaattattaaggtataataggctgtaaagctgatttaccctactgctggactttggaaatcctagttagtttggactcctataattcagagcatacgtcattggaagacttcctggaaatcagtgtaaatcttgcaacatagctctcaagataccactgtataatatgtaattgtttgtctgcaaatgcatttttcatctataaaatgtcatgaaagaaaataaaggtagtgaaatatggacaaaggacatttatatatt

SEQ ID NO: 16625 - protein, 521 aa, Homo sapiens; identical to SEQ ID NO: 1922

SEQ ID NO: 16626 - DNA, 616 bp, Homo sapiens
gggggaagatggctcaccgggacccgttctgctaggaagaaggggagcaggtggtgctgctactcgggaggaagcagagcagcctccgtcgctgtcgctgagagcctcacgagtcgaggtcctgcaggtggagctccggcagccgccctggttgaaggtttagaacagatgtggaaaaatgtttacttcagagaaaggggttgtggaggaatggttgtcagagtttaagacattaccagaaacatctttaccaaattatgccacaaatttgaaagacaagagttctttagtttcatctctctataaagttatccaggagccacaaagtgagttgctagaacctgtctgtcaccagctctttgaattctatcgcagtggagaggagcagttgcttcaatttacgctgcaatttctcccagaactaatttggtgctaccttgcagtctcagccagcagaaatgtgcatagcagtggatgcattgaagctcttcttctaggggtttacaatttggtttgtatttaatggagttaacaaaatcttttttgacaaaatcaaatatataacctgtgcaactgcttttcattttaataaagctagtgtttgttttttcataca

SEQ ID NO: 16627 - protein, 114 aa, Homo sapiens
MFTSEKGVVEEWLSEFKTLPETSLPNYATNLKDKSSLVSSLYKVIQEPQSELLEPVCHQLFEFYRSGEEQLLQFTLQFLPELIWCYLAVSASRNVHSSGCIEALLLGVYNLVCI

SEQ ID NO: 16628 - DNA, 2750 bp, Homo sapiens
gtcactcgtataaaaacctatgctttgaaggttctcgtgtgtctcggcctgcaggtctcgctcagagctgtgtccctgaacatccaccctgctggggtggcttgacgcacttctgtgcaaatctgttcgctcgcaaccctacctacctctctcccgaaccggagaaaaccttcggcggggtccttccgggttttgtgtcgaatctgcggcggcgacccggcgccgcgtcacgcggtggtgaatgtgcggcagcacgcgcgccgcgtcgtttacgcggcgatttcatcatgctccgagccgggcggcgcgcgccgcttccgtcgccaccctctctggacagcccagggccgcaggctcatgccctctccgcgtccagtgctgcttagaggtgctcgcgccgctctgctgctgctgctgccgccccggctcttagcccgaccctcgctcctgctccgccggtccctcagcgcggcctcctgccccccgatctccttgcccgccgccgcctcccggagcagcatggacggcgcgggggctgaggaggtgctggcacctctgaggctagcagtgcgccagcagggagatcttgtgcgaaaactcaaagaagataaagcaccccaagtagacgtagacaaagcagtggctgagctcaaagcccgcaagagggttctggaagcaaaggagctggcgttacagcccaaagatgatattgtagaccgagcaaaaatggaagataccctgaagaggaggtttttctatgatcaagcttttgctatttatggaggtgttagtggtctgtatgactttgggccagttggctgtgctttgaagaacaatattattcagacctggaggcagcactttatccaagaggaacagatcctggagatcgattgcaccatgctcacccctgagccagttttaaagacctctggccatgtagacaaatttgctgacttcatggtgaaagacgtaaaaaatggagaatgttttcgtgctgaccatctattaaaagctcatttacagaaattgatgtctgataagaagtgttctgtcgaaaagaaatcagaaatggaaagtgttttggcccagcttgataactatggacagcaagaacttgcggatctttttgtgaactataatgtaaaatctcccattactggaaatgatctatcccctccagtgtcttttaacttaatgttcaagactttcattgggcctggaggaaacatgcctgggtacttgagaccagaaactgcacaggggattttcttgaatttcaaacgacttttggagttcaaccaaggaaagttgccttttgctgctgcccagattggaaattcttttagaaatgagatctcccctcgatctggactgatcagagtcagagaattcacaatggcagaaattgagcactttgtagatcccagtgagaaagaccaccccaagttccagaatgtggcagaccttcacctttatttgtattcagcaaaagcccaggtcagcggacagtccgctcggaaaatgcgcctgggagatgctgttgaacagggtgtgattaataacacagtattaggctatttcattggccgcatctacctctacctcacgaaggttggaatatctccagataaactccgcttccggcagcacatggagaatgagatggcccattatgcctgtgactgttgggatgcagaatccaaaacatcctacggttggattgagattgttggatgtgctgatcgttcctgttatgacctctcctgtcatgcacgagccaccaaagtcccacttgtagctgagaaacctctgaaagaacccataacagtcaatgttgttcagtttgaacccagtaagggagcaattggtaaggcatataagaaggatgcaaaactggtgatggagtatcttgccatttgtgatgagtgctacattacagaaatggagatgctgctgaatgagaaaggggaattcacaattgaaactgaagggaaaacatttcagttaacaaaagacatgatcaatgtgaagagattccagaaaacactatatgtggaagaagttgttccgaatgtaattgaaccttccttcggcctgggtaggatcatgtatacggtatttgaacatacattccatgtacgagaaggagatgaacagagaacattcttcagtttccctgctgtagttgctccattcaaatgttccgtcctcccactgagccaaaaccaggagttcatgccatttgtcaaggaattatcggaagccctgaccaggcatggagtatctcacaaagtagacgattcctctgggtcaatcggaaggcgctatgccaggactgatgagattggcgtggcttttggtgtcaccattgactttgacacagtgaacaagaccccccacactgcaactctgagggaccgtgactcaatgcggcagataagagcagagatctctgagctgcccagcatagtccaagacctagccaatggcaacatcacatgggctgatgtggaggccaggtatcctctgtttgaagggcaagagactggtaaaaaagagacaatcgaggaatgaggacaattttgacaacttttgaccacttgcgctaataaaaaaaaaaaaaaactactcttatgtccactttacaaaagaaaacagcattgtgattactcccagggaccgtattttatcttcagtggctgcctgattttacccccacaattaaagttgaaggaatcctgaacaaa

SEQ ID NO: 16629 - protein, 739 aa, Homo sapiens
MPSPRPVLLRGARAALLLLLPPRLLARPSLLLRRSLSAASCPPISLPAAASRSSMDGAGAEEVLAPLRLAVRQQGDLVRKLKEDKAPQVDVDKAVAELKARKRVLEAKELALQPKDDIVDRAKMEDTLKRRFFYDQAFAIYGGVSGLYDFGPVGCALKNNIIQTWRQHFIQEEQILEIDCTMLTPEPVLKTSGHVDKFADFMVKDVKNGECFRADHLLKAHLQKLMSDKKCSVEKKSEMESVLAQLDNYGQQELADLFVNYNVKSPITGNDLSPPVSFNLMFKTFIGPGGNMPGYLRPETAQGIFLNFKRLLEFNQGKLPFAAAQIGNSFRNEISPRSGLIRVREFTMAEIEHFVDPSEKDHPKFQNVADLHLYLYSAKAQVSGQSARKMRLGDAVEQGVINNTVLGYFIGRIYLYLTKVGISPDKLRFRQHMENEMAHYACDCWDAESKTSYGWIEIVGCADRSCYDLSCHARATKVPLVAEKPLKEPITVNVVQFEPSKGAIGKAYKKDAKLVMEYLAICDECYITEMEMLLNEKGEFTIETEGKTFQLTKDMINVKRFQKTLYVEEVVPNVIEPSFGLGRIMYTVFEHTFHVREGDEQRTFFSFPAVVAPFKCSVLPLSQNQEFMPFVKELSEALTRHGVSHKVDDSSGSIGRRYARTDEIGVAFGVTIDFDTVNKTPHTATLRDRDSMRQIRAEISELPSIVQDLANGNITWADVEARYPLFEGQETGKKETIEE

SEQ ID NO: 16630 - DNA, 762 bp, Homo sapiens
catcatgctccgagccgggcggcgcgcgccgcttccgtcgccaccctctctggacagcccagggccgcaggctcatgccctctccgcgtccagtgctgcttagaggtgctcgcgccgctctgctgctgctgctgccgccccggctcttagcccgaccctcgctcctgctccgccggtccctcagcgcggcctcctgccccccgatctccttgcccgccgccgcctcccggagcagcatggacggcgcgggggctgaggaggtgctggcacctctgaggctagcagtgcgccagcagggagatcttgtgcgaaaactcaaagaagataaagcaccccaagtagacgtagacaaagcagtggctgagctcaaagcccgcaagagggttctggaagcaaaggagctggcgttacagcccaaagatgatattgtagaccgaactcaatgcggcagataagagcagagatctctgagctgcccagcatagtccaagacctagccaatggcaacatcacatgggctgatgtggaggccaggtatcctctgtttgaagggcaagagactggtaaaaaagagacaatcgaggaatgaggacaattttgacaacttttgaccacttgcgctaataaaaaaaaaaaaaaactactcttatgtccactttacaaaagaaaacagcattgtgattactcccagggaccgtattttatcttcagtggctgcctgattttacccccacaattaaagttgaaggaatcctgaacaaa

SEQ ID NO: 16631 - protein, 126 aa, Homo sapiens
MPSPRPVLLRGARAALLLLLPPRLLARPSLLLRRSLSAASCPPISLPAAASRSSMDGAGAEEVLAPLRLAVRQQGDLVRKLKEDKAPQVDVDKAVAELKARKRVLEAKELALQPKDDIVDRTQCGR

SEQ ID NO: 16632 - DNA, 1518 bp, Homo sapiens
cgcctttttttttttttttttttggtctcgctttgttgctcagctggagtgcagtggcacaatctcagctgactacagcctcaaacttctgggctcaagcaatcctcctgcttcagcctcccaagtagctgggaccacaggtgcgcctcacaatgcccagctaattttttagtttttgtagagatggggtcttgccatgttgccctggctggtcttgaattcctggggtcaagcaattcttctgcctcagcctcccaaagtgctgggattacaggcatgagccactgtgtccagccttatttttgctttctttgatttctgagttactcagaaactatttcagggcagtttaagaaggctgtactttttagtgtaggtatatggaacatctttttttgttttgtactatttcttttggacatatgtttgtgagctaattaaacttttctgtttcacttggtcactgaggttcataggtttttctcttaaaagacagaatgggctttggtttgggtcactgccacttgtttgaatatttaggtagtctccacagaaagtcttttatgtggaaccaaaaaattaccgtcttttatatacagtagctttcagaatgctttcacatcatttgacttttttagtaacgggcttgtgaagcaagcagagcaggtggtagagacctgctttttaggtggagaaactaaggttcagaaagagttcatgacttggcctaaattcggagctgaaaccaggtgtttctgatgctggttctgcttctcttttgccatactgcttttcatgtcatgttttctggcattttggtaatgacgttatgcttgaacacttgctgaatattaacctcttttggtttgggatattagcatttagatatttacaaattaacatatttggatttttttctttttaaatcatccagttcttcagtttccctgctgtagttgctccattcaaatgttccgtcctcccactgagccaaaaccaggagttcatgccatttgtcaaggaattatcggaagccctgaccaggcatggagtatctcacaaagtagacgattcctctgggtcaatcggaaggcgctatgccaggactgatgagattggcgtggcttttggtgtcaccattgactttgacacagtgaacaagaccccccacactgcaactctgagggaccgtgactcaatgcggcagataagagcagagatctctgagctgcccagcatagtccaagacctagccaatggcaacatcacatgggctgatgtggaggccaggtatcctctgtttgaagggcaagagactggtaaaaaagagacaatcgaggaatgaggacaattttgacaacttttgaccacttgcgctaataaaaaaaaaaaaaaactactcttatgtccactttacaaaagaaaacagcattgtgattactcccagggaccgtattttatcttcagtggctgcctgattttacccccacaattaaagttgaaggaatcctgaacaaa

SEQ ID NO: 16633 - protein, 112 aa, Homo sapiens [sequence omitted]

SEQ ID NO: 16634 - DNA, 1285 bp, Homo sapiens
tcagtttccctgctgtagttgctccattcaaatgttccgtcctcccactgagccaaaaccaggagttcatgccatttgtcaaggaattatgtaagcaaattcaattgggtaaactccatgggaacaccatcaaggagactgaattttaggaaatgtatcatttatttcaataaaaatatagactgaataaagaatataaatgattttataaagagtacatgattttagcctgtactcttatttctaagcgagaggatatgcttgctcagatgttttattctggcatttgagtgaggcaaggtaggacccaagagtcagatttaaaaattatttacttctcatactgaccttggtgccaagttcatcgagggaacctgagtggagtgtagcaaccataatggatctacagccacagaatccacagccctgaaaggaatcctggtggtcatctggcacatccacttatttcagagctgggaaatggggagagtccattgacctgcttagagccataaaaatagaggtggtggagtcaggactcaccttctggccttggctcttggtcccatatttgttccccctatagctgtatcagatggaggtatgagtgaagatttggattcccgcaagggatttattaaactttagggatatttctttctcttgcaactcaacttgttgctttcttgtcttggtcccatttataagtctcctgagcttgtaagacagtagttagataacactgggcttaactccattgttttatttttaatttactttgtttattttggatagcggaagccctgaccaggcatggagtatctcacaaagtagacgattcctctgggtcaatcggaaggcgctatgccaggactgatgagattggcgtggcttttggtgtcaccattgactttgacacagtgaacaagaccccccacactgcaactctgagggaccgtgactcaatgcggcagataagagcagagatctctgagctgcccagcatagtccaagacctagccaatggcaacatcacatgggctgatgtggaggccaggtatcctctgtttgaagggcaagagactggtaaaaaagagacaatcgaggaatgaggacaattttgacaacttttgaccacttgcgctaataaaaaaaaaaaaaaactactcttatgtccactttacaaaagaaaacagcattgtgattactcccagggaccgtattttatcttcagtggctgcctgattttacccccacaattaaagttgaaggaatcctgaacaaa

SEQ ID NO: 16635 - protein, 48 aa, Homo sapiens [sequence omitted]

SEQ ID NO: 16636 - DNA, 2274 bp, Homo sapiens
ggcgaccggaggtggcgcccaaaggctgcccgggagatcggggctgggctggcgggggccaggaccccgcgccctctcggccgctcactctcgcgtccactccctcgcagtcacgccgggcgcgcactcccactccctctccgcacgcggctgcgggacgcgatggacgcggcactgctccacagcctgctggaggccaactgcagcctggcgctggctgaagagctgctcttggacggctgggggccacccctggaccccgagggtccctactcctactgcaacacgaccttggaccagatcggaacgtgctggccccgcagcgctgccggagccctcgtggagaggccgtgccccgagtacttcaacggcgtcaagtacaacacgacccggaatgcctatcgagaatgcttggagaatgggacgtgggcctcaaagatcaactactcacagtgtgagcccattttggatgacaagcagaggaagtatgacctgcactaccgcatcgcccttgtcgtcaactacctgggccactgcgtatctgtggcagccctggtggccgccttcctgcttttcctggccctgcggagcattcgctgtctgcggaatgtgattcactggaacctcatcaccacctttatcctgcgaaatgtcatgtggttcctgctgcagctcgttgaccatgaagtgcacgagagcaatgaggtctggtgccgctgcatcaccaccatcttcaactacttcgtggtgaccaacttcttctggatgtttgtggaaggctgctacctgcacacggccattgtcatgacctactccactgagcgcctgcgcaagtgcctcttcctcttcatcggatggtgcatccccttccccatcatcgtcgcctgggccatcggcaagctctactatgagaatgaacagtgctggtttggcaaggagcctggcgacctggtggactacatctaccaaggccccatcattctcgtgctcctgatcaatttcgtatttctgttcaacatcgtcaggatcctaatgacaaagttacgcgcgtccaccacatccgagacaatccagtacaggaaggcagtgaaggccaccctggtgctcctgcccctcctgggcatcacctacatgctcttcttcgtcaatcccggggaggacgacctgtcacagatcatgttcatctatttcaactccttcctgcagtcgttccagggtttcttcgtgtctgtcttctactgcttcttcaatggagaggtgcgctcagccgtgaggaagaggtggcaccgctggcaggaccatcactcccttcgagtccccatggcccgggccatgtccatccctacatcacccacacggatcagcttccacagcatcaagcagacggccgctgtgtgacccctcggtcgcccacctgcacagctcccctgtcctcctccaccttcttcctctgggttctctgtgctgggcaggctctcgtggggcaggagatgggaggggagagaccagctctccagcctggcaggaaagagggggtgcggcagccaagggggactgcaagggacagggatgagtgggggccaccaggctcagcgcaagaggaagcagagggaattcacaggaccccctgagaagagccagtcagatgtctgcaggcatttgcccatcccagcctctctggccagggccttactgggcccagagcagagaaggacctgtccaacacacacagctatttatagtagcagacacagggctcccctgccctactcatggagccagcagccaggcaatggtgtggccctgcactggcccttggcctccacactcagtggtgcccctgcagttgggtggggtacgccagcaaaggatcagtttggctgccttatcccaggggctgtcacctagagaggctcacttgtaccccacccttgttcctgtgtcccctccccagccatcctcccgccttgggggctccatgaaggatgcaggcttccaggcctggcttcctctcttgggagaccccttctctgcctagtccacagattaggcaatcaaggaagacgccatcagggaagccacatccttagtcaaccagttgcatcgtgcggggcaaaatgaggagcagaggcatggaggagggaggcgtgggatgggaatagcagaaaccaaccatgtcttcagtgattgaaactcataccccattgccctttgccctccagtctccccttcagaaacatctctgctctctgtgaaataaaccatgcctcttgg

SEQ ID NO: 16637 - protein, 411 aa, Homo sapiens; identical to SEQ ID NO: 1926

SEQ ID NO: 16638 - DNA, 1600 bp, Homo sapiens
ggggctggccagggtgtgaccaccgtgctgggcagcaggctccagtccctaacccccagccactactggcatgaggggtccctcagggcccccaggcctcctctacgtcccacacctcctcctctgcctgctctgcctcctcccaccgccgctccaatacgcagccgggcagagccagatgcccaaagaccagcccctgtgggcacttctggagcagtactgccacaccatcatgaccctcaccaacctctcaggtccctactcctactgcaacacgaccttggaccagatcggaacgtgctggccccgcagcgctgccggagccctcgtggagaggccgtgccccgagtacttcaacggcgtcaagtacaacacgacccggaatgcctatcgagaatgcttggagaatgggacgtgggcctcaaagatcaactactcacagtgtgagcccattttggatgacaagcagaggaagtatgacctgcactaccgcatcgcccttgtcgtcaactacctgggccactgcgtatctgtggcagccctggtggccgccttcctgcttttcctggccctgcggagcattcgctgtctgcggaatgtgattcactggaacctcatcaccacctttatcctgcgaaatgtcatgtggttcctgctgcagctcgttgaccatgaagtgcacgagagcaatgaggtctggtgccgctgcatcaccaccatcttcaactacttcgtggtgaccaacttcttctggatgtttgtggaaggctgctacctgcacacggccattgtcatgacctactccactgagcgcctgcgcaagtgcctcttcctcttcatcggatggtgcatccccttccccatcatcgtcgcctgggccatcggcaagctctactatgagaatgaacagtgctggtttggcaaggagcctggcgacctggtggactacatctaccaaggccccatcattctcgtgctcctgatcaatttcgtatttctgttcaacatcgtcaggatcctaatgacaaagttacgcgcgtccaccacatccgagacaatccagtacaggaaggcagtgaaggccaccctggtgctcctgcccctcctgggcatcacctacatgctcttcttcgtcaatcccggggaggacgacctgtcacagatcatgttcatctatttcaactccttcctgcagtcgttccagggtttcttcgtgtctgtcttctactgcttcttcaatggagaggtgcgctcagccgtgaggaagaggtggcaccgctggcaggaccatcactcccttcgagtccccatggcccgggccatgtccatccctacatcacccacacggatcagcttccacagcatcaagcagacggccgctgtgtgacccctcggtcgcccacctgcacagctcccctgtcctcctccaccttcttcctctgggttctctgtgctgggcaggctctcgtggggcaggagatgggaggggagagaccagctctccagcctggcaggaaagagggggtgcggcagccaagggggactgcaagggacagggatgagtgggggccaccaggctcagcgcaagaggaagcagagg

SEQ ID NO: 16639 - protein, 438 aa, Homo sapiens
MRGPSGPPGLLYVPHLLLCLLCLLPPPLQYAAGQSQMPKDQPLWALLEQYCHTIMTLTNLSGPYSYCNTTLDQIGTCWPRSAAGALVERPCPEYFNGVKYNTTRNAYRECLENGTWASKINYSQCEPILDDKQRKYDLHYRIALVVNYLGHCVSVAALVAAFLLFLALRSIRCLRNVIHWNLITTFILRNVMWFLLQLVDHEVHESNEVWCRCITTIFNYFVVTNFFWMFVEGCYLHTAIVMTYSTERLRKCLFLFIGWCIPFPIIVAWAIGKLYYENEQCWFGKEPGDLVDYIYQGPIILVLLINFVFLFNIVRILMTKLRASTTSETIQYRKAVKATLVLLPLLGITYMLFFVNPGEDDLSQIMFIYFNSFLQSFQGFFVSVFYCFFNGEVRSAVRKRWHRWQDHHSLRVPMARAMSIPTSPTRISFHSIKQTAAV

SEQ ID NO: 16640 - DNA, 536 bp, Homo sapiens
gccactactggcatgaggggtccctcagggcccccaggcctcctctacgtcccacacctcctcctctgcctgctctgcctcctcccaccgccgctccaatacgcagccgggcagagccagatgcccaaagaccagcccctgtgggcacttctggagcagtactgccacaccatcatgaccctcaccaacctctcaggctggtcttgaattcctgtgctcaagcaatctgcctaccttggcttccccaagtgctgagattatgggtgtgagccactgcacctggccaagaatccgaatggattcaaagataccttgaaataattcctcaatgcaacacacacacatatgccagggttggtcaaatgggaagagagccttggcctgaagacagggacctgggctttcctcagctcttctgccaagtcacgccgggcgcgcactcccactccctctccgcacgcggctgcgggacgcgatggacgcggcactgctccacagcctgctggaggccaactgcagcctggcgctggctgaag

SEQ ID NO: 16641 - protein, 64 aa, Homo sapiens
MRGPSGPPGLLYVPHLLLCLLCLLPPPLQYAAGQSQMPKDQPLWALLEQYCHTIMTLTNLSGWS

SEQ ID NO: 16642 - DNA, 718 bp, Homo sapiens
gggctctcctgggctgccttccctcccgactgcctgctccaggtctcatcgtctcaggacccgggaaaaagtcccattgccatgaaggccccgtgagaggaaggctgggctttggcgtcagaaaggccgaggtttaagtgctctccagctgcttacatgctgagtggctgtggatgctcttgctgcctcttcccattccctcagcatgctggctgaacttcccacagccagcacctgtgagtcttcactcgaggcttctctcttgggctgcactgtccaaatacaggttgccctccaactggctgaggacccctcggtgccttcccactcttcagtcatggtaggtacacccctgcccttccagcctttcccaccaggagtttcacagcctcctggaaccagcgcctgcctctcagggaggtgctcagattcctcacagatgaagccagagacacagtgtgagcttttctggctggagtttatctgcttgatacattaccaaaatcataagaacgcaacaggatcaccagggccaggtctcacgggttcctgcttcgacatggtgttttgagtgtaggggctgctggaggcagggagggagagacttacacagagggacacagacacagaatgagagagacagacaggcaaagagacaaacggagacaaagacagaggcaaagagagatcaagggtctgcaatatttcaaggatgttt

SEQ ID NO: 16643 - protein, 121 aa, Homo sapiens
MLAELPTASTCESSLEASLLGCTVQIQVALQLAEDPSVPSHSSVMVGTPLPFQPFPPGVSQPPGTSACLSGRCSDSSQMKPETQCELFWLEFICLIHYQNHKNATGSPGPGLTGSCFDMVF

SEQ ID NO: 16644 - DNA, 2913 bp, Homo sapiens
gagcctttgcaaatgcatgcagagcatggaaatgacccagctgccctgctgttgaaacagaatcctatttggaaggcagacatgtggcccatctctgtagccatcactgagaaatctggattttcaagggcctttctctctgttgcccaggctggagtttagcgactcaatcatggctcactgactgcagcatcgacctccggggctcaagtgatcctttcatctcagcctcctcagtagctgagactacaggctcctccagatctgcctcctgctgaccttgtacccagctgcagcgacaccgagctcctcacagcttcccaaagtgggctggcccctctcacgacagggtcatcgcacaggctccctctgtgggggaacacaacgggagtcatttcaacaccactttcttcaggaagcctattctgatccttggtactccaagcagctgttgtcaatgcctaccccaggctgctaggaaatgctttccactcggaactgagacctaaaactggaaactaggctgcaggaccacctgggtacgtgtgaattacagaggttcatgcatttccaaatgggggtgtcattttagaactggggcgtaagatgatgagcaacagaaaagacaacgccgagcccccgggtatgagctcagaactctttacatgtttgatgctccaaatggtctagggcaggggggcttcagagccttggcagcagaacgtggtcgcgtagatgtttatctgattttctgttgcgctgctgctcaaccgccactacggaagtgcacactgccaccttatggacgtcttgagaagttacacttacacgttattaattatattaaataaaattcaaatgtaataaataatgtcaggggtagtttttataaacatttgcaatgaaaattcatatgaggacttcagacagaatatattcaaatgaagagttgatttcgatttcactgatgaaattaaataacaggattaagatgaaattctcagctattttagcattttagtgtttttctgctactgagttgtgggaattccttatatgtttcggcttgtcataaatatggttgacaaatattttatctgattttatacgttttttcactctattgattatttccttggttgtacagaaactttttaattttatgtagtcccacttgtctattttttacttttgttgactgtgcttttggtgttgtattcaagaaatcactgccaagatcattatcatgaagctttctccctatgatttcttctagaagttttatagttggggtattacatttatttatttatttaaagacaagatattgttctgtcactcagctgcagtgcagtggcacaatcaaagctcactgcagccccaacctcctgggctcaagtgatcctcccatctcagcctcccaagtaactgcaggtaactacaagtgtgcactaccacaccaggctattttttgtggagacagggtttctctgtgtttcctgggctgatttcgaactcttgaactcaagtgatccttccaccttgccctcctaaagtgctgggattacaggtgtgagcctccaaccctggccaggtcttacatgtaagtcattaatctattttgagttgaatgttgtgtgtggtgtaatatacacatgtgaatatccagttttcctaacatttgttgaagaaactactgtgtattcttagcatctttgtcaaagatcaattaatcatatgtgtgtgtgtttatttctgcactctccattctattccattgatttatgtgtttatctttaagccaatacaatacagttttaattgcagtagctttgtaatatattttgaaatcaggaactatgatgcctccagctttctttttttttctagagattgttttggttcttctggatcttttatagtttaatatgaatcttaggattgtttttactatgtccgtaaaaaatgccattgggattttgatagaaattgcatttaaactgcagatcactttgaagaatatgattatttcaacaatattaagtcttccaatccatgaacatgggattttgtgaatattcttgtatggttttagcctaattagaatgtttctaatgttttgattttacatacaatgttagctgtaagtttcagacggaattatttctcaactcttagtttgttcagagctttctaaaattattattaatgaaagttaatcatttttggcatagacttggtttttaactttgattaagtccagttattacttttaaaattttatgatgactctttgtgttctaagaaatatttgattaccatcccaagattgtaaaaatattctatacttttggaaaagctttatagttgtaaacttttatgtgtaagtctgtgatccatctgaactacattgcatattttatgaaggtgaaggttcattattttccatatggagtttaaatttttccagcatcatttatttgaaagaatttcctttccctgttgaactaccttgatgtctttggagaaaataaattgacagtatgtgtgggactctttctgaactctgtatttttttcattgatctatacatggcattaccacaccattttaattgctgtagtttaatagtaaagtgcacgttttctaccttttttctttctgactcttctgggtacttgacatttccaaatcaattttagaatcagattgtcaagtgcaacaaaaaatggttgggatttttattatgattgcattgaatctatagaataatttcgattaaaagtgacatcttgggccgggtgcagtggctcgcacctgtaatcccagcacttcgggaggccaaggtgggcagatcacaaggtcaagagttcaagaccagcctggccaacatagtgaaaccccaccactgct

SEQ ID NO: 16645 - protein, 49 aa, Homo sapiens
MHAEHGNDPAALLLKQNPIWKADMWPISVAITEKSGFSRAFLSVAQAGV

SEQ ID NO: 16646 - DNA, 677 bp, Homo sapiens
gagcatggaaatgacccagctgccctgctgttgaaacagaatcctatttggaaggcagacatgtggcccatctctgtagccatcactgagaaatctggattttcaagcaatgattttcaacaattataaaatggaagttgtagactggataagagatgctcagctaagggagttcctggatggtctttagattgatacaccaatcctctgaaattgcatgcaaaaatggcctttctctctgttgcccaggctggagtttagcgactcaatcatggctcactgactgcagcatcgacctccggggctcaagtgatcctttcatctcagcctcctcagtagctgagactacaggtgacttcccaagtatgcctggccacaatacctccaggaattcctcttgcgatcctatagtgacaccccacttaatcagcctctacttcatagtgcttattggcgggctggtgggtgtcatttccattcttttcctcctggtgaaaatgaacacccggtcagtgaccaccatggcggtcattaacttggtggtggtccacagcgtttttctgctgacagtgccatttcgcttgacctacctcatcaagaagacttggatgtttgggctgcccttctgcaaatttgtgagtgccatgctgcacatccacatgtacctcacgttccta

SEQ ID NO: 16647 - protein, 165 aa, Homo sapiens
MVFRLIHQSSEIACKNGLSLCCPGWSLATQSWLTDCSIDLRGSSDPFISASSVAETTGDFPSMPGHNTSRNSSCDPIVTPHLISLYFIVLIGGLVGVISILFLLVKMNTRSVTTMAVINLVVVHSVFLLTVPFRLTYLIKKTWMFGLPFCKFVSAMLHIHMYLTF

SEQ ID NO: 16648 - DNA, 529 bp, Homo sapiens
gctgttgaaacagaatcctatttggaaggcagacatgtggcccatctctgtagccatcactgagaaatctggattttcaagggcctttctctctgttgcccaggctggagtttagcgactcaatcatggctcactgactgcagcatcgacctccggggctcaagtgatcctttcatctcagcctcctcagtagctgagactacagatccctagaagactgtggccagcaggtattagcgtcaggagataaacagaactgagagcgtttgtcactagaagacttacattacaagtaatcctatagtgttctgcagactgaagagcgatgaaacgagatggcaattctgatgcctagaagaaatgaagacaaccaaaaatgatggtaagtatgtgagttagtaagttaagaactcttctctctctctctctctctccctcccctcaccacatatgtgtgtatctgtattttctaaaaaacatgacattttaacaaaaattatagcactttattgatgagtttacaagatat

SEQ ID NO: 16649 - protein, 49 aa, Homo sapiens
EIWIFKGLSLCCPGWSLATQSWLTDCSIDLRGSSDPFISASSVAETTDP

SEQ ID NO: 16650 - DNA, 412 bp, Homo sapiens
atctctgtagccatcactgagaaatctggattttcaagggcctttctctctgttgcccaggctggagtttagcgactcaatcatggctcactgactgcagcatcgacctccggggctcaagtgatcctttcatctcagcctcctcagtagctgagactacagacatggataaaagaaatccctgtaaaaggcagcttaactggatgtttccctccaatggcaaagtgactctcaatgggccaagagatctcattatgttacccaggctggtctcaaactcctgggctcaagcaatccttctaccttggcctctcaaagtgctgcagttacagatgtgagccactgtgcctggcctgatgttaatttataatgctttcctatgaataaactgttaaaacactttagtcaatgt

SEQ ID NO: 16651 - protein, 57 aa, Homo sapiens
MDKRNPCKRQLNWMFPSNGKVTLNGPRDLIMLPRLVSNSWAQAILLPWPLKVLQLQM

SEQ ID NO: 16652 - DNA, 478 bp, Homo sapiens
gtagccatcactgagaaatctggattttcaagcaatgattttcaacaattataaaatggaagttgtagactggataagagatgctcagctaagggagttcctggatggtctttagattgatacaccaatcctctgaaattgcatgcaaaaatgttttcctgggatcagctgcactccttagcaaaagtatattggagaatcaactgagaaagtaactgagacatttcaatcatttctaggtgtaaagaaagaccagatcccaggaaaatattacggtgacttcccaagtatgcctggccacaatacctccaggaattcctcttgcgatcctatagtgacaccccacttaatcagcctctacttcatagtgcttattggcgggctggtgggtgtcatttccattcttttcctcctggtgaaaatgaacacccggtcagtgaccaccatggcggtcattaacttggtggtggtccacagc

SEQ ID NO: 16653 - protein, 36 aa, Homo sapiens
MVFRLIHQSSEIACKNVFLGSAALLSKSILENQLRK

SEQ ID NO: 16654 - DNA, 750 bp, Homo sapiens
agggcctttctctctgttgcccaggctggagtttagcgactcaatcatggctcactgactgcagcatcgacctccggggctcaagtgatcctttcatctcagcctcctcagtagctgagactacagataaacagaactgagagcgtttgtcactagaagacttacattacaagtaatcctatagtgttctgcagactgaagagcgatgaaacgagatggcaattctgatgcctagaagaaatgaagacaaccaaaaatgatgtagataaatggcaagcaaaaaacgagaagtccagttacaggcagaagctgacaacattgtgactttgcagccatttagagataaatgtgaacctgtttttctctttagtgttatgatgttttgcgtattattaaagatgaagacttcaaaatactggagcaaagacaagtagtattatcggaaaaagaagcacaagcactgtgcaaggaatatgaaaatgaagactattttaataaacttatagaaaacatgaccagtggtccatctctagcccttgttttattgagagacaatggcttgcaatactggaaacaattactgggaccaagaactgttgaagaagccattgaatattttccagagagtttatgtgcacagtttgcgatggacagtttgccggtcaaccagttgtatggcagcgattcattagaaaccgctgaaagggaaatacagcatttctttcctcttcaaagcactttaggcttgat

SEQ ID NO: 16655 - protein, 78 aa, Homo sapiens
MTSGPSLALVLLRDNGLQYWKQLLGPRTVEEAIEYFPESLCAQFAMDSLPVNQLYGSDSLETAEREIQHFFPLQSTLG

SEQ ID NO: 16656 - DNA, 918 bp, Homo sapiens; identical to SEQ ID NO: 1927

SEQ ID NO: 16657 - protein, 305 aa, Homo sapiens; identical to SEQ ID NO: 1928

SEQ ID NO: 16658 - DNA, 2315 bp, Homo sapiens
gggatgggagtttggggatgaggcagctgaagaacagagtcttgtgatggtggaaccaggacttcgttgttccttcattgtgtgggcagaagaggtggaggattttaggcgccacctggtcttgtccccactgcccagacaggcagggaatccctcttcttccttttgctgaatcagctggagaagaaagcccagcaggaggcctgctagcctcagcctcgggccctaccagggtcctaggtactggaatggaacttcgccgaggtcaccgctcaaacggccacaacgagggagccgatttagatcctctgggcctgttccttccttttctttaaacgtcccagtctagcttagaggaggacctgttttgttagataaatggcaagcaaaaaacgagaagtccagttacagacagtcatcaataatcaaagcctgtgggatgagatgttgcagaacaaaggcttaacagtgattgatgtttaccaagcctggtgtggaccttgcagagcaatgcaacctttattcagaaaattgaaaaatgaactgaacgaagacgaaattctgcattttgctgtcgcagaagctgacaacattgtgactttgcagccatttagagataaatgtgaacctgtttttctctttagtgttaatggcaaaattatcgaaaagattcagggtgcaaatgcaccgcttgttaataaaaaagttattaatttgatcgatgaggagagaaaaattgcagcaggtgaaatggctcgacctcagtatcctgaaattccattagtagactcagattcagaagttagtgaagaatcaccatgtgaaagtgttcaggaattatacagtattgctattatcaaaccggatgctgtgattagtaaaaaagttctagaaattaaaagaaaaattaccaaagctggatttattatagaagcagagcataagacagtgctcactgaagaacaagttgtcaacttctatagtcgaatagcagaccagtgtgacttcgaagagtttgtctcttttatgacaagtggcttaagctatattctagttgtatctcaaggaagtaaacacaatcctccctctgaagaaaccgaaccacagactgacaccgaacctaacgaacgatctgaggatcaacctgaggtcgaagcccaggttacacctggaatgatgaagaacaaacaagacagtttacaagaatatctggaaagacaacatttagctcagctctgtgacattgaagaggatgcagctaatgttgctaagttcatggatgctttcttccccgattttaaaaaaatgaaaagcatgaaattagaaaagacattggcattacttcgaccaaatctctttcatgaaaggaaagatgatgttttgcgtattattaaagatgaagacttcaaaatactggagcaaagacaagtagtattatcggaaaaagaagcacaagcactgtgcaaggaatatgaaaatgaagactattttaataaacttatagaaaacatgaccagtggtccatctctagcccttgttttattgagagacaatggcttgcaatactggaaacaattactgggaccaagaactgttgaagaagccattgaatattttccagagagtttatgtgcacagtttgcgatggacagtttgccggtcaaccagttgtatggcagcgattcattagaaaccgctgaaagggaaatacagcatttctttcctcttcaaagcactttaggcttgattaaacctcatgcaacaagtgaacaaagagagcagatcctgaagatagttaaggaggctggatttgatctgacacaggtgaagaaaatgttcctaactcctgagcaaatagagaaaatttatccaaaagtaacaggaaaagacttttataaagatttattggaaatgttatctgtgggtccatctatggtcatgattctgaccaagtggaatgctgttgcagaatggagacgattgatgggcccaacagacccagaagaagcaaaattactttcccctgactccatccgagcccagtttggaataagtaaattgaaaaacattgtccatggagcatctaacgcctatgaagcaaaagaggttgttaatagactctttgaggatcctgaggaaaactaaagtatatactgtgaaaactttgagaagataatacatatgttcacgtcaatatacaaccatttggcacagcttcctgggaggaataataagaaaaacatgctttggaggaaaactcaagatacaaaaatgaatggctatgcataataacaataagaatgtattccccaaac

SEQ ID NO: 16659 - protein, 588 aa, Homo sapiens
MASKKREVQLQTVINNQSLWDEMLQNKGLTVIDVYQAWCGPCRAMQPLFRKLKNELNEDEILHFAVAEADNIVTLQPFRDKCEPVFLFSVNGKIIEKIQGANAPLVNKKVINLIDEERKIAAGEMARPQYPEIPLVDSDSEVSEESPCESVQELYSIAIIKPDAVISKKVLEIKRKITKAGFIIEAEHKTVLTEEQVVNFYSRIADQCDFEEFVSFMTSGLSYILVVSQGSKHNPPSEETEPQTDTEPNERSEDQPEVEAQVTPGMMKNKQDSLQEYLERQHLAQLCDIEEDAANVAKFMDAFFPDFKKMKSMKLEKTLALLRPNLFHERKDDVLRIIKDEDFKILEQRQVVLSEKEAQALCKEYENEDYFNKLIENMTSGPSLALVLLRDNGLQYWKQLLGPRTVEEAIEYFPESLCAQFAMDSLPVNQLYGSDSLETAEREIQHFFPLQSTLGLIKPHATSEQREQILKIVKEAGFDLTQVKKMFLTPEQIEKIYPKVTGKDFYKDLLEMLSVGPSMVMILTKWNAVAEWRRLMGPTDPEEAKLLSPDSIRAQFGISKLKNIVHGASNAYEAKEVVNRLFEDPEEN

SEQ ID NO: 16660 - DNA, 442 bp, Homo sapiens
agtgtcaacagttttcagtaggctgggtcttctgaaagcaccgttctttgcaggggtccatctatggtcatgattctgaccaagtggaatgctgttgcagaatggagacgattgatgggcccaacagacccagaagaagcaaaattactttcccctgactccatccgagcccagtttggaataagtaaattgaaaaacattgtccatggagcatctaacgcctatgaagcaaaagaggttgttaatagactctttgaggatcctgaggaaaactaaagtatatactgtgaaaactttgagaagataatacatatgttcacgtcaatatacaaccatttggcacagcttcctgggaggaataataagaaaaacatgctttggaggaaaactcaagatacaaaaatgaatggctatgcataataacaataagaatgtattcccc

SEQ ID NO: 16661 - protein, 33 aa, Homo sapiens
MEHLTPMKQKRLLIDSLRILRKTKVYTVKTLRR

SEQ ID NO: 16662 - DNA, 1958 bp, Homo sapiens
tgttacaaggaggaatgaaaggaaacaccaataaaatataaatggtggatgtgtggattatggggtaaaggattattgaataatttttttacaatttctgtatttttagctgtttacttttgtaataaaaatctgtttactaagataattttttttcaggatgatgcttcttgaaaattgcttagttgaaaaatggagagatcagcttagtaaaagatccatacagtgggaagagaggctgcaggaacagcggagaacagttcaggacaagaagaaaacagccgggcgcaccagtcgtagtaatccccccaaaccaaagggaaagcctcctgctcccaaaccagccagtcccaagaagaacattaaaactaggagtgcccagaagagaacaaacccgaaaagagtgtgagctaactagtttccaaagcggagacttccgacttccttacaggatgaggctgggcattgcctgggacagcctatgtaaggccatgtgccccttgccctaacaactcactgcagtgctcttcatagacacatcttgcagcatttttcttaaggctatgcttcagtttttctttgtaagccatcacaagccatagtggtaggtttgccctttggtacagaaggtgagttaaagctggtggaaaaggcttattgcattgcattcagagtaacctgtgtgcatactctagaagagtagggaaaataatgcttgttacaattcgacctaatatgtgcattgtaaaataaatgccatatttcaaacaaaacacgtaatttttttacagtatgttttattaccttttgatatctgttgttgcaatgttagtgatgttttaaaatgtgatcgaaaatataatgcttctaagaaggaacagtagtggaatgaatgtctaaaagatctttatgtgtttatggtctgcagaaggatttttgtgatgaaaggggattttttgaaaaatctagagaagtagcatatggaaaactataatgtgtcttttttacaatgacttcagctctgtttttagctagaaactctaaaaacaaaaataataataaagaaaaataaataaaaaggagaggcagacaatgtctggattcctgttttttggttacctgatttcatgatcatgatgcttcttgtcaacaccctcttaagcagcaccagaaacagtgagtttgtctgtaccattaggagttaggtactaattagttggctaatgctcaagtattttatacccacaagagaggtatgtcactcatcttacttcccaggacatccaccctgagaataatttgacaagcttaaaaatggccttcatgtgagtgccaaattttgttttcttcatttaaatattttctttgcctaaatacatgtgagaggagttaaatataaatgtacagagaggaaagttgaggttccacctctgaaatgagaattacttgacagttgggatactttaatcagaaaaaaagaacttatcttgcagcattttatcaacaaatttcataattgtggacaattggaggcatttattttaaaaaacaattttattggccttttgctaacacagtaagcatgtattctctataaggcattcaataaatgcacaacgcccaaaggaaataaaatcctatctaatcctactctccactacacagaggtaatcactattagtattttggcatattattctccaggtgtttcttatgcacttataaaatgatttgaacaaataaaactaggaacctgctatacatgtgtttcataacctgcctcctttgcttggccctttattgagataagttttcctgtcaagaaagcagaaaccatctcatttctaacagctgtgttatattccatagtatgcattactcaacaaactgttgtgctattggatacttaggtggtttcttcactgacaatactgaataaacatctcaatagtcaaaca

SEQ ID NO: 16663 - protein, 82 aa, Homo sapiens
MMLLENCLVEKWRDQLSKRSIQWEERLQEQRRTVQDKKKTAGRTSRSNPPKPKGKPPAPKPASPKKNIKTRSAQKRTNPKRV

SEQ ID NO: 16664 - DNA, 2968 bp, Homo sapiens
gggggagcccgcgccgcggctgcagctgccaagggagcgttccgagcccacgtcaggggaggtgtcgggataaatagggtcccgcaatggccgtggctggctgcgctccgagctgcggagtccgggactggagctgcccgggcgggttcgcgccccgaaggctgagagctggcgctgctcgtgccctgtgtgccagacggcggagctccgcggccggaccccgcggccccgctttgctgccgactggagtttgggggaagaaactctcctgcgccccagaggatttcttcctcggcgaagggacagcgaaagatgagggtggcaggaagagaagggcgctttctgtctgccggggtcgcagcgcgagagggcagtgccatgttcctctccatcctagtggcgctgtgcctgtggctgcacctggcgctgggcgtgcgcggcgcgccctgcgaggcggtgcgcatccctatgtgccggcacatgccctggaacatcacgcggatgcccaaccacctgcaccacagcacgcaggagaacgccatcctggccatcgagcagtacgaggagctggtggacgtgaactgcagcgccgtgctgcgcttcttcctctgtgccatgtacgcgcccatttgcaccctggagttcctgcacgaccctatcaagccgtgcaagtcggtgtgccaacgcgcgcgcgacgactgcgagcccctcatgaagatgtacaaccacagctggcccgaaagcctggcctgcgacgagctgcctgtctatgaccgtggcgtgtgcatctcgcctgaagccatcgtcacggacctcccggaggatgttaagtggatagacatcacaccagacatgatggtacaggaaaggcctcttgatgttgactgtaaacgcctaagccccgatcggtgcaagtgtaaaaaggtgaagccaactttggcaacgtatctcagcaaaaactacagctatgttattcatgccaaaataaaagctgtgcagaggagtggctgcaatgaggtcacaacggtggtggatgtaaaagagatcttcaagtcctcatcacccatccctcgaactcaagtcccgctcattacaaattcttcttgccagtgtccacacatcctgccccatcaagatgttctcatcatgtgttacgagtggcgctcaaggatgatgcttcttgaaaattgcttagttgaaaaatggagagatcagcttagtaaaagatccatacagtgggaagagaggctgcaggaacagcggagaacagttcaggacaagaagaaaacagccgggcgcaccagtcgtagtaatccccccaaaccaaagggaaagcctcctgctcccaaaccagccagtcccaagaagaacattaaaactaggagtgcccagaagagaacaaacccgaaaagagtgtgagctaactagtttccaaagcggagacttccgacttccttacaggatgaggctgggcattgcctgggacagcctatgtaaggccatgtgccccttgccctaacaactcactgcagtgctcttcatagacacatcttgcagcatttttcttaaggctatgcttcagtttttctttgtaagccatcacaagccatagtggtaggtttgccctttggtacagaaggtgagttaaagctggtggaaaaggcttattgcattgcattcagagtaacctgtgtgcatactctagaagagtagggaaaataatgcttgttacaattcgacctaatatgtgcattgtaaaataaatgccatatttcaaacaaaacacgtaatttttttacagtatgttttattaccttttgatatctgttgttgcaatgttagtgatgttttaaaatgtgatcgaaaatataatgcttctaagaaggaacagtagtggaatgaatgtctaaaagatctttatgtgtttatggtctgcagaaggatttttgtgatgaaaggggattttttgaaaaatctagagaagtagcatatggaaaactataatgtgtcttttttacaatgacttcagctctgtttttagctagaaactctaaaaacaaaaataataataaagaaaaataaataaaaaggagaggcagacaatgtctggattcctgttttttggttacctgatttcatgatcatgatgcttcttgtcaacaccctcttaagcagcaccagaaacagtgagtttgtctgtaccattaggagttaggtactaattagttggctaatgctcaagtattttatacccacaagagaggtatgtcactcatcttacttcccaggacatccaccctgagaataatttgacaagcttaaaaatggccttcatgtgagtgccaaattttgttttcttcatttaaatattttctttgcctaaatacatgtgagaggagttaaatataaatgtacagagaggaaagttgaggttccacctctgaaatgagaattacttgacagttgggatactttaatcagaaaaaaagaacttatcttgcagcattttatcaacaaatttcataattgtggacaattggaggcatttattttaaaaaacaattttattggccttttgctaacacagtaagcatgtattctctataaggcattcaataaatgcacaacgcccaaaggaaataaaatcctatctaatcctactctccactacacagaggtaatcactattagtattttggcatattattctccaggtgtttcttatgcacttataaaatgatttgaacaaataaaactaggaacctgctatacatgtgtttcataacctgcctcctttgcttggccctttattgagataagttttcctgtcaagaaagcagaaaccatctcatttctaacagctgtgttatattccatagtatgcattactcaacaaactgttgtgctattggatacttaggtggtttcttcactgacaatactgaataaacatctcaatagtcaaaca

SEQ ID NO: 16665 - protein, 368 aa, Homo sapiens
MRVAGREGRFLSAGVAAREGSAMFLSILVALCLWLHLALGVRGAPCEAVRIPMCRHMPWNITRMPNHLHHSTQENAILAIEQYEELVDVNCSAVLRFFLCAMYAPICTLEFLHDPIKPCKSVCQRARDDCEPLMKMYNHSWPESLACDELPVYDRGVCISPEAIVTDLPEDVKWIDITPDMMVQERPLDVDCKRLSPDRCKCKKVKPTLATYLSKNYSYVIHAKIKAVQRSGCNEVTTVVDVKEIFKSSSPIPRTQVPLITNSSCQCPHILPHQDVLIMCYEWRSRMMLLENCLVEKWRDQLSKRSIQWEERLQEQRRTVQDKKKTAGRTSRSNPPKPKGKPPAPKPASPKKNIKTRSAQKRTNPKRV

SEQ ID NO: 16666 - DNA, 1091 bp, Homo sapiens
tgttacaaggaggaatgaaaggaaacaccaataaaatataaatggtggatgtgtggattatggggtaaaggattattgaataatttttttacaatttctgtatttttagctgtttacttttgtaataaaaatctgtttactaagataattttttttcaggatgatgcttcttgaaaattgcttagttgaaaaatggagagatcagcttagtaaaagatccatacagtgggaagagaggctgcaggaacagcggagaacagttcaggacaagaagaaaacagccgggcgcaccagtcgtagtaatccccccaaaccaaagggaaagcctcctgctcccaaaccagccagtcccaagaagaacattaaaactaggagtgcccagaagagaacaaacccgaaaagagtgtgagctaactagtttccaaagcggagacttccgacttccttacaggatgaggctgggcattgcctgggacagcctatgtaaggccatgtgccccttgccctaacaactcactgcagtgctcttcatagacacatcttgcagcatttttcttaaggctatgcttcagtttttctttgtaagccatcacaagccatagtggtaggtttgccctttggtacagaaggtgagttaaagctggtggaaaaggcttattgcattgcattcagagtaacctgtgtgcatactctagaagagtagggaaaataatgcttgttacaattcgacctaatatgtgcattgtaaaataaatgccatatttcaaacaaaacacgtaatttttttacagtatgttttattaccttttgatatctgttgttgcaatgttagtgatgttttaaaatgtgatcgaaaatataatgcttctaagaaggaacagtagtggaatgaatgtctaaaagatctttatgtgtttatggtctgcagaaggatttttgtgatgaaaggggattttttgaaaaatctagagaagtagcatatggaaaactataatgtgtcttttttacaatgacttcagctctgtttttagctagaaactctaaaaacaaaaataataataaagaaaaataaataaaaaggagaggcagac

SEQ ID NO: 16667 - protein, 82 aa, Homo sapiens; identical to SEQ ID NO: 16663

SEQ ID NO: 16668 - DNA, 2101 bp, Homo sapiens
gggggagcccgcgccgcggctgcagctgccaagggagcgttccgagcccacgtcaggggaggtgtcgggataaatagggtcccgcaatggccgtggctggctgcgctccgagctgcggagtccgggactggagctgcccgggcgggttcgcgccccgaaggctgagagctggcgctgctcgtgccctgtgtgccagacggcggagctccgcggccggaccccgcggccccgctttgctgccgactggagtttgggggaagaaactctcctgcgccccagaggatttcttcctcggcgaagggacagcgaaagatgagggtggcaggaagagaagggcgctttctgtctgccggggtcgcagcgcgagagggcagtgccatgttcctctccatcctagtggcgctgtgcctgtggctgcacctggcgctgggcgtgcgcggcgcgccctgcgaggcggtgcgcatccctatgtgccggcacatgccctggaacatcacgcggatgcccaaccacctgcaccacagcacgcaggagaacgccatcctggccatcgagcagtacgaggagctggtggacgtgaactgcagcgccgtgctgcgcttcttcctctgtgccatgtacgcgcccatttgcaccctggagttcctgcacgaccctatcaagccgtgcaagtcggtgtgccaacgcgcgcgcgacgactgcgagcccctcatgaagatgtacaaccacagctggcccgaaagcctggcctgcgacgagctgcctgtctatgaccgtggcgtgtgcatctcgcctgaagccatcgtcacggacctcccggaggatgttaagtggatagacatcacaccagacatgatggtacaggaaaggcctcttgatgttgactgtaaacgcctaagccccgatcggtgcaagtgtaaaaaggtgaagccaactttggcaacgtatctcagcaaaaactacagctatgttattcatgccaaaataaaagctgtgcagaggagtggctgcaatgaggtcacaacggtggtggatgtaaaagagatcttcaagtcctcatcacccatccctcgaactcaagtcccgctcattacaaattcttcttgccagtgtccacacatcctgccccatcaagatgttctcatcatgtgttacgagtggcgctcaaggatgatgcttcttgaaaattgcttagttgaaaaatggagagatcagcttagtaaaagatccatacagtgggaagagaggctgcaggaacagcggagaacagttcaggacaagaagaaaacagccgggcgcaccagtcgtagtaatccccccaaaccaaagggaaagcctcctgctcccaaaccagccagtcccaagaagaacattaaaactaggagtgcccagaagagaacaaacccgaaaagagtgtgagctaactagtttccaaagcggagacttccgacttccttacaggatgaggctgggcattgcctgggacagcctatgtaaggccatgtgccccttgccctaacaactcactgcagtgctcttcatagacacatcttgcagcatttttcttaaggctatgcttcagtttttctttgtaagccatcacaagccatagtggtaggtttgccctttggtacagaaggtgagttaaagctggtggaaaaggcttattgcattgcattcagagtaacctgtgtgcatactctagaagagtagggaaaataatgcttgttacaattcgacctaatatgtgcattgtaaaataaatgccatatttcaaacaaaacacgtaatttttttacagtatgttttattaccttttgatatctgttgttgcaatgttagtgatgttttaaaatgtgatcgaaaatataatgcttctaagaaggaacagtagtggaatgaatgtctaaaagatctttatgtgtttatggtctgcagaaggatttttgtgatgaaaggggattttttgaaaaatctagagaagtagcatatggaaaactataatgtgtcttttttacaatgacttcagctctgtttttagctagaaactctaaaaacaaaaataataataaagaaaaataaataaaaaggagaggcagac

SEQ ID NO: 16669 - protein, 368 aa, Homo sapiens; identical to SEQ ID NO: 16665

SEQ ID NO: 16670 - DNA, 769 bp, Homo sapiens
tgttacaaggaggaatgaaaggaaacaccaataaaatataaatggtggatgtgtggattatggggtaaaggattattgaataatttttttacaatttctgtatttttagctgtttacttttgtaataaaaatctgtttactaagataattttttttcaggatgatgcttcttgaaaattgcttagttgaaaaatggagagatcagcttagtaaaagatccatacagtgggaagagaggctgcaggaacagcggagaacagttcaggacaagaagaaaacagccgggcgcaccagtcgtagtaatccccccaaaccaaagggaaagcctcctgctcccaaaccagccagtcccaagaagaacattaaaactaggagtgcccagaagagaacaaacccgaaaagagtgtgagctaactagtttccaaagcggagacttccgacttccttacaggatgaggctgggcattgcctgggacagcctatgtaaggccatgtgccccttgccctaacaactcactgcagtgctcttcatagacacatcttgcagcatttttcttaaggctatgcttcagtttttctttgtaagccatcacaagccatagtggtaggtttgccctttggtacagaaggtgagttaaagctggtggaaaaggcttattgcattgcattcagagtaacctgtgtgcatactctagaagagtagggaaaataatgcttgttacaattcgacctaatatgtgcattgtaaaataaatgccatatttcaaac

SEQ ID NO: 16671 - protein, 82 aa, Homo sapiens; identical to SEQ ID NO: 16663

SEQ ID NO: 16672 - DNA, 1779 bp, Homo sapiens
gggggagcccgcgccgcggctgcagctgccaagggagcgttccgagcccacgtcaggggaggtgtcgggataaatagggtcccgcaatggccgtggctggctgcgctccgagctgcggagtccgggactggagctgcccgggcgggttcgcgccccgaaggctgagagctggcgctgctcgtgccctgtgtgccagacggcggagctccgcggccggaccccgcggccccgctttgctgccgactggagtttgggggaagaaactctcctgcgccccagaggatttcttcctcggcgaagggacagcgaaagatgagggtggcaggaagagaagggcgctttctgtctgccggggtcgcagcgcgagagggcagtgccatgttcctctccatcctagtggcgctgtgcctgtggctgcacctggcgctgggcgtgcgcggcgcgccctgcgaggcggtgcgcatccctatgtgccggcacatgccctggaacatcacgcggatgcccaaccacctgcaccacagcacgcaggagaacgccatcctggccatcgagcagtacgaggagctggtggacgtgaactgcagcgccgtgctgcgcttcttcctctgtgccatgtacgcgcccatttgcaccctggagttcctgcacgaccctatcaagccgtgcaagtcggtgtgccaacgcgcgcgcgacgactgcgagcccctcatgaagatgtacaaccacagctggcccgaaagcctggcctgcgacgagctgcctgtctatgaccgtggcgtgtgcatctcgcctgaagccatcgtcacggacctcccggaggatgttaagtggatagacatcacaccagacatgatggtacaggaaaggcctcttgatgttgactgtaaacgcctaagccccgatcggtgcaagtgtaaaaaggtgaagccaactttggcaacgtatctcagcaaaaactacagctatgttattcatgccaaaataaaagctgtgcagaggagtggctgcaatgaggtcacaacggtggtggatgtaaaagagatcttcaagtcctcatcacccatccctcgaactcaagtcccgctcattacaaattcttcttgccagtgtccacacatcctgccccatcaagatgttctcatcatgtgttacgagtggcgctcaaggatgatgcttcttgaaaattgcttagttgaaaaatggagagatcagcttagtaaaagatccatacagtgggaagagaggctgcaggaacagcggagaacagttcaggacaagaagaaaacagccgggcgcaccagtcgtagtaatccccccaaaccaaagggaaagcctcctgctcccaaaccagccagtcccaagaagaacattaaaactaggagtgcccagaagagaacaaacccgaaaagagtgtgagctaactagtttccaaagcggagacttccgacttccttacaggatgaggctgggcattgcctgggacagcctatgtaaggccatgtgccccttgccctaacaactcactgcagtgctcttcatagacacatcttgcagcatttttcttaaggctatgcttcagtttttctttgtaagccatcacaagccatagtggtaggtttgccctttggtacagaaggtgagttaaagctggtggaaaaggcttattgcattgcattcagagtaacctgtgtgcatactctagaagagtagggaaaataatgcttgttacaattcgacctaatatgtgcattgtaaaataaatgccatatttcaaac

SEQ ID NO: 16673 - protein, 368 aa, Homo sapiens; identical to SEQ ID NO: 16665

SEQ ID NO: 16674 - DNA, 2596 bp, Homo sapiens
tcccccctcttaaaacacgatgcctcccaggatgctagtggcaccactgccactgcatttcctgttggcagcagtgagcagtgaaaaccgaagcggcagaaggcagtggcagcaggcagtggcagcaggcagtggcccaggcagaaatagctcccgcgcgattcactggagccttccccgggccctggtcccggctaccgggactcgcgcgtccggatctcaaaagcggcagaggccaccgaagggacaggaagcactttggtccagaccacactcccggcacagtgcggaaagagccggcgggagccactctgatcccggacgcctcagcgcccccttgggcttgggcttgccctcgggccggggaaggctgaccgcgatgccaggacgcgctcccctccgcaccgtcccgggcgccctgggtgcctggctgctgggcggcctctgggcctggaccctgtgcggcctgtgcagcctgggggcggtgggagccccgcgcccgtgccaggcgccgcagcagtgggaggggcgccaggttatgtaccagcaaagtagcgggcgcaacagccgcgccctgctctcctacgacgggctcaaccagcgcgtgcgggtgctggacgagaggaaggcgctgatcccctgcaagagattatttgaatatattttgctgtataaggatggagtgatgtttcagattgaccaagccaccaagcagtgctcaaagatgaccctgacacagccctgggatcctcttgacattcctcaaaactccacctttgaagaccagtactccatcggggggcctcaggagcagatcaccgtccaggagtggtcggacagaaagtcagctagatcctatgaaacctggattggcatctatacagtcaaggattgctatcctgtccaggaaacctttaccataaactacagtgtgatattgtctacgcggttttttgacatccagctgggtattaaagacccctcggtgtttacccctccaagcacgtgccagatggcccaactggagaagatgagcgaagactgctcctggtgagcctgtgcatagggaagcggcagcatcggatgtcagccccctgcggccccagctggagatggatatgagactagtcaagatgtgaatgctaattggagagaaatataattttaggaagatgcacattgatgtggggttttgatgtgtctgattttgactactcaagctctgtttacagaagaaaattgaatggcgagggtgtggccatatgaactgactagatggctaatatggacactttgggtatttctaatgcctgttcagggctggttttctgcatgcacgggtatacacataatgcagtgccatgcacatagggaagggtcagtaagagaagtttgccttggcagcaagtatttattgttgacattattcagaattagtgataataaaaagcagagtgattttggtcaattttattattaattcttaaattccctgcagagaatgccccctttattgctgcaccagggttggcattgctcccactgagccctactccaccctgtccctgcactcccttggttgccaaaaaaatgataacttaaatcccttccagacttaagaattttatggcatggcccaattgatataaacatttagaaggaaatgaaaagctaaaataggaagtaattattcctctaaagaaacattttgagcaaggcagtttagagaatcctaatgtctacactggcatagcacgagccatgtaagcttcttttttttctatgcaagagtattgatgtatgtgctgaatcttcacagacttgtcaatacacaggcagtattctaaaatagcactgaacagggagtcaggagactattgtctcctaaacccaggactagagttccctcgtactgtcactcctttggtcattaaatgcactgggcttgcccgcactttggccttcctagaacactgcttcataacctctctgtctgacttctgcatctccttccaggtcagctcattcacaagagttgctcccaagcctggatgagttgcaccttgcatcttgagcatgcatttctcacaataattattaagctgtgtgataatttctgctttcaggacactcatccattatcttggctgtgagctccttgggtacgggtaccttgtatgtttacttttatatccctagcacaaagcaagtgcctggcacatagtcagtgccctaagtattcgtagagtgaagaatgccagcctctcttgtccctggtttccttatgtgttgaatgtggttgagtttgtccattgctagggagagacttccagtaataaaatttactattctagatgcttctactgttatgttttatctgcccatttatctttcttagttaccaggagaaatgtgtgacacctatattataatgaaaacaatctcattacttatagtttatctatattaaacaaatttaattgcattttaaagcattctttgatactgttgcttttgcaataaatatggataatcttggttataagggagttaaaacaatgctgtaataaataaagtgcttcatgtgatcaaaatc

SEQ ID NO: 16675 - protein, 344 aa, Homo sapiens; identical to SEQ ID NO: 1934

SEQ ID NO: 16676 - DNA, 2616 bp, Homo sapiens
gttggcagcagtgagcagtgaaaaccgaagcggcagaaggcagtggcagcaggcagtggcagcaggcagtggcccaggcagaaatagctcccgcgcgattcactggagccttccccgggccctggtcccggctaccgggactcgcgcgtccggatctcaaaagcggcagaggccaccgaagggacaggaagcactttggtccagaccacactcccggcacagtgcggaaagagccggcgggagccactctgatcccggacgcctcagcgcccccttgggcttgggcttgccctcgggccggggaaggctgaccgcgatgccaggacgcgctcccctccgcaccgtcccgggcgccctgggtgcctggctgctgggcggcctctgggcctggaccctgtgcggcctgtgcagcctgggggcggtgggagccccgcgcccgtgccaggcgccgcagcagtgggaggggcgccaggttatgtaccagcaaagtagcgggcgcaacagccgcgccctgctctcctacgacgggctcaaccagcgcgtgcgggtgctggacgagaggaaggcgctgatcccctgcaagagattatttgaatatattttgctgtataaggatggagtgatgtttcagattgaccaagccaccaagcagtgctcaaagatgaccctgacacagccctgggatcctcttgacattcctcaaaactccacctttgaagaccagtactccatcggggggcctcaggagcagatcaccgtccaggagtggtcggacagaaagtcagctagatcctatgaaacctggattggcatctatacagtcaaggattgctatcctgtccaggaaacctttaccataaactacagtgtgatattgtctacgcggttttttgacatccagctgggtattaaagacccctcggtgtttacccctccaagcacgtgccagatggcccaactggagaagatgagcgaagactgctcctggtgagcctgtgcatagggaagcggcagcatcggatgtcagccccctgcggccccagctggagatggatatgagactagtcaagatgtgaatgctaattggagagaaatataattttaggaagatgcacattgatgtggggttttgatgtgtctgattttgactactcaagctctgtttacagaagaaaattgaatggcgagggtgtggccatatgaactgactagatggctaatatggacactttgggtatttctaatgcctgttcagggctggttttctgcatgcacgggtatacacataatgcagtgccatgcacatagggaagggtcagtaagagaagtttgccttggcagcaagtatttattgttgacattattcagaattagtgataataaaaagcagagtgattttggtcaattttattattaattcttaaattccctgcagagaatgccccctttattgctgcaccagggttggcattgctcccactgagccctactccaccctgtccctgcactcccttggttgccaaaaaaatgataacttaaatcccttccagacttaagaattttatggcatggcccaattgatataaacatttagaaggaaatgaaaagctaaaataggaagtaattattcctctaaagaaacattttgagcaaggcagtttagagaatcctaatgtctacactggcatagcacgagccatgtaagcttcttttttttctatgcaagagtattgatgtatgtgctgaatcttcacagacttgtcaatacacaggcagtattctaaaatagcactgaacagggagtcaggagactattgtctcctaaacccaggactagagttccctcgtactgtcactcctttggtcattaaatgcactgggcttgcccgcactttggccttcctagaacactgcttcataacctctctgtctgacttctgcatctccttccaggtcagctcattcacaagagttgctcccaagcctggatgagttgcaccttgcatcttgagcatgcatttctcacaataattattaagctgtgtgataatttctgctttcaggacactcatccattatcttggctgtgagctccttgggtacgggtaccttgtatgtttacttttatatccctagcacaaagcaagtgcctggcacatagtcagtgccctaagtattcgtagagtgaagaatgccagcctctcttgtccctggtttccttatgtgttgaatgtggttgagtttgtccattgctagggagagacttccagtaataaaatttactattctagatgcttctactgttatgttttatctgcccatttatctttcttagttaccaggagaaatgtgtgacacctatattataatgaaaacaatctcattacttatagtttatctatattaaacaaatttaattgcattttaaagcattctttgatactgttgcttttgcaataaatatggataatcttggttataagggagttaaaacaatgctgtaataaataaagtgcttcatgtgatcaaaatcaaatttgttatcctctctcaaaagcctgctctccctcttaccttccctaaactccagtgtccatttgccaaggccagaagctt

SEQ ID NO: 16677 - protein, 224 aa, Homo sapiens
MPGRAPLRTVPGALGAWLLGGLWAWTLCGLCSLGAVGAPRPCQAPQQWEGRQVMYQQSSGRNSRALLSYDGLNQRVRVLDERKALIPCKRLFEYILLYKDGVMFQIDQATKQCSKMTLTQPWDPLDIPQNSTFEDQYSIGGPQEQITVQEWSDRKSARSYETWIGIYTVKDCYPVQETFTINYSVILSTRFFDIQLGIKDPSVFTPPSTCQMAQLEKMSEDCSW

SEQ ID NO: 16678 - DNA, 2305 bp, Homo sapiens
gaaaaccgaagcggcagaaggcagtggcagcaggcagtggcagcaggcagtggcccaggcagaaatagctcccgcgcgattcactggagccttccccgggccctggtcccggctaccgggactcgcgcgtccggatctcaaaagcggcagaggccaccgaagggacaggaagcactttggtccagaccacactcccggcacagtgcggaaagagccggcgggagccactctgatcccggacgcctcagcgcccccttgggcttgggcttgccctcgggccggggaaggctgaccgcgatgccaggacgcgctcccctccgcaccgtcccgggcgccctgggtgcctggctgctgggcggcctctgggcctggaccctgtgcggcctgtgcagcctgggggcggtgggagccccgcgcccgtgccaggcgccgcagcagtgggaggggcgccaggttatgtaccagcaaagtagcgggcgcaacagccgcgccctgctctcctacgacgggctcaaccagcgcgtgcgggtgctggacgagaggaaggcgctgatcccctgcaagagatgaaacctggattggcatctatacagtcaaggattgctatcctgtccaggaaacctttaccataaactacagtgtgatattgtctacgcggttttttgacatccagctgggtattaaagacccctcggtgtttacccctccaagcacgtgccagatggcccaactggagaagatgagcgaagactgctcctggtgagcctgtgcatagggaagcggcagcatcggatgtcagccccctgcggccccagctggagatggatatgagactagtcaagatgtgaatgctaattggagagaaatataattttaggaagatgcacattgatgtggggttttgatgtgtctgattttgactactcaagctctgtttacagaagaaaattgaatggcgagggtgtggccatatgaactgactagatggctaatatggacactttgggtatttctaatgcctgttcagggctggttttctgcatgcacgggtatacacataatgcagtgccatgcacatagggaagggtcagtaagagaagtttgccttggcagcaagtatttattgttgacattattcagaattagtgataataaaaagcagagtgattttggtcaattttattattaattcttaaattccctgcagagaatgccccctttattgctgcaccagggttggcattgctcccactgagccctactccaccctgtccctgcactcccttggttgccaaaaaaatgataacttaaatcccttccagacttaagaattttatggcatggcccaattgatataaacatttagaaggaaatgaaaagctaaaataggaagtaattattcctctaaagaaacattttgagcaaggcagtttagagaatcctaatgtctacactggcatagcacgagccatgtaagcttcttttttttctatgcaagagtattgatgtatgtgctgaatcttcacagacttgtcaatacacaggcagtattctaaaatagcactgaacagggagtcaggagactattgtctcctaaacccaggactagagttccctcgtactgtcactcctttggtcattaaatgcactgggcttgcccgcactttggccttcctagaacactgcttcataacctctctgtctgacttctgcatctccttccaggtcagctcattcacaagagttgctcccaagcctggatgagttgcaccttgcatcttgagcatgcatttctcacaataattattaagctgtgtgataatttctgctttcaggacactcatccattatcttggctgtgagctccttgggtacgggtaccttgtatgtttacttttatatccctagcacaaagcaagtgcctggcacatagtcagtgccctaagtattcgtagagtgaagaatgccagcctctcttgtccctggtttccttatgtgttgaatgtggttgagtttgtccattgctagggagagacttccagtaataaaatttactattctagatgcttctactgttatgttttatctgcccatttatctttcttagttaccaggagaaatgtgtgacacctatattataatgaaaacaatctcattacttatagtttatctatattaaacaaatttaattgcattttaaagcattctttgatactgttgcttttgcaataaatatggataatcttggttataagggagttaaaacaatgctgtaataaataaagtgcttcatgtgatcaaaatc

SEQ ID NO: 16679 - protein, 90 aa, Homo sapiens
MPGRAPLRTVPGALGAWLLGGLWAWTLCGLCSLGAVGAPRPCQAPQQWEGRQVMYQQSSGRNSRALLSYDGLNQRVRVLDERKALIPCKR

SEQ ID NO: 16680 - DNA, 2388 bp, Homo sapiens
gaaaaccgaagcggcagaaggcagtggcagcaggcagtggcagcaggcagtggcccaggcagaaatagctcccgcgcgattcactggagccttccccgggccctggtcccggctaccgggactcgcgcgtccggatctcaaaagcggcagaggccaccgaagggacaggaagcactttggtccagaccacactcccggcacagtgcggaaagagccggcgggagccactctgatcccggacgcctcagcgcccccttgggcttgggcttgccctcgggccggggaaggctgaccgcgatgccaggacgcgctcccctccgcaccgtcccgggcgccctgggtgcctggctgctgggcggcctctgggcctggaccctgtgcggcctgtgcagcctgggggcggtgggagccccgcgcccgtgccaggcgccgcagcagtgggaggggcgccaggttatgtaccagcaaagtagcgggcgcaacagccgcgccctgctctcctacgacgggctcaaccagcgcgtgcgggtgctggacgagaggaaggcgctgatcccctgcaagagatgaaacctggattggcatctatacagtcaaggattgctatcctgtccaggaaacctttaccataaactacagtgtgatattgtctacgcggttttttgacatccagctgggtattaaagacccctcggtgtttacccctccaagcacgtgccagatggcccaactggagaagatgagcgaagactgctcctggtgagcctgtgcatagggaagcggcagcatcggatgtcagccccctgcggccccagctggagatggatatgagactagtcaagatgtgaatgctaattggagagaaatataattttaggaagatgcacattgatgtggggttttgatgtgtctgattttgactactcaagctctgtttacagaagaaaattgaatggcgagggtgtggccatatgaactgactagatggctaatatggacactttgggtatttctaatgcctgttcagggctggttttctgcatgcacgggtatacacataatgcagtgccatgcacatagggaagggtcagtaagagaagtttgccttggcagcaagtatttattgttgacattattcagaattagtgataataaaaagcagagtgattttggtcaattttattattaattcttaaattccctgcagagaatgccccctttattgctgcaccagggttggcattgctcccactgagccctactccaccctgtccctgcactcccttggttgccaaaaaaatgataacttaaatcccttccagacttaagaattttatggcatggcccaattgatataaacatttagaaggaaatgaaaagctaaaataggaagtaattattcctctaaagaaacattttgagcaaggcagtttagagaatcctaatgtctacactggcatagcacgagccatgtaagcttcttttttttctatgcaagagtattgatgtatgtgctgaatcttcacagacttgtcaatacacaggcagtattctaaaatagcactgaacagggagtcaggagactattgtctcctaaacccaggactagagttccctcgtactgtcactcctttggtcattaaatgcactgggcttgcccgcactttggccttcctagaacactgcttcataacctctctgtctgacttctgcatctccttccaggtcagctcattcacaagagttgctcccaagcctggatgagttgcaccttgcatcttgagcatgcatttctcacaataattattaagctgtgtgataatttctgctttcaggacactcatccattatcttggctgtgagctccttgggtacgggtaccttgtatgtttacttttatatccctagcacaaagcaagtgcctggcacatagtcagtgccctaagtattcgtagagtgaagaatgccagcctctcttgtccctggtttccttatgtgttgaatgtggttgagtttgtccattgctagggagagacttccagtaataaaatttactattctagatgcttctactgttatgttttatctgcccatttatctttcttagttaccaggagaaatgtgtgacacctatattataatgaaaacaatctcattacttatagtttatctatattaaacaaatttaattgcattttaaagcattctttgatactgttgcttttgcaataaatatggataatcttggttataagggagttaaaacaatgctgtaataaataaagtgcttcatgtgatcaaaatcaaatttgttatcctctctcaaaagcctgctctccctcttaccttccctaaactccagtgtccatttgccaaggccagaagctt

SEQ ID NO: 16681 - protein, 90 aa, Homo sapiens; identical to SEQ ID NO: 16679

SEQ ID NO: 16682 - DNA, 662 bp, Homo sapiens
gaaaaccgaagcggcagaaggcagtggcagcaggcagtggcagcaggcagtggcccaggcagaaatagctcccgcgcgattcactggagccttccccgggccctggtcccggctaccgggactcgcgcgtccggatctcaaaagcggcagaggccaccgaagggacaggaagcactttggtccagaccacactcccggcacagtgcggaaagagccggcgggagccactctgatcccggacgcctcagcgcccccttgggcttgggcttgccctcgggccggggaaggctgaccgcgatgccaggacgcgctcccctccgcaccgtcccgggcgccctgggtgcctggctgctgggcggcctctgggcctggaccctgtgcggcctgtgcagcctgggggcggtgggagccccgcgcccgtgccaggcgccgcagcagtgggaggggcgccaggttatgtaccagcaaagtagcgggcgcaacagccgcgccctgctctcctacgacgggctcaaccagcgcgtgcgggtgctggacgagaggaaggcgctgatcccctgcaagagtgcacctggagaatgatgccatttcaaggactcagtgctggttgctactgctggcagattgggcatccatcagcggctgtggccaggctgaccttg

SEQ ID NO: 16683 - protein, 94 aa, Homo sapiens
MPGRAPLRTVPGALGAWLLGGLWAWTLCGLCSLGAVGAPRPCQAPQQWEGRQVMYQQSSGRNSRALLSYDGLNQRVRVLDERKALIPCKSAPGE

SEQ ID NO: 16684 - DNA, 1094 bp, Homo sapiens
gtcacgggccggaggtcccggggctgctgggtgcgggcggtgggctgcgcgttgtccgctggactgggtcccggtcacgccccgccaagccccgcccctcaggccggggcgcgaccgcggatccgcagttcccgggccagcctggggcggccggccaggaaccacccgttaaggtgtcttctctttagggatggtgaggttggaaaaaggctcctgtaaccctcctccaggatgaaccacctgccagaagacatggagaacgctctcaccgggagccagagctcccatgcttctctgcgcaatatccattccatcaaccccacacaactcatggccaggattgagtcctatgaaggaagggaaaagaaaggcatatctgatgtcaggaggactttctgtttgtttgtcacctttgacctcttattcgtaacattactgtggataatagagttaaatgtgaatggaggcattgagaacacattagagaaggaggtgatgcagtatgactactattcttcatattttgatatatttcttctggcagtttttcgatttaaagtgttaatacttgcatatgctgtgtgcagactgcgccattggtgggcaatagcgttgacaacggcagtgaccagtgcctttttactagcaaaagtgatcctttcgaagcttttctctcaaggggcttttggctatgtgctgcccatcatttcattcatccttgcctggattgagacgtggttcctggatttcaaagtgttacctcaagaagcagaagaagaaaacagactcctgatagttcaggatgcttcagagagggcagcacttatacctggtggtctttctgatggtcagttttattcccctcctgaatccgaagcaggatctgaagaagctgaagaaaaacaggacagtgagaaaccacttttagaactatgagtactacttttgttaaatgtgaaaaaccctcacagaaagtcatcgaggcaaaaagaggcaggcagtggagtctccctgtcgacagtaaagttgaaatggtgacgtccactgctggctttattgaacagctaataaagatttatttattgtaatacctc

SEQ ID NO: 16685 - protein, 234 aa, Homo sapiens; identical to SEQ ID NO: 1936

SEQ ID NO: 16686 - DNA, 817 bp, Homo sapiens
gtcacgggccggaggtcccggggctgctgggtgcgggcggtgggctgcgcgttgtccgctggactgggtcccggtcacgccccgccaagccccgcccctcaggccggggcgcgaccgcggatccgcagttcccgggccagcctggggcggccggccaggaaccaccctctcctttctaggtgaatggaggcattgagaacacattagagaaggaggtgatgcagtatgactactattcttcatattttgatatatttcttctggcagtttttcgatttaaagtgttaatacttgcatatgctgtgtgcagactgcgccattggtgggcaatagcgttgacaacggcagtgaccagtgcctttttactagcaaaagtgatcctttcgaagcttttctctcaaggggcttttggctatgtgctgcccatcatttcattcatccttgcctggattgagacgtggttcctggatttcaaagtgttacctcaagaagcagaagaagaaaacagactcctgatagttcaggatgcttcagagagggcagcacttatacctggtggtctttctgatggtcagttttattcccctcctgaatccgaagcaggatctgaagaagctgaagaaaaacaggacagtgagaaaccacttttagaactatgagtactacttttgttaaatgtgaaaaaccctcacagaaagtcatcgaggcaaaaagaggcaggcagtggagtctccctgtcgacagtaaagttgaaatggtgacgtccactgctggctttattgaacagctaataaagatttatttattgtaatacctc

SEQ ID NO: 16687 - protein, 146 aa, Homo sapiens
MQYDYYSSYFDIFLLAVFRFKVLILAYAVCRLRHWWAIALTTAVTSAFLLAKVILSKLFSQGAFGYVLPIISFILAWIETWFLDFKVLPQEAEEENRLLIVQDASERAALIPGGLSDGQFYSPPESEAGSEEAEEKQDSEKPLLEL

SEQ ID NO: 16688 - DNA, 1445 bp, Homo sapiens
gtcacgggccggaggtcccggggctgctgggtgcgggcggtgggctgcgcgttgtccgctggactgggtcccggtcacgccccgccaagccccgcccctcaggccggggcgcgaccgcggatccgcagttcccgggccagcctggggcggccggccaggaaccacccgttaaggtgtcttctctttagggatggtgaggttggaaaaaggctcctgtaaccctcctccaggatgaaccacctgccagaagacatggagaacgctctcaccgggagccagagctcccatgcttctctgcgcaatatccattccatcaaccccacacaactcatggccaggattgagtcctatgaaggaagggaaaagaaaggcatatctgatgtcaggaggactttctgtttgtttgtcacctttgacctcttattcgtaacattactgtggataatagagttaaatgtgaatggaggcattgagaacacattagagaaggaggtgatgcagtatgactactattcttcatattttgatatatttcttctggcagtttttcgatttaaagtgttaatacttgcatatgctgtgtgcagactgcgccattggtgggcaatagcgttgacaacggcagtgaccagtgcctttttactagcaaaagtgatcctttcgaagcttttctctcaaggggcttttggctatgtgctgcccatcatttcattcatccttgcctggattgagacgtggttcctggatttcaaagtgttacctcaagaagcagaagaagaaaacagactcctgatagttcaggatgcttcagagagggcagcacttatacctggtggtctttctgatggtcagttttattcccctcctgaatccgaagcaggatctgaagaagctgaagaaaaacaggacagtgagaaaccacttttagaactatgagtactacttttgttaaatgtgaaaaaccctcacagaaagtcatcgaggcaaaaagaggcaggcagtggagtctccctgtcgacagtaaagttgaaatggtgacgtccactgctggctttattgaacagctaataaagatttatttattgtaatacctcacagacgttgtaccatatccatgcacatttagttgcctgcctgtggctggtaaggtaatgtcatgattcatcctctcttcagtgagactgagcctgatgtgttaacaaataggtgaagaaagtcttgtgctgtattcctaatcaaaagacttaatatattgaagtaacacttttttagtaagcaagatacctttttatttcaattcacagaatggaatttttttgtttcatgtctcagatttattttgtatttcttttttaacactctacatttcccttgttttttaactcatgcacatgtgctctttgtacagttttaaaaagtgtaataaaatctgacatgtcaatgtg

SEQ ID NO: 16689 - protein, 234 aa, Homo sapiens; identical to SEQ ID NO: 1936

SEQ ID NO: 16690 - DNA, 1168 bp, Homo sapiens
gtcacgggccggaggtcccggggctgctgggtgcgggcggtgggctgcgcgttgtccgctggactgggtcccggtcacgccccgccaagccccgcccctcaggccggggcgcgaccgcggatccgcagttcccgggccagcctggggcggccggccaggaaccaccctctcctttctaggtgaatggaggcattgagaacacattagagaaggaggtgatgcagtatgactactattcttcatattttgatatatttcttctggcagtttttcgatttaaagtgttaatacttgcatatgctgtgtgcagactgcgccattggtgggcaatagcgttgacaacggcagtgaccagtgcctttttactagcaaaagtgatcctttcgaagcttttctctcaaggggcttttggctatgtgctgcccatcatttcattcatccttgcctggattgagacgtggttcctggatttcaaagtgttacctcaagaagcagaagaagaaaacagactcctgatagttcaggatgcttcagagagggcagcacttatacctggtggtctttctgatggtcagttttattcccctcctgaatccgaagcaggatctgaagaagctgaagaaaaacaggacagtgagaaaccacttttagaactatgagtactacttttgttaaatgtgaaaaaccctcacagaaagtcatcgaggcaaaaagaggcaggcagtggagtctccctgtcgacagtaaagttgaaatggtgacgtccactgctggctttattgaacagctaataaagatttatttattgtaatacctcacagacgttgtaccatatccatgcacatttagttgcctgcctgtggctggtaaggtaatgtcatgattcatcctctcttcagtgagactgagcctgatgtgttaacaaataggtgaagaaagtcttgtgctgtattcctaatcaaaagacttaatatattgaagtaacacttttttagtaagcaagatacctttttatttcaattcacagaatggaatttttttgtttcatgtctcagatttattttgtatttcttttttaacactctacatttcccttgttttttaactcatgcacatgtgctctttgtacagttttaaaaagtgtaataaaatctgacatgtcaatgtg

SEQ ID NO: 16691 - protein, 146 aa, Homo sapiens; identical to SEQ ID NO: 16687

SEQ ID NO: 16692 - DNA, 1712 bp, Homo sapiens
gtcacgggccggaggtcccggggctgctgggtgcgggcggtgggctgcgcgttgtccgctggactgggtcccggtcacgccccgccaagccccgcccctcaggccggggcgcgaccgcggatccgcagttcccgggccagcctggggcggccggccaggaaccacccgttaaggtgtcttctctttagggatggtgaggttggaaaaaggctcctgtaaccctcctccaggatgaaccacctgccagaagacatggagaacgctctcaccgggagccagagctcccatgcttctctgcgcaatatccattccatcaaccccacacaactcatggccaggattgagtcctatgaaggaagggaaaagaaaggcatatctgatgtcaggaggactttctgtttgtttgtcacctttgacctcttattcgtaacattactgtggataatagagttaaatgtgaatggaggcattgagaacacattagagaaggaggtgatgcagtatgactactattcttcatattttgatatatttcttctggcagtttttcgatttaaagtgttaatacttgcatatgctgtgtgcagactgcgccattggtgggcaatagcgttgacaacggcagtgaccagtgcctttttactagcaaaagtgatcctttcgaagcttttctctcaaggggcttttggctatgtgctgcccatcatttcattcatccttgcctggattgagacgtggttcctggatttcaaagtgttacctcaagaagcagaagaagaaaacagactcctgatagttcaggatgcttcagagagggcagcacttatacctggtggtctttctgatggtcagttttattcccctcctgaatccgaagcaggatctgaagaagctgaagaaaaacaggacagtgagaaaccacttttagaactatgagtactacttttgttaaatgtgaaaaaccctcacagaaagtcatcgaggcaaaaagaggcaggcagtggagtctccctgtcgacagtaaagttgaaatggtgacgtccactgctggctttattgaacagctaataaagatttatttattgtaatacctcacagacgttgtaccatatccatgcacatttagttgcctgcctgtggctggtaaggtaatgtcatgattcatcctctcttcagtgagactgagcctgatgtgttaacaaataggtgaagaaagtcttgtgctgtattcctaatcaaaagacttaatatattgaagtaacacttttttagtaagcaagatacctttttatttcaattcacagaatggaatttttttgtttcatgtctcagatttattttgtatttcttttttaacactctacatttcccttgttttttaactcatgcacatgtgctctttgtacagttttaaaaagtgtaataaaatctgacatgtcaatgtggctagttttatttttcttgttttgcattatgtgtatggcctgaagtgttggacttgcaaaaggggaagaaaggaattgcgaatacatgtaaaatgtcaccagacatttgtattatttttatcatgaaatcatgtttttctctgattgttctgaaatgttctaaatactcttattttgaatgcacaaaatgacttaaaccattcatatcatgtttcctttgcgttcagccaatttcaattaaaatgaactaaattatactgtgtgctg

SEQ ID NO: 16693 - protein, 234 aa, Homo sapiens; identical to SEQ ID NO: 1936

SEQ ID NO: 16694 - DNA, 1435 bp, Homo sapiens
gtcacgggccggaggtcccggggctgctgggtgcgggcggtgggctgcgcgttgtccgctggactgggtcccggtcacgccccgccaagccccgcccctcaggccggggcgcgaccgcggatccgcagttcccgggccagcctggggcggccggccaggaaccaccctctcctttctaggtgaatggaggcattgagaacacattagagaaggaggtgatgcagtatgactactattcttcatattttgatatatttcttctggcagtttttcgatttaaagtgttaatacttgcatatgctgtgtgcagactgcgccattggtgggcaatagcgttgacaacggcagtgaccagtgcctttttactagcaaaagtgatcctttcgaagcttttctctcaaggggcttttggctatgtgctgcccatcatttcattcatccttgcctggattgagacgtggttcctggatttcaaagtgttacctcaagaagcagaagaagaaaacagactcctgatagttcaggatgcttcagagagggcagcacttatacctggtggtctttctgatggtcagttttattcccctcctgaatccgaagcaggatctgaagaagctgaagaaaaacaggacagtgagaaaccacttttagaactatgagtactacttttgttaaatgtgaaaaaccctcacagaaagtcatcgaggcaaaaagaggcaggcagtggagtctccctgtcgacagtaaagttgaaatggtgacgtccactgctggctttattgaacagctaataaagatttatttattgtaatacctcacagacgttgtaccatatccatgcacatttagttgcctgcctgtggctggtaaggtaatgtcatgattcatcctctcttcagtgagactgagcctgatgtgttaacaaataggtgaagaaagtcttgtgctgtattcctaatcaaaagacttaatatattgaagtaacacttttttagtaagcaagatacctttttatttcaattcacagaatggaatttttttgtttcatgtctcagatttattttgtatttcttttttaacactctacatttcccttgttttttaactcatgcacatgtgctctttgtacagttttaaaaagtgtaataaaatctgacatgtcaatgtggctagttttatttttcttgttttgcattatgtgtatggcctgaagtgttggacttgcaaaaggggaagaaaggaattgcgaatacatgtaaaatgtcaccagacatttgtattatttttatcatgaaatcatgtttttctctgattgttctgaaatgttctaaatactcttattttgaatgcacaaaatgacttaaaccattcatatcatgtttcctttgcgttcagccaatttcaattaaaatgaactaaattatactgtgtgctg

SEQ ID NO: 16695 - protein, 146 aa, Homo sapiens; identical to SEQ ID NO: 16687

SEQ ID NO: 16696 - DNA, 3664 bp, Homo sapiens
acgccccgccaagccccgcccctcaggccggggcgcgaccgcggatccgcagttcccgggccagcctggggcggccggccaggaaccacccgttaaggtgtcttctctttagggatggtgaggttggaaaaaggctcctgtaaccctcctccaggatgaaccacctgccagaagacatggagaacgctctcaccgggagccagagctcccatgcttctctgcgcaatatccattccatcaaccccacacaactcatggccaggattgagtcctatgaaggaagggaaaagaaaggcatatctgatgtcaggaggactttctgtttgtttgtcacctttgacctcttattcgtaacattactgtggataatagagttaaatgtgaatggaggcattgagaacacattagagaaggaggtgatgcagtatgactactattcttcatattttgatatatttcttctggcagtttttcgatttaaagtgttaatacttgcatatgctgtgtgcagactgcgccattggtgggcaatagcggtgagtatgccctgcatgagtgggtcatctcctccagtgctggtggccaagtcctgctctcaacaggcctgggctgggagaagatacagttctaatgcaggtggaatcccaccagctttcctgagtcccgtttcctccatacttaagtaggtttaatactccagggcttctttccaatgttaatgagtaactagatttgtctcttggtgctgagccaaatgaggaatctagaagcccaacagtgattattggccaagcaccaagccaccctctacctcattttgcaaataagagatgagaggagacctctgtcacagagatatttggaaaatgtcttatttggttgaaactgcttagtgattgttttcatgacatggtctgtacttatttaggtaattgccttaccccctcctttcttccccacaaccccctgtcttggagggaaaagctctcagtctctctgttgttgccttggacttctcaaggacaaggacttttttactcctctgtttcctggcatctagcacagagagctttggtattcttaataagtatttagagattgatagaattactagcagttctgcctgacagatgtctgaatatttgccttttgtaaagctttaataagtcagttctatgggaagaaaatgtggagctcctcagactagagagagctgctcagaaataacctgcagttctgcaattagagggtgagagctcgggtctgggtggcccaggcctgggtttctccagctgggaataggacttgtgctgccctcctgagtccactagggggcgatgtctgtctgggccatgtcttctgagcattctcagaatcacggggcagcggtcagaccatctgttaatccggaagctctcatttcatggatataggctgacagtcttggccagacttgactccctttcctgaatactcttttgctgatatcatcatagcttttgatgattgtaccctcccatttttctgcattttctacaacagatccctttgggatgttgtattcctgagtccccatatgtatgctagtatttgtcagactatccctctcaatgtttgttttagaaaagtgtttgacatatagatattcagtgagagctgtaagacagtatcttcaatatctgctttcagattatctgaagaataagtctaatttagcaaatcattttattgcttctgattcttgttttaaaaaacatttgcagagaagagtctagaagctggaaggaggagaagtcagctggtatttaaagagtgcttagtgtgagcctgtaaagttaattagtgtcagaatataaaatgctaaactgcctcctctcccaagcagctctgtgtgtgtgtgtgtgtgtgtgtgtgagtgtgtgtgtgtgtgtgtctgcaactttgttaatacttattgagcaagatacttggtgttccctgtcctccttctgtcagtcaagctactattggtattcattttggtcaggtttcaccatgctaaaaatattagttgaaggaacagtgacaaggctcaggtattatggtatctctggacttcacaacccctggcgagagccctacctatgcactttaccagtctcttcatgtgcttgtagaggctttggaattgtaccttctggtggatcaaacttagttacctagcacaccagcctgctgaaatgtgggagaataaaccacacacagtcatttagggattgtgtcacatgtagaagcccattttgccccagtgtgggtctaggggagagagactgagtgatatgggaaggagccaggctaggcacaggtttttcaggccttgcctgctcctggctcagacgggtctcttgtgaagagggaggtaccttcacagtgtgagatgcctagtgtgaacagtgctggattatgtgtcttgcagttgacaacggcagtgaccagtgcctttttactagcaaaagtgatcctttcgaaggtatggcctaccactttttctatacagttaccatcttcagtgatgaagcctcgtttttcagtgtgagtttgtggtaactgcatttccctttcctggtcgtattttccagcttttctctcaaggggcttttggctatgtgctgcccatcatttcattcatccttgcctggattgagacgtggttcctggatttcaaagtgttacctcaagaagcagaagaagaaaacagactcctgatagttcaggatgcttcagagagggcagcacttatacctggtggtctttctgatggtcagttttattcccctcctgaatccgaagcaggatctgaagaagctgaagaaaaacaggacagtgagaaaccacttttagaactatgagtactacttttgttaaatgtgaaaaaccctcacagaaagtcatcgaggcaaaaagaggcaggcagtggagtctccctgtcgacagtaaagttgaaatggtgacgtccactgctggctttattgaacagctaataaagatttatttattgtaatacctcacagacgttgtaccatatccatgcacatttagttgcctgcctgtggctggtaaggtaatgtcatgattcatcctctcttcagtgagactgagcctgatgtgttaacaaataggtgaagaaagtcttgtgctgtattcctaatcaaaagacttaatatattgaagtaacacttttttagtaagcaagatacctttttatttcaattcacagaatggaatttttttgtttcatgtctcagatttattttgtatttcttttttaacactctacatttcccttgttttttaactcatgcacatgtgctctttgtacagttttaaaaagtgtaataaaatctgacatgtcaatgtggctagttttatttttcttgttttgcattatgtgtatggcctgaagtgttggacttgcaaaaggggaagaaaggaattgcgaatacatgtaaaatgtcaccagacatttgtattatttttatcatgaaatcatgtttttctctgattgttctgaaatgttctaaatactcttattttgaatgcacaaaatgacttaaaccattcatatcatgtttcctttgcgttcagccaatttcaattaaaatgaactaaattatactgtgtgctg

SEQ ID NO: 16697 - protein, 176 aa, Homo sapiens
MNHLPEDMENALTGSQSSHASLRNIHSINPTQLMARIESYEGREKKGISDVRRTFCLFVTFDLLFVTLLWIIELNVNGGIENTLEKEVMQYDYYSSYFDIFLLAVFRFKVLILAYAVCRLRHWWAIAVSMPCMSGSSPPVLVAKSCSQQAWAGRRYSSNAGGIPPAFLSPVSSILK

SEQ ID NO: 16698 - DNA, 497 bp, Homo sapiens
agatggaatcactgaattcatcacttgacacagtactagtttggataagtttagcaaggtgtcttctctttagggatggtgaggttggaaaaaggctcctgtaaccctcctccaggatgaaccacctgccagaagacatggagaacgctctcaccgggagccagagctcccatgcttctctgcgcaatatccattccatcaaccccacacaactcatggccaggattgagtcctatgaaggaagggaaaagaaaggcatatctgatgtcaggaggactttctgtttgtttgtcacctttgacctcttattcgtaacattactgtggataatagagttaaatgtgaatggaggcattgagaacacattagagaaggaggtgatgcagtatgactactattcttcatattttgatatatttcttctggcagtttttcgatttaaagtgttaatacttgcatatgctgtgtgcagactgcgccattggtgggcaatagcg

SEQ ID NO: 16699 - protein, 126 aa, Homo sapiens
MNHLPEDMENALTGSQSSHASLRNIHSINPTQLMARIESYEGREKKGISDVRRTFCLFVTFDLLFVTLLWIIELNVNGGIENTLEKEVMQYDYYSSYFDIFLLAVFRFKVLILAYAVCRLRHWWAI

SEQ ID NO: 16700 - DNA, 3096 bp, Homo sapiens
aagcagaagccacacgtcccggcgacctaagttctggatcagccggccggaggacccgtgttagcatttacaatccgaggtgagctgaagcctccggttgtcccggttcgacgctctagccctgcgagcagccgacgccggaagtctctactgctccccgctggcgcgcaggaccgcgggcatttacccgtgctttcccaagcctggaagaactcgtcatgctctttgtagcgtggtgcttctgttgctcacaggatgtttgccacacgagtcactcgagagaatctctgagtcctggcgagggctttctgaggcttcgtgtgttagcagctgttgtcttccaactcagcggcaggacaacttgcctttgatgattttcaagagagttgtgctatgatgtggcaaaagtatgcaggaagcaggcggtcaatgcctctgggagcaaggatccttttccacggtgtgttctatgccgggggctttgccattgtgtattacctcattcaaaagtttcattccagggctttatattacaagttggcagtggagcagctgcagagccatcccgaggcacaggaagctctgggccctcctctcaacatccattatctcaagctcatcgacagggaaaacttcgtggacattgttgatgccaagttgaagattcctgtctctggatccaaatcagagggccttctctacgtccactcatccagaggtggcccctttcagaggtggcaccttgacgaggtctttttagagctcaaggatggtcagcagattcctgtgttcaagctcagtggggaaaacggtgatgaagtgaaaaaggagtagagacgacccagaagacccagcttgcttctagtccatccttccctcatctctaccatatggccactggggtggtggcccatctcagtgacagacactcctgcaacccagttttccagccaccagtgggatgatgtggtctggaactgaaagtgatgcgtatttctgagttatgcctgtatttaagaagctgagtgaaacccaaagaagtccatgataggacagacttctgaaaactaaagacagaaaaaagcttgaaagcatcaagaaagaagtgaaatcttagctagagggaaaagtaactcagatgacagtggatttctctctggaaaccatggaggccagaaggaagtgagacaagttcttttagtgccagaagaactatcaacttgtggctgggcacggtggctcacacctgtaatcccagcactttgggagaccaaggtgggcagatcacttgaagtcaggagtttgagaccagcctggccaacatggcaaaaccctgtctctactaaaaatacaaaaattagccaggcatggtggcacatgcctgtaatctcagctacttgggaggctgaggcacgagaattacttgaacccgggaggtggaggttgcagtgagccaagatcctgccactgcactccagcctgggcaacagagcaagactgcctcaaaacaaaactctgtcaactccaaattcctatttggtgaaatgatccttcaggattgatgggttgcacctggacttgatatgaaagtaaccatcagaaaatcaacagagatcttaaacttgcctaccacagacacctgcaggaatatactaagaatcatcatagtggacctttattgtctcctgagcacccattctttgttctttcagaaacacaactggttttgagaatccatcccttcttcactcagtccacgtaaaggttaggatggtagaaagtgttatacctcttcctccagagttggagcctatgacactgatgacactggcatggaaagccaaagccctacaccaaccagcacacttactggttccaaattgatctacgctggtgtaatcagagtgaatctcagaactttggacagagctgtgagcagagactgactttcctgctgtctccaggtagctgcaaggctgaacagcagcacctactttattaccatcttactgtcattcaaagaaggcagagctgaatgctggagaaaaactgagtactagcaacagtttttgaaccctgaatactgtcataactgaagctagaattatccctggacttgtttgccactaaaatttccttgttttgcttaccctggtttcagctggcaccctgatcacttgaaaggaacataactgatatactgtcctttgtttttctttccttcctcttctccgcctttgatgattttaaattagaaatctacctgcctctaatctctttaattttctcatttatttactgctgcctattttccaaaacactgcttctcgaatattcctggctcaaaaatcatctatgtcttcatgacatatgaaacccctagaatccagcctttccccagcttttaatatctcctaattgatttctcaattccagtgaaatgattccatttatttttttcccaaacacatcacaaatattcctaactcttgtgagcaattttctctcattcttctcaacttatctaaatcctaacttttcaaaagatctagctcaagttctgtcttatcatattttgagttcctttctttggcattgtattattttgtatctttccatgtacacatgtgtgcattatctccctgataaaactaactggctagaggataggagtaaagactcaattctaatatccttgttacctaataatacacaaacgtgaaacatgtttgaataaatcactgttaaatattttatgtcttgaatgtcattctttagcaatctcaaaattgtaatttgaatcttaccttcaaatcaagatgaactacatcacgagtgtgtaaaaagtgaacaccttctaaaatctgtcgcataagtctttgaacatctttttctttaaaggcttcttctctgtctgcaacacactggtcaaagatttcacccccagcagcactagagaagggcaaaattaaagtaatatataactcataagaaatggcgaacacttacaccaaaactacagagtaaattaattacagtctggcagtaactgtataccttttttaaaaaatgtatttttattttgaaaaatagaga

SEQ ID NO: 16701 - protein, 146 aa, Homo sapiens; identical to SEQ ID NO: 1938

SEQ ID NO: 16702 - DNA, 2285 bp, Homo sapiens
cgaaacccttcccggcgcgagtccgagcgtctgagaagcagaagccacacgtcccggcgacctaagttctggatcagccggccggaggacccgtgttagcatttacaatccgaggtgagctgaagcctccggttgtcccggttcgacgctctagccctgcgagcagccgacgccggaagtctctactgctccccgctggcgcgcaggaccgcgggcatttacccgtgctttcccaagcctggaagaactcgtcatgctctttgtagcgtggtgcttctgttgctcacaggacaacttgcctttgatgattttcaagagagttgtgctatgatgtggcaaaagtatgcaggaagcaggcggtcaatgcctctgggagcaaggatccttttccacggtgtgttctatgccgggggctttgccattgtgtattacctcattcaaaagtttcattccagggctttatattacaagttggcagtggagcagctgcagagccatcccgaggcacaggaagctctgggccctcctctcaacatccattatctcaagctcatcgacagggaaaacttcgtggacattgttgatgccaagttgaagattcctgtctctggatccaaatcagagggccttctctacgtccactcatccagaggtggcccctttcagaggtggcaccttgacgaggtctttttagagctcaaggatggtcagcagattcctgtgttcaagctcagtggggaaaacggtgatgaagtgaaaaaggagtagagacgacccagaagacccagcttgcttctagtccatccttccctcatctctaccatatggccactggggtggtggcccatctcagtgacagacactcctgcaacccagttttccagccaccagtgggatgatgaaacacaactggttttgagaatccatcccttcttcactcagtccacgtaaaggttaggatggtagaaagtgttatacctcttcctccagagttggagcctatgacactgatgacactggcatggaaagccaaagccctacaccaaccagcacacttactggttccaaattgatctacgctggtgtaatcagagtgaatctcagaactttggacagagctgtgagcagagactgactttcctgctgtctccaggtagctgcaaggctgaacagcagcacctactttattaccatcttactgtcattcaaagaaggcagagctgaatgctggagaaaaactgagtactagcaacagtttttgaaccctgaatactgtcataactgaagctagaattatccctggacttgtttgccactaaaatttccttgttttgcttaccctggtttcagctggcaccctgatcacttgaaaggaacataactgatatactgtcctttgtttttctttccttcctcttctccgcctttgatgattttaaattagaaatctacctgcctctaatctctttaattttctcatttatttactgctgcctattttccaaaacactgcttctcgaatattcctggctcaaaaatcatctatgtcttcatgacatatgaaacccctagaatccagcctttccccagcttttaatatctcctaattgatttctcaattccagtgaaatgattccatttatttttttcccaaacacatcacaaatattcctaactcttgtgagcaattttctctcattcttctcaacttatctaaatcctaacttttcaaaagatctagctcaagttctgtcttatcatattttgagttcctttctttggcattgtattattttgtatctttccatgtacacatgtgtgcattatctccctgataaaactaactggctagaggataggagtaaagactcaattctaatatccttgttacctaataatacacaaacgtgaaacatgtttgaataaatcactgttaaatattttatgtcttgaatgtcattctttagcaatctcaaaattgtaatttgaatcttaccttcaaatcaagatgaactacatcacgagtgtgtaaaaagtgaacaccttctaaaatctgtcgcataagtctttgaacatctttttctttaaaggcttcttctctgtctgcaacacactggtcaaagatttcacccccagcagcactagagaagggcaaaattaaagtaatatataactcataagaaatggcgaacacttacaccaaaactacagagtaaattaattacagtctggcagtaactgtataccttttttaaaaaatgtatttttattttgaaaaatagaga

SEQ ID NO: 16703 - protein, 146 aa, Homo sapiens; identical to SEQ ID NO: 1938

SEQ ID NO: 16704 - DNA, 2431 bp, Homo sapiens
cgaaacccttcccggcgcgagtccgagcgtctgagaagcagaagccacacgtcccggcgacctaagttctggatcagccggccggaggacccgtgttagcatttacaatccgaggtgagctgaagcctccggttgtcccggttcgacgctctagccctgcgagcagccgacgccggaagtctctactgctccccgctggcgcgcaggaccgcgggcatttacccgtgctttcccaagcctggaagaactcgtcatgctctttgtagcgtggtgcttctgttgctcacaggacaacttgcctttgatgattttcaagagagttgtgctatgatgtggcaaaagtatgcaggaagcaggcggtcaatgcctctgggagcaaggatccttttccacggtgtgttctatgccgggggctttgccattgtgtattacctcattcaaaagtttcattccagggctttatattacaagttggcagtggagcagctgcagagccatcccgaggcacaggaagctctgggccctcctctcaacatccattatctcaagctcatcgacagggaaaacttcgtggacattgttgatgccaagttgaagattcctgtctctggatccaaatcagagggccttctctacgtccactcatccagaggtggcccctttcagaggtggcaccttgacgaggtctttttagagctcaaggatggtcagcagattcctgtgttcaagctcagtggggaaaacggtgatgaagtgaaaaaggagtagagacgacccagaagacccagcttgcttctagtccatccttccctcatctctaccatatggccactggggtggtggcccatctcagtgacagacactcctgcaacccagttttccagccaccagtgggatgatgttgcacctggacttgatatgaaagtaaccatcagaaaatcaacagagatcttaaacttgcctaccacagacacctgcaggaatatactaagaatcatcatagtggacctttattgtctcctgagcacccattctttgttctttcagaaacacaactggttttgagaatccatcccttcttcactcagtccacgtaaaggttaggatggtagaaagtgttatacctcttcctccagagttggagcctatgacactgatgacactggcatggaaagccaaagccctacaccaaccagcacacttactggttccaaattgatctacgctggtgtaatcagagtgaatctcagaactttggacagagctgtgagcagagactgactttcctgctgtctccaggtagctgcaaggctgaacagcagcacctactttattaccatcttactgtcattcaaagaaggcagagctgaatgctggagaaaaactgagtactagcaacagtttttgaaccctgaatactgtcataactgaagctagaattatccctggacttgtttgccactaaaatttccttgttttgcttaccctggtttcagctggcaccctgatcacttgaaaggaacataactgatatactgtcctttgtttttctttccttcctcttctccgcctttgatgattttaaattagaaatctacctgcctctaatctctttaattttctcatttatttactgctgcctattttccaaaacactgcttctcgaatattcctggctcaaaaatcatctatgtcttcatgacatatgaaacccctagaatccagcctttccccagcttttaatatctcctaattgatttctcaattccagtgaaatgattccatttatttttttcccaaacacatcacaaatattcctaactcttgtgagcaattttctctcattcttctcaacttatctaaatcctaacttttcaaaagatctagctcaagttctgtcttatcatattttgagttcctttctttggcattgtattattttgtatctttccatgtacacatgtgtgcattatctccctgataaaactaactggctagaggataggagtaaagactcaattctaatatccttgttacctaataatacacaaacgtgaaacatgtttgaataaatcactgttaaatattttatgtcttgaatgtcattctttagcaatctcaaaattgtaatttgaatcttaccttcaaatcaagatgaactacatcacgagtgtgtaaaaagtgaacaccttctaaaatctgtcgcataagtctttgaacatctttttctttaaaggcttcttctctgtctgcaacacactggtcaaagatttcacccccagcagcactagagaagggcaaaattaaagtaatatataactcataagaaatggcgaacacttacaccaaaactacagagtaaattaattacagtctggcagtaactgtataccttttttaaaaaatgtatttttattttgaaaaatagaga

SEQ ID NO: 16705 - protein, 146 aa, Homo sapiens; identical to SEQ ID NO: 1938

SEQ ID NO: 16706 - DNA, 2831 bp, Homo sapiens
aagcagaagccacacgtcccggcgacctaagttctggatcagccggccggaggacccgtgttagcatttacaatccgaggtgagctgaagcctccggttgtcccggttcgacgctctagccctgcgagcagccgacgccggaagtctctactgctccccgctggcgcgcaggaccgcgggcatttacccgtgctttcccaagcctggaagaactcgtcatgctctttgtagcgtggtgcttctgttgctcacagaggtgcctgcttccccttctgccatgattggaagtttcctgaggcctccccagccatgtggaactgacaacttgcctttgatgattttcaagagagttgtgctatgatgtggcaaaagtatgcaggaagcaggcggtcaatgcctctgggagcaaggatccttttccacggtgtgttctatgccgggggctttgccattgtgtattacctcattcaaaagtttcattccagggctttatattacaagttggcagtggagcagctgcagagccatcccgaggcacaggaagctctgggccctcctctcaacatccattatctcaagctcatcgacagggaaaacttcgtggacattgttgatgccaagttgaagattcctgtctctggatccaaatcagagggccttctctacgtccactcatccagaggtggcccctttcagaggtggcaccttgacgaggtctttttagagctcaaggatggtcagcagattcctgtgttcaagctcagtggggaaaacggtgatgaagtgaaaaaggagtagagacgacccagaagacccagcttgcttctagtccatccttccctcatctctaccatatggccactggggtggtggcccatctcagtgacagacactcctgcaacccagttttccagccaccagtgggatgatggcctccctattccctgagacacaacagtattgaaattgggccaattaataaccccacagtggcctctcactaaatgtgagaggtgaggaagctgcaggagaaaatttgaagctagcagtgttcatgagatgtaagtaaagaagccatctccataaaagtacaacgtgacgcagcaagtgctgatggagaagctgtagaagttacacagaagatctagcttggaccatcgatgaaagtggctacactaaacaacagattttaaatgtagataaaacagcattttattggaaaaagatgccatctaggactttcatagttagaaaaactcaatgcctggcttcaaaggacaagctgactcttgtcaggggctagtgcagctgtgactttcagttaaagccaatgctcattgactattctgaaaatcccagggcccttaagatatgctgtataaacgcaacaacaaagcctggatgacgttgggtctgtttacagcctggtctactgagtaagcccactgttgagacctagtgctcagaaaaaatagatttctttcaaaatatggctgggtgcagtggctcacaccggtaatcccagcactttgggaggctggggcgggtggattgcttgatgccaggagttcaagaccagcctgggcaacatggtgaaaccctgtctcaaaaaacaaatccaaaaaaccaaaatattgctactcattaacaatgcacctggttacccaagagctctgatggagatgtacaaggagatgaatactgttttcatgcctgctaacacagtatccattctgctgctgatagatcaagaagtacttttgactttcaaaacttgttatttaagaaatacattttgtggtttctctgatggttctgggcagtcagttcaaaaccttctggaaaggattcaccattctagatgccatcaagagcattcaattcacgggaggaggtcaaaatatcaacattaattggaatttggaagaaatagattccaatcctcatggaggacttggagggtttcaagacttcagaggaggaaggaactgtagatgggctgaaaatagcaagagaactagaagtggaggggcctagagatgtgaccgaattgctgtaacctcaggatcaaacttgtatggatgagaagttccttctcatggacgagcaaagaagtggtctggaactgaaagtgatgcgtatttctgagttatgcctgtatttaagaagctgagtgaaacccaaagaagtccatgataggacagacttctgaaaactaaagacagaaaaaagcttgaaagcatcaagaaagaagtgaaatcttagctagagggaaaagtaactcagatgacagtggatttctctctggaaaccatggaggccagaaggaagtgagacaagttcttttagtgccagaagaactatcaacttgtggctgggcacggtggctcacacctgtaatcccagcactttgggagaccaaggtgggcagatcacttgaagtcaggagtttgagaccagcctggccaacatggcaaaaccctgtctctactaaaaatacaaaaattagccaggcatggtggcacatgcctgtaatctcagctacttgggaggctgaggcacgagaattacttgaacccgggaggtggaggttgcagtgagccaagatcctgccactgcactccagcctgggcaacagagcaagactgcctcaaaacaaaactctgtcaactccaaattcctatttggtgaaatgatccttcaggattgatggggtaataaaaacattctcggttgatagaaaactaaaagaatttgttgaatgagtctaccctatagaccttgaaaagaccaaccctaaaggaagttcttgaaccagaaaggaaacattt

SEQ ID NO: 16707 - protein, 146 aa, Homo sapiens; identical to SEQ ID NO: 1938

SEQ ID NO: 16708 - DNA, 3188 bp, Homo sapiens
aagcagaagccacacgtcccggcgacctaagttctggatcagccggccggaggacccgtgttagcatttacaatccgaggtgagctgaagcctccggttgtcccggttcgacgctctagccctgcgagcagccgacgccggaagtctctactgctccccgctggcgcgcaggaccgcgggcatttacccgtgctttcccaagcctggaagaactcgtcatgctctttgtagcgtggtgcttctgttgctcacagaggtgcctgcttccccttctgccatgattggaagtttcctgaggcctccccagccatgtggaactgacaacttgcctttgatgattttcaagagagttgtgctatgatgtggcaaaagtatgcaggaagcaggcggtcaatgcctctgggagcaaggatccttttccacggtgtgttctatgccgggggctttgccattgtgtattacctcattcaaaagtttcattccagggctttatattacaagttggcagtggagcagctgcagagccatcccgaggcacaggaagctctgggccctcctctcaacatccattatctcaagctcatcgacagggaaaacttcgtggacattgttgatgccaagttgaagattcctgtctctggatccaaatcagagggccttctctacgtccactcatccagaggtggcccctttcagaggtggcaccttgacgaggtctttttagagctcaaggatggtcagcagattcctgtgttcaagctcagtggggaaaacggtgatgaagtgaaaaaggagtagagacgacccagaagacccagcttgcttctagtccatccttccctcatctctaccatatggccactggggtggtggcccatctcagtgacagacactcctgcaacccagttttccagccaccagtgggatgatggcctccctattccctgagacacaacagtattgaaattgggccaattaataaccccacagtggcctctcactaaatgtgagaggtgaggaagctgcaggagaaaatttgaagctagcagtgttcatgagatgtaagtaaagaagccatctccataaaagtacaacgtgacgcagcaagtgctgatggagaagctgtagaagttacacagaagatctagcttggaccatcgatgaaagtggctacactaaacaacagattttaaatgtagataaaacagcattttattggaaaaagatgccatctaggactttcatagttagaaaaactcaatgcctggcttcaaaggacaagctgactcttgtcaggggctagtgcagctgtgactttcagttaaagccaatgctcattgactattctgaaaatcccagggcccttaagatatgctgtataaacgcaacaacaaagcctggatgacgttgggtctgtttacagcctggtctactgagtaagcccactgttgagacctagtgctcagaaaaaatagatttctttcaaaatatggctgggtgcagtggctcacaccggtaatcccagcactttgggaggctggggcgggtggattgcttgatgccaggagttcaagaccagcctgggcaacatggtgaaaccctgtctcaaaaaacaaatccaaaaaaccaaaatattgctactcattaacaatgcacctggttacccaagagctctgatggagatgtacaaggagatgaatactgttttcatgcctgctaacacagtatccattctgctgctgatagatcaagaagtacttttgactttcaaaacttgttatttaagaaatacattttgtggtttctctgatggttctgggcagtcagttcaaaaccttctggaaaggattcaccattctagatgccatcaagagcattcaattcacgggaggaggtcaaaatatcaacattaattggaatttggaagaaatagattccaatcctcatggaggacttggagggtttcaagacttcagaggaggaaggaactgtagatgggctgaaaatagcaagagaactagaagtggaggggcctagagatgtgaccgaattgctgtaacctcaggatcaaacttgtatggatgagaagttccttctcatggacgagcaaagaaggtgatttcttgaaatggaatctactcctggtgaagatgctatgaacattgttgaaatgacaaaagatttagaatattccataaacttagctgtggccagggtttgagaggattgactcctaattttgaagttctactgtgggtaaatgctgtcaaacagcattgcatgccacagaggaatctctcatgaaagagttaataaatgcagcaaacttcactgttgtcttactttaagaaactgccacagtcactgcaggcttcagcaacttatcttttcctaccctcctctcgcatttaaaagtacttttaaattaatgtatgtacattatttttaggcataacactgctgctcatttaaaaaaactacagtatgaaccatgttatatgcagtggaaaggcaaaaaattcatgtgacttacttgcttgtatttggtttattgcagtggtctggaactgaaagtgatgcgtatttctgagttatgcctgtatttaagaagctgagtgaaacccaaagaagtccatgataggacagacttctgaaaactaaagacagaaaaaagcttgaaagcatcaagaaagaagtgaaatcttagctagagggaaaagtaactcagatgacagtggatttctctctggaaaccatggaggccagaaggaagtgagacaagttcttttagtgccagaagaactatcaacttgtggctgggcacggtggctcacacctgtaatcccagcactttgggagaccaaggtgggcagatcacttgaagtcaggagtttgagaccagcctggccaacatggcaaaaccctgtctctactaaaaatacaaaaattagccaggcatggtggcacatgcctgtaatctcagctacttgggaggctgaggcacgagaattacttgaacccgggaggtggaggttgcagtgagccaagatcctgccactgcactccagcctgggcaacagagcaagactgcctcaaaacaaaactctgtcaactccaaattcctatttggtgaaatgatccttcaggattgatggggtaataaaaacattctcggttgatagaaaact

SEQ ID NO: 16709 - protein, 146 aa, Homo sapiens; identical to SEQ ID NO: 1938

SEQ ID NO: 16710 - DNA, 1970 bp, Homo sapiens
attcggttttaaaagaaggtggatttgtgtagattggtaatgcccagggactggctacggggagccatctttaggagagagatgtggccacactggtgtgcagtggtgagagcatgaaccagaggtgtggcctggagaagcaaaagacggatgtgaagccatcgtggcatccaagtgacagaacttggtaacagtcatgtatcaggagcgggtgggtcagaggtgatggtccagtgtccagcatggacgtgagtggaaggacggcagcgacactgcgtgagagaggacatcctggaggaggagcacagggaagggctgggcatgtgtggagtgctcactctgtgccaggccaccggattgctcccatggtgtggcggagcctgtctgttgcttccttgcctttggtcacttggctagaccccagcaatcctgagaacttggaaaagccactgggtaggtctggctgttgcgtttctctcagcacagagcccagctgtagcactgaggaattgtgtgccaaaggcgcctttgctggggctggttgatgcagcatccatgatctggtgctccaggaaccccagtgagagtagggtaaggccatggtggttttggtgggagctttgtcctgtccagctttcactttggccccagtggtgctgagagggcgccttcctgggcttccccacatccctggggccttggccatgctgtgactatgttggttgtggtgctaggttctggcttctactgcggccaaatgctgtgactctgcagtgacaggagttcagagtctgctgcatcatggccacctggagcctcagtgcacgccttccaatttgtggactatttttgacattctgtcagggtcctttctttataatcagcggtttgtgaggatgcctgtatacagcatatgccctcttatcccaaattcctttatttgcaatttttacagtttttccagaggtgagatgtttcagttgttcatgaagtaattgtcatacattgggattttttcccaagtatgtgtgtgagatagtcaccagtgaccaacactttgctttaccagaactcctgctttaatctttggcaaggtctggctggtgaaggaaccaacctgtaaagtgtcacatctacccatggaagcacagctgcccacagttcagacattggcccctcagagtttgctcttcttcagaatccttcttgcttctgcccatttctttctccttcctttttaaatttttttttaaagcatccagagatgctcagtgtatactctgttgcttaattctataatttccagagaaaagctgtagcttgactcaaacagtgggaccctgaaaatttgttcttttttaaaattttttcttgagatggaaccttgctctgttacccaggctggagtacagtggtgtgatcttggcacactgcagcctccacctcccaggttcaagcgattctcctgcctcactctcctgagtagctgggactataggtgtgcgccaccatgcccggctaagtgtttgtatttctagtagagatggggttttgccatattgcccagctgatctcgaactcctggcctcaagtgatccacctgcctcagcctcccaaagtgctgggattacaggcggaagccaccatacccggccaaagatttgttcttgaagttcaggagtttgagaccagcctggccaacatggcaaaaccctgtctctactaaaaatacaaaaattagccaggcatggtggcacatgcctgtaatctcagctacttgggaggctgaggcacgagaattacttgaacccgggaggtggaggttgcagtgagccaagatcctgccactgcactccagcctgggcaacagagcaagactgcctcaaaacaaaactctgtcaactccaaattcctatttggtgaaatgatccttcaggattgatggggtaataaaaacattctcggttgat

SEQ ID NO: 16711 - protein, 60 aa, Homo sapiens
MGFCHIAQLISNSWPQVIHLPQPPKVLGLQAEATIPGQRFVLEVQEFETSLANMAKPCLY

SEQ ID NO: 16712 - DNA, 2928 bp, Homo sapiens
acaggggcaggacatgagagggatgggtgcacttttgggtcagggttcagctttctggtgtgacagcctttctcccttaggaggctgctaagtcggtgagacctgggcactgcagccgactgcctgggttgaatggttgaatctcggctccagctcttgaccagctatgtggccttatgggggagtccgtcacctttctgggcattagttaccttattggtgtgatgtgtggtaatgttagtgcttgtgtatgaggtgagaattgaatctcacaacacaagagctgttgaacattgtgagatgtgtggaatattgagaacagtgcctagccatagaaatcactcaataaagattagctgtctggaccctgcttctgtcccttcttttcctatcatagctggcaccgtgttcatgcctgtggtattccctgtatccctattcctgggaagcagcccaggagggggattcccttggcctctccagggtcaggtcacctttcccttcattagtgtgatgggaccttcagaagagaagcactttctgcggccaaactgaacaccctgcttgggaagcctgcctctgctccctcctttgggcagctgattattagaacttacagcttcagggaggtgcttcccggagttcccaggtagcctgtgggctcagaaggattcctgagactgagagcagtttgagttgaaatgttggcttaaatcttgatgaatgaacattttcatatcctgtttctaggcctgagggttttgttgttaatgttgtggtctttctattttatgtctcaacttagtggaacaggcagtgttgagaagtcaggtatcatggattctggcctcggctttgccatggaccagctgtgtcactttgaacaagtcatggaatcatagtaggactttagagcaaacttagagacttgagaggaaacttagagaagagctgaccaaacctcttaggtgtcaaaataaggcaatgagtgagggtagaaatgaggtgaagcagaaagggtctgcatgaggtcaaggcccaaggtcatctgcacatccctgcaaaacactgcctgcctgtgctttggtttttgagtctgtaaaatggacaatttagagtagatggccttaattattcgtccatccacagatttcacgtttctgtttctaccctgtacgtcagttggattatttaattttctgtgtagtagattctacctgaccaagttcaataaagaaaataagtgtgtctttcgtccttagagtttcattccagggctttatattacaagttggcagtggagcagctgcagagccatcccgaggcacaggaagctctgggccctcctctcaacatccattatctcaagctcatcgacagggaaaacttcgtggacattgttgatgccaagttgaagattcctgtctctggatccaaatcagagggccttctctacgtccactcatccagaggtggcccctttcagaggtggcaccttgacgaggtctttttagagctcaaggatggtcagcagattcctgtgttcaagctcagtggggaaaacggtgatgaagtgaaaaaggagtagagacgacccagaagacccagcttgcttctagtccatccttccctcatctctaccatatggccactggggtggtggcccatctcagtgacagacactcctgcaacccagttttccagccaccagtgggatgatggtatgtgccagcacatggtaattttggtgtaattctaacttgggcacaacaaatgctatttgtcatttttaaactgaatccgaaagaaactcctattataaatttaagataatgtaatgtatttgaaagtgctttgtataaaaaagcacatgataaaaggaatcagaattaataaaatgtttgttgatctttgctagttctcatttctttcctttctcttcctcttcctttcccctggaattttcagtcctcattacaaagcctgaagcttagtagcactgaagggattttttctaaattattgacctgagaatgatgaggaagaccactggtttttcactctaccttgaattcatgttgttaagtagcttgtggacattctctatcactttggaatattttgtttgctttgcttttatttatttctatttcagacaccaaccatctgcccagttgaagatttgcaaaataattgtttttattccaaacattttgaaagcttagaaaatttatatgtgtacatatacatataaagttaacttaggaaagttagtttgaagctaacagcatctggctgggtgtggtggcccatgcctgtaatcccagcaatttgggaggccaaggcaggcggatcacctgaggtcaggagtttgagaccagcctggccaacatggtgaaacctcgtctctactgaaaatacaaaaaattagccaggcgtggtggcgggcgcctgtaatcccagctacctgggaggctgaggtgggagaattgcttgaatccaggaggcagaggctgcagtgagccaagatttcatcactgcactccagcctgggcaacaagagcaaaactctgtctcagaaaaaaaaaaaaaaaaaaaaaaaaggaaagaaaaagaagggaaagggaaggaaaggaaaaagaaagctaataggttcttatccatctgctttccaaacaacttaaccgcatgttagataattgtatccttaggttttattagtcttataaggaaacatattataaagcaaaagaacttccttctgggcaccagagcctacaaaaacagaaatctggtatctgctttgaaaaggtcagtttaaccctcttagcattagcaggcttaatgccattgtggttgtctacaatgaaggacagccatgagctctcttcctacattcttaatattcattgaagagaagcctctcag

SEQ ID NO: 16713 - protein, 106 aa, Homo sapiens [sequence omitted]

SEQ ID NO: 16714 - DNA, 1644 bp, Homo sapiens
gatttgttcttgaagtgtgactaggtgactgcctattcacctgagttatggagccatgttccaaatcttgtgccttccttcaggtgtgtttggaaagcacaaatgtgtacctcagtagtttcttctcttggtggcaacttggaatgggtgggatactccccgccccaattccctcccctgcccctgccccgggaggtatctttggccatcaccgaggacacaggaaggcactctgggagatgcctgtctcatgatgggcttccttattaactgtgcctgtgtctccttcgcgaggctcataccttctttggttttcatgagaaaccaaaaatattgcattcactgttttttttctcaatcggagtgtgatcaactgcttacgggctctcaggctgactccctgagcatgggcatggcagcacctggcagcatccctgtggtacgagcccagcctgtggtgctggggatgaaggagaaactgagaactctgtgttgtctttctcagacaagccttcatgtattgtattttctttaaagcctgttctttagggtccaggtcaaaatatgtaccaatttcctggcaataggtccctctttaaaacagtgaattttttttggtattttattgtgaaaaatttcaaacgtacaaaaaagacaaaagaatttatactgtgagcacctatagctggtacctggattctacaattggattttgctctgtttccaggacagtttagcctgttctagaatttaacataaatacttgtatactcctcctgtgtaaagccctttggcttggtgtgtttttgatattcatcgatgttgctccgtgtatcaggagtttgctcctttttaacagtggacttttgagcgatcattggaagtacccagagcattgacataggagtcctccttgccaaatggaaagactgccattgaccttaccagccaaccaaagaggggcaggacatttggaaaatcaagtggattctccagctgggctgttagaaaagaactcacttctgtggagaatcactggattttataggcttagctctagaaagcatcattttgtcatcttctgaaatgacaataattatccaattacatctctcctttctgtcattttacacccacagttgaagattcctgtctctggatccaaatcagagggccttctctacgtccactcatccagaggtggcccctttcagaggtggcaccttgacgaggtctttttagagctcaaggatggtcagcagattcctgtgttcaagctcagtggggaaaacggtgatgaagtgaaaaaggagtagagacgacccagaagacccagcttgcttctagtccatccttccctcatctctaccatatggccactggggtggtggcccatctcagtgacagacactcctgcaacccagttttccagccaccagtgggatgatggtatgtgccagcacatggtaattttggtgtaattctaacttgggcacaacaaatgctatttgtcatttttaaactgaatccgaaagaaactcctattataaatttaagataatgtaatgtatttgaaagtgctttgtataaaaaagcacatgataaaaggaatcagaattaataaaatgtttgttgatctttgct

SEQ ID NO: 16715 - protein, 94 aa, Homo sapiens
MMGFLINCACVSFARLIPSLVFMRNQKYCIHCFFSQSECDQLLTGSQADSLSMGMAAPGSIPVVRAQPVVLGMKEKLRTLCCLSQTSLHVLYFL

SEQ ID NO: 16716 - DNA, 2708 bp, Homo sapiens
tgagcagataggaagccgtgtcaaatatgtggcaccttgaggaaatgcctagtgaatgacagtatgtcctattgtgctctaactttatttcagccttatttcttttctgaatattatttttcatttatcttcatttccttacctattttcttttcttctaaagtatgtatctttgttagctccatcatcctttttggaatgagcaagtataaaaataagtaaataaataagacccatcctaagtattttaagaaaccacccttttgcggcacacttgctaccttggtcttagctctgggctttggtgtcctctggcagtcctgctgcattgccttctctcccccatctgcccacccctgtcccagagagatttttctgtagcccctcatctgcagagtccgacagctcagggtcgagggtctttcttagcagtaatcacccactatgctctcacccctccatttctggacatgcttcctgtggcttctctcctgcgctttacacttcagcagttcttgtttctgctcactctgcctttgtttgtcatttcctggatttgaagctgttctgctcttttcacctttctcttctcaaggtaaacttcctctgtgaaacctccgctgatgccctgcagcaaggttgaccacttcctgagtgttacttcctctcttggtgcatatgtctggttgcactaaccaggctgctgctagcccaaaggcacctttgtgcaaattagaaaaagacaaccatccccatcccttcttcaagatactttatagtacttccaactgttggcaaactgtcttaataaagatacaaatctttgatttctctaatgtgcatggtgccctacaagggttgtgcagtgcatagccgtgcagttgcatgtgatagatctatgttataattatttgtttaattgtctgtattcccctcaggaccaaggaaaattccttatatcttgatactgtttttatattcttactgtctgaccagatcagaccctcagtaaccgtttgctaaacaaaagaaggaatgaaggtacaaatatgtatccaccttgtctggaaaaatagcaggaaaggcatgcctgccaaggacttttacactgaacagtaagaatatattttagctcagagacactgtttgttttcacatttcaatattgctttaattagatatcttaaagctcgtgtaccacagtggttgaaagagcagatgctggagccagactgcatgaatttgaatcccagttctaccacttattcacttattagtgcacctttgggcatgttacttaacctttctgtgcctcagtttactcatctgcaaaatgagcgtgatgataatagttcctacttcaaagggttgtgagaattaaatgaattatataaagtgcttagaatagtacaagacacataatagtcagagacagaagtattaggtattatcaatattgttaaagtccatgtataagtttactgtactattgtttctttttaactctgaagtgctgttttcactctgtcacgtacagcttttattgctagcatcttgcttctgcaggtccagcctcctgttgattggccctgtgtttgtgctgtggtcaaagcacttgctgtctgcggttctcccttgtgcacaccggttctttggttgctgtaacaaaaactacataggacacagacaggaaacccgcaggctttgttttttcttcctaatttggcagcagaagggggaaaaaccagggcctttcacagacaaggcttgttttagagtttaattttaacttcttgttcgtgttctaaagcttgggttggtaataaatcttggctgtatgagactagagagaactgggctttaaaaatatgattttaatgtaaaatcttttctaattgcaggacaacttgcctttgatgattttcaagagagttgtgctatgatgtggcaaaagtatgcaggaagcaggcggtcaatgcctctgggagcaaggatccttttccacggtgtgttctatgccgggggctttgccattgtgtattacctcattcaaaagtttcattccagggctttatattacaagttggcagtggagcagctgcagagccatcccgaggcacaggaagctctgggccctcctctcaacatccattatctcaagctcatcgacagggaaaacttcgtggacattgttgatgccaagttgaagattcctgtctctggatccaaatcagagggccttctctacgtccactcatccagaggtggcccctttcagaggtggcaccttgacgaggtctttttagagctcaaggatggtcagcagattcctgtgttcaagctcagtggggaaaacggtgatgaagtgaaaaaggagtagagacgacccagaagacccagcttgcttctagtccatccttccctcatctctaccatatggccactggggtggtggcccatctcagtgacagacactcctgcaacccagttttccagccaccagtgggatgatggtatgtgccagcacatggtaattttggtgtaattctaacttgggcacaacaaatgctatttgtcatttttaaactgaatccgaaagaaactcctattataaatttaagataatgtaatgtatttgaaagtgctttgtataaaaaagcacatgataaaaggaatcagaattaataaaatgtttgttgatctttgct

SEQ ID NO: 16717 - protein, 146 aa, Homo sapiens; identical to SEQ ID NO: 1938

SEQ ID NO: 16718 - DNA, 1162 bp, Homo sapiens
aagcagaagccacacgtcccggcgacctaagttctggatcagccggccggaggacccgtgttagcatttacaatccgaggtgagctgaagcctccggttgtcccggttcgacgctctagccctgcgagcagccgacgccggaagtctctactgctccccgctggcgcgcaggaccgcgggcatttacccgtgctttcccaagcctggaagaactcgtcatgctctttgtagcgtggtgcttctgttgctcacaggatgtttgccacacgagtcactcgagagaatctctgagtcctggcgagggctttctgaggcttcgtgtgttagcagctgttgtcttccaactcagcggcaggacaacttgcctttgatgattttcaagagagttgtgctatgatgtggcaaaagtatgcaggaagcaggcggtcaatgcctctgggagcaaggatccttttccacggtgtgttctatgccgggggctttgccattgtgtattacctcattcaaaagtttcattccagggctttatattacaagttggcagtggagcagctgcagagccatcccgaggcacaggaagctctgggccctcctctcaacatccattatctcaagctcatcgacagggaaaacttcgtggacattgttgatgccaagttgaagattcctgtctctggatccaaatcagagggccttctctacgtccactcatccagaggtggcccctttcagaggtggcaccttgacgaggtctttttagagctcaaggatggtcagcagattcctgtgttcaagctcagtggggaaaacggtgatgaagtgaaaaaggagtagagacgacccagaagacccagcttgcttctagtccatccttccctcatctctaccatatggccactggggtggtggcccatctcagtgacagacactcctgcaacccagttttccagccaccagtgggatgatggtatgtgccagcacatggtaattttggtgtaattctaacttgggcacaacaaatgctatttgtcatttttaaactgaatccgaaagaaactcctattataaatttaagataatgtaatgtatttgaaagtgctttgtataaaaaagcacatgataaaaggaatcagaattaataaaatgtttgttgatctttgct

SEQ ID NO: 16719 - protein, 146 aa, Homo sapiens; identical to SEQ ID NO: 1938

SEQ ID NO: 16720 - DNA, 1281 bp, Homo sapiens
aagcagaagccacacgtcccggcgacctaagttctggatcagccggccggaggacccgtgttagcatttacaatccgaggtgagctgaagcctccggttgtcccggttcgacgctctagccctgcgagcagccgacgccggaagtctctactgctccccgctggcgcgcaggaccgcgggcatttacccgtgctttcccaagcctggaagaactcgtcatgctctttgtagcgtggtgcttctgttgctcacaggatgtttgccacacgagtcactcgagagaatctctgagtcctggcgagggctttctgaggcttcgtgtgttagcagctgttgtcttccaactcagcggcaggtttgcctttccccacggacactctggaccttgtagctcctcaagcttccctgtctattgagcagataggaagccgtgtcaaatatgtggcaccttgaggaaatgcctagtgaatgacagacaacttgcctttgatgattttcaagagagttgtgctatgatgtggcaaaagtatgcaggaagcaggcggtcaatgcctctgggagcaaggatccttttccacggtgtgttctatgccgggggctttgccattgtgtattacctcattcaaaagtttcattccagggctttatattacaagttggcagtggagcagctgcagagccatcccgaggcacaggaagctctgggccctcctctcaacatccattatctcaagctcatcgacagggaaaacttcgtggacattgttgatgccaagttgaagattcctgtctctggatccaaatcagagggccttctctacgtccactcatccagaggtggcccctttcagaggtggcaccttgacgaggtctttttagagctcaaggatggtcagcagattcctgtgttcaagctcagtggggaaaacggtgatgaagtgaaaaaggagtagagacgacccagaagacccagcttgcttctagtccatccttccctcatctctaccatatggccactggggtggtggcccatctcagtgacagacactcctgcaacccagttttccagccaccagtgggatgatggtatgtgccagcacatggtaattttggtgtaattctaacttgggcacaacaaatgctatttgtcatttttaaactgaatccgaaagaaactcctattataaatttaagataatgtaatgtatttgaaagtgctttgtataaaaaagcacatgataaaaggaatcagaattaataaaatgtttgttgatctttgct

SEQ ID NO: 16721 - protein, 146 aa, Homo sapiens; identical to SEQ ID NO: 1938

SEQ ID NO: 16722 - DNA, 1096 bp, Homo sapiens
cgaaacccttcccggcgcgagtccgagcgtctgagaagcagaagccacacgtcccggcgacctaagttctggatcagccggccggaggacccgtgttagcatttacaatccgaggtgagctgaagcctccggttgtcccggttcgacgctctagccctgcgagcagccgacgccggaagtctctactgctccccgctggcgcgcaggaccgcgggcatttacccgtgctttcccaagcctggaagaactcgtcatgctctttgtagcgtggtgcttctgttgctcacaggacaacttgcctttgatgattttcaagagagttgtgctatgatgtggcaaaagtatgcaggaagcaggcggtcaatgcctctgggagcaaggatccttttccacggtgtgttctatgccgggggctttgccattgtgtattacctcattcaaaagtttcattccagggctttatattacaagttggcagtggagcagctgcagagccatcccgaggcacaggaagctctgggccctcctctcaacatccattatctcaagctcatcgacagggaaaacttcgtggacattgttgatgccaagttgaagattcctgtctctggatccaaatcagagggccttctctacgtccactcatccagaggtggcccctttcagaggtggcaccttgacgaggtctttttagagctcaaggatggtcagcagattcctgtgttcaagctcagtggggaaaacggtgatgaagtgaaaaaggagtagagacgacccagaagacccagcttgcttctagtccatccttccctcatctctaccatatggccactggggtggtggcccatctcagtgacagacactcctgcaacccagttttccagccaccagtgggatgatggtatgtgccagcacatggtaattttggtgtaattctaacttgggcacaacaaatgctatttgtcatttttaaactgaatccgaaagaaactcctattataaatttaagataatgtaatgtatttgaaagtgctttgtataaaaaagcacatgataaaaggaatcagaattaataaaatgtttgttgatctttgct

SEQ ID NO: 16723 - protein, 146 aa, Homo sapiens; identical to SEQ ID NO: 1938

SEQ ID NO: 16724 - DNA, 623 bp, Homo sapiens
aagcagaagccacacgtcccggcgacctaagttctggatcagccggccggaggacccgtgttagcatttacaatccgaggtgagctgaagcctccggttgtcccggttcgacgctctagccctgcgagcagccgacgccggaagtctctactgctccccgctggcgcgcaggaccgcgggcatttacccgtgctttcccaagcctggaagaactcgtcatgctctttgtagcgtggtgcttctgttgctcacagaggtgcctgcttccccttctgccatgattggaagtttcctgaggcctccccagccatgtggaactgacaacttgcctttgatgattttcaagagagttgtgctatgatgtggcaaaagtatgcaggaagcaggcggtcaatgcctctgggagcaaggatccttttccacggtgtgttctatgccgggggctttgccattgtgtattacctcattcaaaagtttcattccagggctttatattacaagttggcagtggagcagctgcagagccatcccgaggcacaggaagctctgggccctcctctcaacatccattatctcaagctcatcgacagggaaaacttcgtggacattgttgatgccaaggt

SEQ ID NO: 16725 - protein, 87 aa, Homo sapiens
MMWQKYAGSRRSMPLGARILFHGVFYAGGFAIVYYLIQKFHSRALYYKLAVEQLQSHPEAQEALGPPLNIHYLKLIDRENFVDIVDA

SEQ ID NO: 16726 - DNA, 722 bp, Homo sapiens
aagcagaagccacacgtcccggcgacctaagttctggatcagccggccggaggacccgtgttagcatttacaatccgaggtgagctgaagcctccggttgtcccggttcgacgctctagccctgcgagcagccgacgccggaagtctctactgctccccgctggcgcgcaggaccgcgggcatttacccgtgctttcccaagcctggaagaactcgtcatgctctttgtagcgtggtgcttctgttgctcacagaggtgcctgcttccccttctgccatgattggaagtttcctgaggcctccccagccatgtggaactgatgtttgccacacgagtcactcgagagaatctctgagtcctggcgagggctttctgaggcttcgtgtgttagcagctgttgtcttccaactcagcggcaggacaacttgcctttgatgattttcaagagagttgtgctatgatgtggcaaaagtatgcaggaagcaggcggtcaatgcctctgggagcaaggatccttttccacggtgtgttctatgccgggggctttgccattgtgtattacctcattcaaaagtttcattccagggctttatattacaagttggcagtggagcagctgcagagccatcccgaggcacaggaagctctgggccctcctctcaacatccattatctcaagctcatcgacagggaaaacttcgtggacattgttgatgccaag

SEQ ID NO: 16727 - protein, 87 aa, Homo sapiens; identical to SEQ ID NO: 16725

SEQ ID NO: 16728 - DNA, 1328 bp, Homo sapiens
aagcagaagccacacgtcccggcgacctaagttctggatcagccggccggaggacccgtgttagcatttacaatccgaggtgagctgaagcctccggttgtcccggttcgacgctctagccctgcgagcagccgacgccggaagtctctactgctccccgctggcgcgcaggaccgcgggcatttacccgtgctttcccaagcctggaagaactcgtcatgctctttgtagcgtggtgcttctgttgctcacaggatgtttgccacacgagtcactcgagagaatctctgagtcctggcgagggctttctgaggcttcgtgtgttagcagctgttgtcttccaactcagcggcaggacaacttgcctttgatgattttcaagagagttgtgctatgatgtggcaaaagtatgcaggaagcaggcggtcaatgcctctgggagcaaggatccttttccacggtgtgttctatgccgggggctttgccattgtgtattacctcattcaaagaggctgctaagtcggtgagacctgggcactgcagccgactgcctgggttgaatggttgaatctcggctccagctcttgaccagctatgtggccttatgggggagtccgtcacctttctgggcattagttaccttattggtgtgatgtgtggtaatgttagtgcttgtgtatgaggtgagaattgaatctcacaacacaagagctgttgaacattgtgagatgtgtggaatattgagaacagtgcctagccatagaaatcactcaataaagattagctgtctggaccctgcttctgtcccttcttttcctatcatagctggcaccgtgttcatgcctgtggtattccctgtatccctattcctgggaagcagcccaggagggggattcccttggcctctccagggtcaggtcacctttcccttcattagtgtgatgggaccttcagaagagaagcactttctgcggccaaactgaacaccctgcttgggaagcctgcctctgctccctcctttgggcagctgattattagaacttacagcttcagggaggtgcttcccggagttcccaggtagcctgtgggctcagaaggattcctgagactgagagcagtttgagttgaaatgttggcttaaatcttgatgaatgaacattttcatatcctgtttctaggcctgagggttttgttgttaatgttgtggtctttctattttatgtctcaacttagtggaacaggcagtgttgagaagtcaggtatcatggattctggcctcggctttgccatggaccagctgtgtcactttgaacaagtcatggaatcat

SEQ ID NO: 16729 - protein, 52 aa, Homo sapiens
MQEAGGQCLWEQGSFSTVCSMPGALPLCITSFKEAAKSVRPGHCSRLPGLNG

SEQ ID NO: 16730 - DNA, 720 bp, Homo sapiens
aagcagaagccacacgtcccggcgacctaagttctggatcagccggccggaggacccgtgttagcatttacaatccgaggtgagctgaagcctccggttgtcccggttcgacgctctagccctgcgagcagccgacgccggaagtctctactgctccccgctggcgcgcaggaccgcgggcatttacccgtgctttcccaagcctggaagaactcgtcatgctctttgtagcgtggtgcttctgttgctcacagaggtgcctgcttccccttctgccatgattggaagtttcctgaggcctccccagccatgtggaactgacaacttgcctttgatgattttcaagagagttgtgctatgatgtggcaaaagtatgcaggaagcaggcggtcaatgcctctgggagcaaggatccttttccacggtgtgttctatgccgggggctttgccattgtgtattacctcattcaaagtaagtatcctgctagccgcctgcggcctgacctcctcctagcctgctcctgctcctccatcagaggaaatacttgagatgctttgtttagattagagaaaggaggagagggtgattttaaaggctagtccaccatttcgttggctatagcttcctctgtatcctgtaatctcagtttttccaggagcaacgagtacaaataaaaggaccaggactaatatgcataagaagcccagcaaagcacgatg

SEQ ID NO: 16731 - protein, 63 aa, Homo sapiens
MMWQKYAGSRRSMPLGARILFHGVFYAGGFAIVYYLIQSKYPASRLRPDLLLACSCSSIRGNT

SEQ ID NO: 16732 - DNA, 591 bp, Homo sapiens
aagcagaagccacacgtcccggcgacctaagttctggatcagccggccggaggacccgtgttagcatttacaatccgaggtgagctgaagcctccggttgtcccggttcgacgctctagccctgcgagcagccgacgccggaagtctctactgctccccgctggcgcgcaggaccgcgggcatttacccgtgctttcccaagcctggaagaactcgtcatgctctttgtagcgtggtgcttctgttgctcacaggacaacttgcctttgatgattttcaagagagttgtgctatgatgtggcaaaagtatgcaggaagcaggcggtcaatgcctctgggagcaaggatccttttccacggtgtgttctatgccgggggctttgccattgtgtattacctcattcaaagtaagtatcctgctagccgcctgcggcctgacctcctcctagcctgctcctgctcctccatcagaggaaatacttgagatgctttgtttagattagagaaaggaggagagggtgattttaaaggctagtccaccatttcgttggctatagcttcctctgtatcctgtaatctcagtttttccag

SEQ ID NO: 16733 - protein, 63 aa, Homo sapiens; identical to SEQ ID NO: 16731

SEQ ID NO: 16734 - DNA, 557 bp, Homo sapiens
ttttcccctgcaaagtctgtatttcttccaagttgcttttttgttttgcttaattcccaccacccacctttgatgctggatgctttcctcaaataactggtaatccttgggtatttgcttatgattaagactgggggtctagagctaggtgcactggctcaggcctgtaattccagcactttgggagctaccaaatataaaggattatccacaactaacagtattacaggtaatcactgtcgagttctaaatttccttttctattagaacataactttccccacacaccgaatctgtactcaggtgtgcatttatccctagattcagtctgaggagttgaaaagtgacaaagggatggatggcttcctgactactatgaaaatgtcccctgacccacatatttcaatatagtattaagccttgttttcattacctgaaatgtatgtttgcttacaaacaggtttccttgaatctattctccccacctcctccaatcaaggagcaaagagaacaccagagaagctggagcacagtgaacaaggggaaactggcatgag

SEQ ID NO: 16735 - protein, 48 aa, Homo sapiens
MIKTGGLELGALAQACNSSTLGATKYKGLSTTNSITGNHCRVLNFLFY

SEQ ID NO: 16736 - DNA, 1246 bp, Homo sapiens
cccagggcacagaggccaggatctcacgcgcgaccgcacgaggccgggaccctccctccccttccgtccactcccttccccaccgcctccggtcccctcccggtctccgccaccccgcttcggggcccccgccccccagccgggcagccaatcggagctgggatcccgccccggtccgcaaagccggtggcgcccggaggctgcacggagagcggtgcccgcgtcagtgaccgaaggaagagaccaagatgaatgcagagcccgagaggaagtttggcgtggtggtggttggtgttggccgagccggctccgtgcggatgagggacttgcggaatccacacccttcctcagcgttcctgaacctgattggcttcgtgtcgagaagggagctcgggagcattgatggagtccagcagatttctttggaggatgctctttccagccaagaggtggaggtcgcctatatctgcagtgagagctccagccatgaggactacatcaggcagttccttaatgctggcaagcacgtccttgtggaataccccatgacactgtcattggcggccgctcaggaactgtgggagctggctgagcagaaaggaaaagtcttgcacgaggagcatgttgaactcttgatggaggaattcgctttcctgaaaaaagaagtggtggggaaagacctgctgaaagggtcgctcctcttcacagctggcccgttggaagaagagcggtttggcttccctgcattcagcggcatctctcgcctgacctggctggtctccctctttggggagctttctcttgtgtctgccactttggaagagcgaaaggaagatcagtatatgaaaatgacagtgtgtctggagacagagaagaaaagtccactgtcatggattgaagaaaaaggacctggtctaaaacgaaacagatatttaagcttccatttcaagtctgggtccttggagaatgtgccaaatgtaggagtgaataagaacatatttctgaaagatcaaaatatatttgtccagaaactcttgggccagttctctgagaaggaactggctgctgaaaagaaacgcatcctgcactgcctggggcttgcagaagaaatccagaaatattgctgttcaaggaagtaagaggaggaggtgatgtagcacttccaagatggcaccagcatttggttcttctcaagagttgaccattatctctattcttaaaattaaacatgttggggaaacaagaa

SEQ ID NO: 16737 - protein, 296 aa, Homo sapiens; identical to SEQ ID NO: 1940

SEQ ID NO: 16738 - DNA, 4907 bp, Homo sapiens
aatgagggtatttataaactacttaaattataaaaagaatgagacatcagacttacagttttggatactaatttttttcacttaacgttcattatgtgataggagttttccatcctattataccgctgtgcgatctgatcttgggcacgttaaccaacctcttgttgcctcgattttctcacctgtaaaagtgggggtaatcataatgcttacttagtaggatagccctgaagaataagtgacttagcgaacataaatagcttacaatagggttttcagcatgggaaggattcagtaaatgttagctgtcatcatcaccacctacaaaggaagcaatactgtgctgaaagtttttccatcattaatgtaatttctatagtacgattcccaagaagatattaaaattatggaaataaaggtattggtatattcctaattatttcctaaaagattgtattgataaatatgctcatccttcccttaacgggatgcattccagaaaaacaagtcaaatgttagacaaagtatcagaagggaaattctgtagccagagagctaaaaattacaatagggtctctaattatacttcaacttttttaggaataattctcagtgtgttttcccacatttcatatgtaatttttttttttttttttttttgagacagagcctcgccctgtcaccaggctggagtacagtggcgcgatctcggctcactgcaacttccacctgctgggttcaagcaattcttctgacctcaggtgatccacccgcctcggcctcccaaagtgctgggattataacaggcgtggcatgagtcaccgcgcccggccgatctttacttttttattctttgtaccccctgcctatccagttagcatgtgattaaagtcaaagatttgccactttgggccacatctattaattttcatctttgttataattgtatttagtttttgatctacactgcttattactcccagtcattttttctagaactgaaaatctggtaaaatactcaaaattgcactgacttctatgtagaggcgacactccatcagaaccgtgggctgacagggaatcccactgtgcaggagctgcgcgcattttcatttctgattctctttggcgtatccaggactctgatgacatgatcatatatttatcagtagtaacaggttgggccatttgttttttgtggtaaatcatatatttaagattttagaaataagttgatagccatgtattttggaatttgaaaaagacattgcattactcagcttcaaattaagctttaatcaaatagtgaaactttccattaatggacagtgtatacctttttgtgtatttaaaaaaaaaaacactgaatatagtgcctttgtgacaggggagcttagttcctgacaatgtcctcttgagtcttttttttttttttttgagatggagtctcactgtgtcgcccaggctggagtgcagtggcgccatcttggctcactgcaacctccgccccctgggttcaagtgattctcattcctcagcttcctaagtagctgggattacaggcacgcaccaccatgaccagctaatttttatacttttagtagagacagggttttgccatgttggctaggttggtctcgaactcctgacctcaagtaatccacccaccatggcctccccaaagtgctgggattacaggcgtgagccatttcacccggcctctcttccgtctttgagctgtgaggaaatagctacattacatgagctgctagatctgccttatggtcagaaatgaaggttgaactctcaggaacagtgacatatatacacactgatatttccaaagtacaatgccccaaattgatccacaaaggaattaaggtcatttgcaacaaaatcacagaatagtaacaaataaatagaagataaatatggccagggatgctgcaaactgatatactgccaagtttatcagttgggaatcccaacagtgaaaagcataaaaatgaaaggaattttaaggagactttttatagaagagtgggcaggattggaggagccaacaagtgatggtgaggcacacagggaagagcttcagtgggcaccatcccctctctggtttgaaggggtagggaggggaccagagctgggaggagggggctggaatactgctggaggagccactcccttccagacctgctgtggccatcacagaatgcagccactgccagagcagcagcctgaggaaccaggcagggggagcacaagtaccctagcctctctctttctgtttcttgcctgccgatctcctccactggctaaacccagctggatgctaagagtacagtcagcctgcctgctgaggagggaccaccagggaccaccatcagcaagggatccaatgtctttctgcctctgcagaatgaaggttggggcacggggggcgctctacttcttagggatattgtgggaataaaaggaaataggcaaaaaatgtttttgaaaaacaaagcacatactgcgcacccgtgggccactactgcttttgacccctggctctgtttcatgaagtaatgtcgtgtcattctctttttaggtgctacaggatttctttaggtttgttttctgtccaccatatttcaactcatgtgtgctgtttgttgtgctaaaacaaatatttgctgatgcctgagtgaatagttgaatattttatataagtcaaatttatacgtaatgatttttcttgtaacttagccgtttctcttttacaaactcagaaaacctcagactttgaaaaggccttgaagttcctcacctgaaatctgagaacttggagcgccttaaaaaatctaaaggaaaacaaaacagtgaaagaacatgatatagtcagtgtagagaataaaattatttatgtaattaatattgaggatgcagataacacgttgtgaaatcttgcttgtaaaaaatctcgatctgctgaagaaagatgttctctctagagatctttgaaagcataattattgagcttttaaaatgttagaaacaaaagttagacccacacatattctggcgtgtggaagatttgcattccttcccctgcccgccccgcccccgcacttgtgagttgtgcctgtgtacgcagttcctgtagcactcggctgggcagaaatcatctttcagcactaagggaacatagttatgatctggaccttctgggagtggtcagtgcccaagaacaggtatgggactccagaaagttctgctctcaaccctattttgaaatagagttacacattgttctacaattatttgagttaataagcagctcttttcaaacgtgattatgcccttccaagtttaaatacactagactttagtgaaagtaattgacctcatctcatttctctcctgttatattaagatcactttcagtaaaaggtagaagcttttgaagtggtgaggaggaggtagaggagggacatagagcagataggggctggaaagtggggtggggaagagagtggcttctctttggcagagtaccaaggaaaagccctatctgtacagaacctttgtgcctgggaacttgatggctgcaacctgagcctcaacctagtttgcttgcggagccagaagagaagctaaaaaccttcagttaaccaagccagacaccaagaaagttaaaccgaaagagaaccccccaccccccgcaaaaaaaagaagtaaagtgggttaaagtgatatgttagcacagaaagagaacataagggtcatctaagttcatctgccccctcttctatttcaaggtgcagaaactaaggcacaagggaccccgtgtcctgctcttgatcacatagctagtgggtgccaagccaggtctagaactctgttctctggggtcacaggctggctcttcatccctctagagagatagctcatctgtgtgcacctgagcccgttgtgtttcggagtcaaagcaaataaaggctcaaactccaagactgttttgcagaccggctgcagtagatacggggggaggagaaacctgctttaaattgcttcaagcaagttgtttctgcaaaggtgttgacttttttctttcaactttctagtgagtcactgcagcctgagctgttatttgtcattatgcaataattcaggaactaactcaagattcttctttttaaattatttgtttatttagagacagagtcttgctctgttgcccaagctggagtgcagtggtgtgatctcggctcactgcaacctctgcctcctgggttcaagcaattctcatgtctcagcctcccgaatagctggtattacaggctcgtgccaccaccccctgctaatttttgtaattttagtagagacacggtttcaccatgttggccaggctcgtcttgaactcctggcctcaagtgatccgcccgcctcggcctcccaaagtgctaggattacagccgtgagcctccacacccggcctatttatttatttttaaattggctgctcttagaaaggcataccatgtttctggatgggaaggcttattaattcaccctaatttaatgtataaatttgatgcaatcatagtcacagtcccagtggaattttttaacttggtaagatgttctaaaattaatgagagaacttgaattaccaggtattgaaacactgtaaagccacaatcatgtaaacagtatgttataaccatgggaatagaggtctgtgatacagcagaaaaaagtgaaaaaaagaataactgtattcataaaaatttaaatgtggagtcactgggggaaaggattaaatattcgataatgtagaaacaactcaactatttggagaaatgtaaatttagagccttatctcatgccatataccaaaatactatttagatttgatt

SEQ ID NO: 16739 - protein, 156 aa, Homo sapiens [sequence omitted]

SEQ ID NO: 16740 - DNA, 926 bp, Homo sapiens
ccgaaggaagagaccaagatgaatgcagagcccgagaggaagtttggcgtggtggtggttggtgttggccgagccggctccgtgcggatgagggacttgcggaatccacacccttcctcagcgttcctgaacctgattggcttcgtgtcgagaagggagctcgggagcattgatggagtccagcagatttctttggaggatgctctttccagccaagaggtggaggtcgcctatatctgcagtgagagctccagccatgaggactacatcaggtgggttttccacacaggcagtccttgccttacacagcagtgcagtactgcaaaaatgagcaagcaagctaaaacaccctgcaaaggagtcagaagagccagtgagaaaattacaattgctctgtgaccaatcacagaagtgtcaaaacattaagaaattcttattgctggttataaatatataaggaagtgaaaaatagtaaaattaatatttagtatgtgtaatttgaaacattagaaacattcagaattaaagtgttttatttctctgtaaaaacccatcgagagtagttttcaacagtagtggcctccttcttctcaccagacagtttaggatgtggagccggcatccttggcaaattatcatactcccttctcagtttggatcagcttccaacgttttctcctttgtgctttcaatgtcataaaataacggttgagttcctttaaccctcaggacctggcagctaacagggaagtgccagctgccttcctcagtctagcttccttctaggttcttacagctgctcccaccatgctgtttcccacgggtaagatgcttcctctttatcagtctagctctagagtagacaaaaacacctctccttggctttccttaaccttttctggcaccagagtgtatttccttaagaa

SEQ ID NO: 16741 - protein, 126 aa, Homo sapiens
MNAEPERKFGVVVVGVGRAGSVRMRDLRNPHPSSAFLNLIGFVSRRELGSIDGVQQISLEDALSSQEVEVAYICSESSSHEDYIRWVFHTGSPCLTQQCSTAKMSKQAKTPCKGVRRASEKITIAL

SEQ ID NO: 16742 - DNA, 403 bp, Homo sapiens
ggggacaccgcctcactttgagacaacttgaggctgcgtcagtgaccttgtactgttgttatacaattcaatattgaagcgagagattctccagaacttgcccagaagccaagacgtctggaaaggatctcagcctctgtcagcctgcagcttgggaagagtgattcacagagcctgactgtccactgctgctaaaccatacactggccttggctcacacatctgactgaactgtctcctatgactaactgcctctctttcttcagccttgcaagtttcctgggagtcctgggagtggacttcacatataaaaggggactctgggagacctagttcctggcttctcttctggaagtcagggaagagtataggaaggagtggccacagtgcccaactgacaatt

SEQ ID NO: 16743 - protein, 30 aa, Homo sapiens
MTNCLSFFSLASFLGVLGVDFTYKRGLWET

SEQ ID NO: 16744 - DNA, 1536 bp, Homo sapiens
agcccgagaggaagtttggcgtggtggtggttggtgttggccgagccggctccgtgcggatgagggacttgcggaatccacacccttcctcagcgttcctgaacctgattggcttcgtgtcgaggtggctcacaatgtctttgtgcttcataattcatggaaagcccagtgaggcggattagctgcaggacatggagattttccagacccagggcagggagagccatctcccaactgagaactgtgcttagggtcagccccataagatctcaggttgggatgggtctgggaactgaagcttgctgggcctgcagctgggatgcacagtaggttggcctgggagactggaagacagaggcaggagggtgagctcaaggctgacagttagagaaggggcacagaaaacacatgcatggggctttggcctgaaaggctttcggtgtgcaccggggaatcctgacatagtcatcatgacagccatcctaggtggtcctgggctctacatgtgatatttccttctgcgtagtgttattaaccccccagtttacagataaggaggctgaaccacagaaaggttaagtaatctgcctgaggtcacacagctggaaagtctaagaactgaagttgagcagaagtctgtttccaaagcccatcttttaaacaccatgtgttcttttgccattggtaattttgagcctcacttttattattattattattttttttgagacagagtctcactctgtcacccaagctgcagcgcaatggtgcaatcacagcgcactgcagccttgaccgtctgggctcaagtgatcctcccgcctcacactacttgggaggctgaggcaggaaaattgcttgaacccagaaggcagaggttgcagtgggtcgagattgcaccactgcactccagcctgggtgacagagcaaggctccatcccagaaaaaaaaaagtcactgaatgaattcccctgcctgatggcaaaattaaattaaagactgtttggctgtgaggttgacacagtcacccacagcctctgggaggctggtggctgcaaggaggatgggtgcctgacaaggacatgttaccaggcggtctggtgccagcaagcacccacttgtgctcttgtgtaatctctaacatgattcttttgtcttttgtctttgcagtccactgtcatggattgaagaaaaaggacctggtctaaaacgaaacagatatttaagcttccatttcaagtctgggtccttggagaatgtgccaaatgtaggagtgaataagaacatatttctgaaagatcaaaatatatttgtccagaaactcttgggccagttctctgagaaggaactggctgctgaaaagaaacgcatcctgcactgcctggggcttgcagaagaaatccagaaatattgctgttcaaggaagtaagaggaggaggtgatgtagcacttccaagatggcaccagcatttggttcttctcaagagttgaccattatctctattcttaaaattaaacatgttggggaaacaagaa

SEQ ID NO: 16745 - protein, 66 aa, Homo sapiens
MVQSQRTAALTVWAQVILPPHTTWEAEAGKLLEPRRQRLQWVEIAPLHSSLGDRARLHPRKKKVTE

SEQ ID NO: 16746 - DNA, 754 bp, Homo sapiens
cccgcgctccgcttggcccaagatggcggcctccgtgtgcagcgggttgctggggccacgggtgagtggggcgactcggcaggtccctgcgagtcggaggtggggtccctagtttccgcctcacgcgccctccctccacaggtgctgtcctggagccgagagctgccttgcgcttggcgcgccctgcacacctccccggtctgcgccaagaaccgggcggcccgagtacgcgtaagcaagggggacaagccggtgacctacgaggaggcacacgcgccgcactacatcgcccaccgtaaaggctggctgtcgctgcacacaggtaacctggatggagaggaccatgccgcagagcgaacggtggaggatgttttccttcgcaagttcatgtggggtaccttcccaggctgcctggctgaccagctggttttaaagcgccggggtaaccagttggagatctgtgccgtggtcctgaggcagttgtctccacacaagtactacttcctcgtgggctacagtgaaactttgctgtcctacttttacaaatgtcctgtgcgactccacctccaaactgtgccctcaaaggttgtgtataagtacctctagaacaatccccttttttccatcaagctgtagcctgcagagaatggaaacgtgggaaaggaatggtatgtgggggaaatgcatcccctcagaggactgaggcatagtctctcatctgctattgaataaagaccttctatcttgtcttgcc

SEQ ID NO: 16747 - protein, 72 aa, Homo sapiens
MWGTFPGCLADQLVLKRRGNQLEICAVVLRQLSPHKYYFLVGYSETLLSYFYKCPVRLHLQTVPSKVVYKYL

SEQ ID NO: 16748 - DNA, 714 bp, Homo sapiens
gtccgcggtcgtccccacccctcagcgcgctgtggtacgtcccgcgctccgcttggcccaagatggcggcctccgtgtgcagcgggttgctggggccacgggtgctgtcctggagccgagagctgccttgcgcttggcgcgccctgcacacctccccggtctgcgccaagaaccgggcggcccgagtacgcgtaagcaagggggacaagccggtgacctacgaggaggcacacgcgccgcactacatcgcccaccgtaaaggctggctgtcgctgcacacaggtaacctggatggagaggaccatgccgcagagcgaacggtggaggatgttttccttcgcaagttcatgtggggtaccttcccaggctgcctggctgaccagctggttttaaagcgccggggtaaccagttggagatctgtgccgtggtcctgaggcagttgtctccacacaagtactacttcctcgtgggctacagtgaaactttgctgtcctacttttacaaatgtcctgtgcgactccacctccaaactgtgccctcaaaggttgtgtataagtacctctagaacaatccccttttttccatcaagctgtagcctgcagagaatggaaacgtgggaaaggaatggtatgtgggggaaatgcatcccctcagaggactgaggcatagtctctcatctgctattgaataaagaccttctatcttgtcttgcc

SEQ ID NO: 16749 - protein, 167 aa, Homo sapiens; identical to SEQ ID NO: 1942

SEQ ID NO: 16750 - DNA, 992 bp, Homo sapiens
ggcataactaggacctggggaaacgcttggctcctcttcgagccccgagggtgcaggttgggcagggcgggctccggtgggccgcacacccatcacccgtactagcgtgaggttgtcgaagagaaaatctcacgtttcgcatcctcaaatttccggatctgaaaccctatgcaagcagcaaccgcgggagagcgaacagcggcgggatgagcattcacaaggctgagcattcacagggctgcggggaaggcgggagtaacagctagcagcataccgcggccccgccccgcagaggccctgccccgcccccgccagagtacagagtacgagctccgacttggtctcgtccgcggtcgtccccacccctcagcgcgctgtggtgctgtcctggagccgagagctgccttgcgcttggcgcgccctgcacacctccccggtctgcgccaagaaccgggcggcccgagtacgcgtaagcaagggggacaagccggtgacctacgaggaggcacacgcgccgcactacatcgcccaccgtaaaggctggctgtcgctgcacacaggtaacctggatggagaggaccatgccgcagagcgaacggtggaggatgttttccttcgcaagttcatgtggggtaccttcccaggctgcctggctgaccagctggttttaaagcgccggggtaaccagttggagatctgtgccgtggtcctgaggcagttgtctccacacaagtactacttcctcgtgggctacagtgaaactttgctgtcctacttttacaaatgtcctgtgcgactccacctccaaactgtgccctcaaaggttgtgtataagtacctctagaacaatccccttttttccatcaagctgtagcctgcagagaatggaaacgtgggaaaggaatggtatgtgggggaaatgcatcccctcagaggactgaggcatagtctctcatctgctattgaataaagaccttctatcttgtcttgcc

SEQ ID NO: 16751 - protein, 72 aa, Homo sapiens; identical to SEQ ID NO: 16747

SEQ ID NO: 16752 - DNA, 614 bp, Homo sapiens
tgactggggggacatggcgcgaagtaggggtctggatcggggatctcgtggagtcacggccccttttgctcctagaaccgggcggcccgagtacgcgtaagcaagggggacaagccggtgacctacgaggaggcacacgcgccgcactacatcgcccaccgtaaaggctggctgtcgctgcacacaggtaacctggatggagaggaccatgccgcagagcgaacggtggaggatgttttccttcgcaagttcatgtggggtaccttcccaggctgcctggctgaccagctggttttaaagcgccggggtaaccagttggagatctgtgccgtggtcctgaggcagttgtctccacacaagtactacttcctcgtgggctacagtgaaactttgctgtcctacttttacaaatgtcctgtgcgactccacctccaaactgtgccctcaaaggttgtgtataagtacctctagaacaatccccttttttccatcaagctgtagcctgcagagaatggaaacgtgggaaaggaatggtatgtgggggaaatgcatcccctcagaggactgaggcatagtctctcatctgctattgaataaagaccttctatcttgtc

SEQ ID NO: 16753 - protein, 72 aa, Homo sapiens; identical to SEQ ID NO: 16747

SEQ ID NO: 16754 - DNA, 410 bp, Homo sapiens
ggtgctgtcctggagccgagagctgccttgcgcttggcgcgccctgcacacctccccggtctgcgccaagaaccgggcggcccgagtacgcgtaagcaagggggtaaccagttggagatctgtgccgtggtcctgaggcagttgtctccacacaagtactacttcctcgtgggctacagtgaaactttgctgtcctacttttacaaatgtcctgtgcgactccacctccaaactgtgccctcaaaggttgtgtataagtacctctagaacaatccccttttttccatcaagctgtagcctgcagagaatggaaacgtgggaaaggaatggtatgtgggggaaatgcatcccctcagaggactgaggcatagtctctcatctgctattgaataaagaccttctatcttgtc

SEQ ID NO: 16755 - protein, 88 aa, Homo sapiens
GAVLEPRAALRLARPAHLPGLRQEPGGPSTRKQGGNQLEICAVVLRQLSPHKYYFLVGYSETLLSYFYKCPVRLHLQTVPSKVVYKYL

SEQ ID NO: 16756 - DNA, 325 bp, Homo sapiens
caagatagaaggtctttattcaatagcagatgagagactatgcctcagtcctctgaggggatgcatttcccccacataccattcctttcccacgtttccattctctgcaggctacagcttgatggaaaaaaggggattgttctagagtacttgtgtggagacaactgcctcaggaccacggcacagatctccaactggttaccccggcgctttaaaaccagctggtcagccaggcagcctgggaaggtaccccacatgaacttgcgaaggaaaacatcctccaccgttcgctctgcggcatggtcctctccatccaggttacctg

SEQ ID NO: 16757 - protein, 94 aa, Homo sapiens
MPQSSEGMHFPHIPFLSHVSILCRLQLDGKKGIVLEYLCGDNCLRTTAQISNWLPRRFKTSWSARQPGKVPHMNLRRKTSSTVRSAAWSSPSRL

SEQ ID NO: 16758 - DNA, 1727 bp, Homo sapiens
gcttggcccaagatggcggcctccgtgtgcagcgggttgctggggccacgggtgagtggggcgactcggcaggtccctgcgagtcggaggtggggtccctagtttccgcctcacgcgccctccctccacaggtgctgtcctggagccgagagctgccttgcgcttggcgcgccctgcacacctccccggtctgcgccaagaaccgggcggcccgagtacgcgtaagcaagggggacaagccggtgacctacgaggaggcacacgcgccgcactacatcgcccaccgtaaaggctggctgtcgctgcacacaggtgagcggaccccaggcctccaaaaggagcactcaatccgactgtcatgtaaacaaaatgaacacgtgtcacaggttttctttaactcaggaaataatgctagggtcagaaatctatgaaaccaactcaagggagacataaaaaagcagagatatatatagatcaggatgttgaaacaaatttgaagatggatgcaaaactgactttttccatggcaggcagggactcaattgatcctccactgaacagaaattatttgcatgtctacagacaagaattattttgcattcctgtcagttatctgtaatttacagagctgtaaaatagctcagagtcaaggaaaggagtgaaaccgttgcagaatctgataaccctgaacagtgtgctctaaggaatgcagttttccactaaagcacaaatttttctctgtaaatatatacagacaaccctcgttattcatgaattccatattttcagattcttctactgactaaaatttatttgtaagccccaaatcaacactctgggcactctcaaggtcactctgagatgtgggtggagctgccaccccaggtgcatgtcccgagctgaggtcgacaaggctctgcctagtttcagctctcgtactgtaaaaggtgtcctttttatggtctagaatcttttttttttaatttgcattttcgtgctttttgttagtgattttgctgtttaaaatggccttgcaatgctgaagtgctatctagtgttcctaagcgggagaaggctgtgacgtgccttagggagaacatacatgtattagagaatctttcttcagtcatgagttgctcttggccctgaattcaatgttagtgaatctaccatatatattaaacaaggtgtctttaaacagaaacacaaaggaaactaggttatgtattgatttgttaacaaaaatacggtgcccagaggctgaaaggaatctaaccctgtatttcacctaggagcaatggttcagtattcactaagtcagtgttggcagtgactttatagaatataactattgtgaacaattgataaccaactgtgctttgtttagtacaggggttcttggatgtttgagatgcatctagagaacttacttaaaatacagatgcttgcctggcacggtggctcacgcctgtaatcccagcactttgggaggccgaggagggtggatcctgaggtcaggagttcaataccaacctggccaagatggtgaaaccccatctctactaaaaatacaaaaaaattagctgggcgtagtggcgggcgcctgcaatcccagctattcaggaggctgaggcagagaattgtttgaacccaagaggcggaggttgcagtgagccgagatcacgccactgcactccagcctggacgacagagtgagactccatctc

SEQ ID NO: 16759 - protein, 63 aa, Homo sapiens [sequence omitted]

SEQ ID NO: 16760 - DNA, 1910 bp, Homo sapiens
acccccctgagaagcacagggctgagctgaggcggcggctgctagaacttcgaatgcagcagaacggccatgatccctcctcgggggtgcaggagttcatctcggggatcagcagcccctccttgagtgagaagcagtacttcctgaggtggatggagtggggcctggcacgggtggcccagccgcgactgagacagcctccggagacgcttctcaccctgagaccaaagcatgggggcaccacagacgtgggggagccgctctggcctgagcccctaggggtggaacacttcttgcgggagatgggacagttttatgaggctgagagctgtcttgtggaggcagggaggctgccggcaggccagaggcgttttgcccacttcccaggcttggcctcggagctgctgctgacagggctgcctctggagctaatcgatgggagcacgctgagcatgcccgtccgctgggtcacagggctcctgaaggagctgcacgtccgactggagagacggtcaaggctggtggttctgtcaaccgtcggggtgccaggcacgggcaagtccacactcctcaacaccatgtttgggctgcggtttgccacagggaagagctgcggtcctcgaggggccttcatgcagctcatcacagtggctgagggcttcagccaggacctgggctgtgaccacatcctggtgatagactccgggggcttgataggtggggccttgacgtcagctggggacagatttgagctggaggcttccttggccactctgctcatgggactgagcaatgtcaccgtgatcagtctagctgaaaccaaggacattccagcagctattctgcatgcatttctgaggttagaaaaaacggggcacatgcccaactaccagtttgtataccagaaccttcatgatgtatctgttcccggccctaggcccagagacaagagacagctcctggatccacctggtgacctgagcagggctgcagcccagatggagaaacagggcgacggctacagtgaagccatatttgaattgaagagatgcctactcgaaaacatcaggaacggcttgtcgaaccaaaacaaaaacatccagcagctcattgagctggtgagacggctgtgagtgtgcagagaaacccagttcaggtgtaggaggctgctgtgggcagccctgtctgatggggcacccgtgtggggctgtgctctggtgcctgagaatggctggtgcccaatcgacatgagaagacgaggaaaagacagggtttggagtctcctcaacagtgttaaaagaggaagtgacctcacagaccagctcagagatgttaccaagaatatcacagcccccagggtagggagacaagcagcagtttgttctgtctcagctcctgtcaaggatcctgcggggtgggccctctgtatagctgctctctgtcactggcccctggagtgggagcagcgtccttagtcactgcaggcccaggcgggcaggtggtcccaggacagaggtggggaagttgtcctgaggaagcagaagtaggccttgctcccgcccaacccaagggcctccagtggaccagcattcaagatgtgagtgcccgtggtgtgcaaggcactcccatggcaccgtatttattgactgatctgtgaaggcttccctgacccctgcccaggaagagttcactggtcgctctgttgtgccccacagcactttgttatacctctgccacacacttcacgcagcgcgttgtaactcatgtgtttacatgtctgtccccccagactgtgagctccttgagggcagggactgtacattctccagctctgtgtccccagggcctggcacattgtagacgcttaataaatgtctgttaaatgaatgagtgcacaagtgatggtaatg

SEQ ID NO: 16761 - protein, 359 aa, Homo sapiens
MQQNGHDPSSGVQEFISGISSPSLSEKQYFLRWMEWGLARVAQPRLRQPPETLLTLRPKHGGTTDVGEPLWPEPLGVEHFLREMGQFYEAESCLVEAGRLPAGQRRFAHFPGLASELLLTGLPLELIDGSTLSMPVRWVTGLLKELHVRLERRSRLVVLSTVGVPGTGKSTLLNTMFGLRFATGKSCGPRGAFMQLITVAEGFSQDLGCDHILVIDSGGLIGGALTSAGDRFELEASLATLLMGLSNVTVISLAETKDIPAAILHAFLRLEKTGHMPNYQFVYQNLHDVSVPGPRPRDKRQLLDPPGDLSRAAAQMEKQGDGYSEAIFELKRCLLENIRNGLSNQNKNIQQLIELVRRL

SEQ ID NO: 16762 - DNA, 3539 bp, Homo sapiens
gcaaagggcattcagatttgggagaagtagccccagaaataaaagcatcagagagacgaacagctgtggccattgcagatttggaatggagagaaatggaaggagatgattgcgagttccgttatggagatggtacaaatgaggctcaggacaatgattttccaacagtggagagaagcaggcttcaagaaatgctgtcacttttgggcctagagacgtaccaggtccagaaactcagcctccaggactctctgcagatcagttttgacagtatgaagaactgggcccctcaggttcccaaagacttgccctggaatttcctcaggaagttgcaggccctcaatgctgatgccaggaataccactatggtgctggacgtgctcccagacgccaggcctgtggagaaggagagccagatggaagaggagatcatctactgggacccagctgatgaccttgctgccgacatttattccttttctgagctgcccacccctgatacgccagtgaaccccttagaccttctctgtgccctgctgctctcctcagacagtttcctgcaacaagaaatagcgttgaaaatggccctctgccagtttgcactcccactcgtgttgcctgactcggagaaccactaccatacatttctgctgtgggccatgcggggcattgtgaggacatggtggtcccagcccccaaggggcatggggagcttccgggaagacagcgtggtcttgtccagggcgcccgccttcgccttcgtgcgcatggacgtcagtagcaactccaagtcccagcttctcaacgccgtcctcagcccgggccacaggcagtgggactgcttctggcatcgggacctcaacttgggcaccaatgcccgggagatttcggatgggttggtagaaatttcctggttttttcccagcggaagggaggacttggacattttcccagaacctgtggcctttctgaacctgagaggtgacatcgggtctcactggctgcagtttaagctcttgacagaaatctcctccgctgtgtttatattgactgacaatatcagtaagaaggaatacaaattgctgtactccatgaaggagtcaaccacaaaatactacttcatcctgagtccctaccgtgggaagcgcaacacaaacctgagatttctgaataagttaattcctgtgctgaaaatagaccactcacatgtcctggtaaaggtcagcagcactgacagcgacagcttcgtgaagaggatccgggccatcgttgggaatgtgctgcgggcaccctgcaggcgggtatctgtggaggacatggcgcacgcagcccgcaaactgggcctaaaggtcgacgaggactgtgaggagtgtcagaaagcgaaagaccggatggagaggattaccaggaaaatcaaagactcggatgcctacagaagggacgagctgaggctgcagggggacccctggagaaaggcagcccaagtggagaaggagttctgccagctccagtgggccgtggacccccctgagaagcacagggctgagctgaggcggcggctgctagaacttcgaatgcagcagaacggccatgatccctcctcgggggtgcaggagttcatctcggggatcagcagcccctccttgagtgagaagcagtacttcctgaggtggatggagtggggcctggcacgggtggcccagccgcgactgagacagcctccggagacgcttctcaccctgagaccaaagcatgggggcaccacagacgtgggggagccgctctggcctgagcccctaggggtggaacacttcttgcgggagatgggacagttttatgaggctgagagctgtcttgtggaggcagggaggctgccggcaggccagaggcgttttgcccacttcccaggcttggcctcggagctgctgctgacagggctgcctctggagctaatcgatgggagcacgctgagcatgcccgtccgctgggtcacagggctcctgaaggagctgcacgtccgactggagagacggtcaaggctggtggttctgtcaaccgtcggggtgccaggcacgggcaagtccacactcctcaacaccatgtttgggctgcggtttgccacagggaagagctgcggtcctcgaggggccttcatgcagctcatcacagtggctgagggcttcagccaggacctgggctgtgaccacatcctggtgatagactccgggggcttgataggtggggccttgacgtcagctggggacagatttgagctggaggcttccttggccactctgctcatgggactgagcaatgtcaccgtgatcagtctagctgaaaccaaggacattccagcagctattctgcatgcatttctgaggttagaaaaaacggggcacatgcccaactaccagtttgtataccagaaccttcatgatgtatctgttcccggccctaggcccagagacaagagacagctcctggatccacctggtgacctgagcagggctgcagcccagatggagaaacagggcgacggcttccgggcactggcaggcctggccttctgcgaccctgagaagcagcacatctggcacatcccaggcctgtggcacggagcacctcccatggccgcagtgagcttggcctacagtgaagccatatttgaattgaagagatgcctactcgaaaacatcaggaacggcttgtcgaaccaaaacaaaaacatccagcagctcattgagctggtgagacggctgtgagtgtgcagagaaacccagttcaggtgtaggaggctgctgtgggcagccctgtctgatggggcacccgtgtggggctgtgctctggtgcctgagaatggctggtgcccaatcgacatgagaagacgaggaaaagacagggtttggagtctcctcaacagtgttaaaagaggaagtgacctcacagaccagctcagagatgttaccaagaatatcacagcccccagggtagggagacaagcagcagtttgttctgtctcagctcctgtcaaggatcctgcggggtgggccctctgtatagctgctctctgtcactggcccctggagtgggagcagcgtccttagtcactgcaggcccaggcgggcaggtggtcccaggacagaggtggggaagttgtcctgaggaagcagaagtaggccttgctcccgcccaacccaagggcctccagtggaccagcattcaagatgtgagtgcccgtggtgtgcaaggcactcccatggcaccgtatttattgactgatctgtgaaggcttccctgacccctgcccaggaagagttcactggtcgctctgttgtgccccacagcactttgttatacctctgccacacacttcacgcagcgcgttgtaactcatgtgtttacatgtctgtccccccagactgtgagctccttgagggcagggactgtacattctccagctctgtgtccccagggcctggcacattgtagacgcttaataaatgtctgttaaatgaatgagtgcacaagtgatggtaatg

SEQ ID NO: 16763 - protein, 888 aa, Homo sapiens
MEGDDCEFRYGDGTNEAQDNDFPTVERSRLQEMLSLLGLETYQVQKLSLQDSLQISFDSMKNWAPQVPKDLPWNFLRKLQALNADARNTTMVLDVLPDARPVEKESQMEEEIIYWDPADDLAADIYSFSELPTPDTPVNPLDLLCALLLSSDSFLQQEIALKMALCQFALPLVLPDSENHYHTFLLWAMRGIVRTWWSQPPRGMGSFREDSVVLSRAPAFAFVRMDVSSNSKSQLLNAVLSPGHRQWDCFWHRDLNLGTNAREISDGLVEISWFFPSGREDLDIFPEPVAFLNLRGDIGSHWLQFKLLTEISSAVFILTDNISKKEYKLLYSMKESTTKYYFILSPYRGKRNTNLRFLNKLIPVLKIDHSHVLVKVSSTDSDSFVKRIRAIVGNVLRAPCRRVSVEDMAHAARKLGLKVDEDCEECQKAKDRMERITRKIKDSDAYRRDELRLQGDPWRKAAQVEKEFCQLQWAVDPPEKHRAELRRRLLELRMQQNGHDPSSGVQEFISGISSPSLSEKQYFLRWMEWGLARVAQPRLRQPPETLLTLRPKHGGTTDVGEPLWPEPLGVEHFLREMGQFYEAESCLVEAGRLPAGQRRFAHFPGLASELLLTGLPLELIDGSTLSMPVRWVTGLLKELHVRLERRSRLVVLSTVGVPGTGKSTLLNTMFGLRFATGKSCGPRGAFMQLITVAEGFSQDLGCDHILVIDSGGLIGGALTSAGDRFELEASLATLLMGLSNVTVISLAETKDIPAAILHAFLRLEKTGHMPNYQFVYQNLHDVSVPGPRPRDKRQLLDPPGDLSRAAAQMEKQGDGFRALAGLAFCDPEKQHIWHIPGLWHGAPPMAAVSLAYSEAIFELKRCLLENIRNGLSNQNKNIQQLIELVRRL

SEQ ID NO: 16764 - DNA, 5681 bp, Homo sapiens
ataattttcaaacatatgacaggaaagcatttttatgatactttcttgtattttacatgtgtcttatttttggaatcagaaaaacatatatggtgatattagtaattttcaaaaactgcactgcagagagctcccttgcccctgagtagggccgttggaagtgctgttctctgccgtcttggtccgactccgcctgatacacagacaggaaacttagcaaggcttagaagtgggctggagcccgagttgacagattggctggtgttataatttttaaaattactggctatagggtacagtggctcattattttttgttgagatgaggttttgccatgttgcccaggctagtcttgaactcctgggctcaagtgatccccttgctttggcctcccagatgctggaattacaggcatgagtcactgcaccctgctctaaaatgatactattctgactgcagcatccccctccacatttcatgttctgatgtgagcaagagagccttctctttctgcccatgtatttattatccatgtggactcactaattgctggttttcaatggttttaaatcagttactgtgtttatgtttgtgctcacattgtcctagatttgaccagtgagagttcctcaggctggctcctgtgcccatcatgttttcgagcatttccttactttctgaaataagatgctcaggctcctcctgttctttccttgccccagccatcattcaggatctccaaggagtccgtttcttttagcgtggaaggtattaaagggtgctaggcatgcccattgccacaacagtgtctttgcttcttggccctttccgtggacagttaggaaatagatgcatgtgtacactcgtatacacacagagatatgtgtgcacacctacatctacacacttaaacacatatgcacataagcatgcatatagaaatcacagttcacacgagtgcctccagttccattgcgcctctgcaagttctgctgtaactctccattctatgtttgtatgtcctttcttcagcagttagttagcaccctggctcctggcagaatcaatacatttactcatttgctcactctatgatacatctaaaatagtttagtctttttttttttttttttgagatggagttttgttcttgtcacccaggctggagtgcagtggtgcgatctcggctcactgcaactctgcctcctgtgttcaagtgattctcctgccttagcctccgaagtagctgggattacaggcgcctgccaccacgcctggctaatttttatatttttagtagagacagggtttcaccatgttggccaggccagtctcgaactcctgacctcaagtaatccgcccgcctcagccttccaaagtgctggaattgcaggcgtgagccaccacaccaggcctaaaatagtttattcttaattagactgcacttatcatagctatttaaaataattcaggatcaccccttccagaccacagtgttaacttcagatgaacatccttctagagttctgtatatatacctatagataaacatacacaattttattaaattgtaatcatactgtgcatacttttctgtagcctgactttcccccgactaattaatataacagctttccctaatatctcatccagcatctttttgtccacaaaagaaatccatagcgtattttttaatggctgcagaatttgaccataattccgttattgcactttgattttaaaaggcatcagtttttcgctattatatataaagctggcatcaacatctttgtaactaaatcttaattatttccttaggatagaagtggaattactgggcaaagggtatgtatatttttctgtctttctgaatgactgtatttgtgctctggccagcagttttggagagtgctggttttctagaccagtgtttctcaactgtgggtgcatatcagaatcattgagggcacttttaaaagcagtgatacccaggaccagctcccagagattctggtttcatggatctggggtgtgacccagggtttatagtttttaaaagctctccaagagattttatatgcggccagtttgataggtgaaagtggtattccatttttttaattataattttcttctgaaattgtttcaggcattcagatttgggagaagtagccccagaaataaaagcatcagagagacgaacagctgtggccattgcagatttggaatggagagaaatggaaggagatgattgcgagttccgttatggagatggtacaaatgaggctcaggacaatgattttccaacagtggagagaagcaggcttcaagaaatgctgtcacttttgggcctagagacgtaccaggtccagaaactcagcctccaggactctctgcagatcagttttgacagtatgaagaactgggcccctcaggttcccaaagacttgccctggaatttcctcaggaagttgcaggccctcaatgctgatgccaggaataccactatggtgctggacgtgctcccagacgccaggcctgtggagaaggagagccagatggaagaggagatcatctactgggacccagctgatgaccttgctgccgacatttattccttttctgagctgcccacccctgatacgccagtgaaccccttagaccttctctgtgccctgctgctctcctcagacagtttcctgcaacaagaaatagcgttgaaaatggccctctgccagtttgcactcccactcgtgttgcctgactcggagaaccactaccatacatttctgctgtgggccatgcggggcattgtgaggacatggtggtcccagcccccaaggggcatggggagcttccgggaagacagcgtggtcttgtccagggcgcccgccttcgccttcgtgcgcatggacgtcagtagcaactccaagtcccagcttctcaacgccgtcctcagcccgggccacaggcagtgggactgcttctggcatcgggacctcaacttgggcaccaatgcccgggagatttcggatgggttggtagaaatttcctggttttttcccagcggaagggaggacttggacattttcccagaacctgtggcctttctgaacctgagaggtgacatcgggtctcactggctgcagtttaagctcttgacagaaatctcctccgctgtgtttatattgactgacaatatcagtaagaaggaatacaaattgctgtactccatgaaggagtcaaccacaaaatactacttcatcctgagtccctaccgtgggaagcgcaacacaaacctgagatttctgaataagttaattcctgtgctgaaaatagaccactcacatgtcctggtaaaggtcagcagcactgacagcgacagcttcgtgaagaggatccgggccatcgttgggaatgtgctgcgggcaccctgcaggcgggtatctgtggaggacatggcgcacgcagcccgcaaactgggcctaaaggtcgacgaggactgtgaggagtgtcagaaagcgaaagaccggatggagaggattaccaggaaaatcaaagactcggatgcctacagaagggacgagctgaggctgcagggggacccctggagaaaggcagcccaagtggagaaggagttctgccagctccagtgggccgtggacccccctgagaagcacagggctgagctgaggcggcggctgctagaacttcgaatgcagcagaacggccatgatccctcctcgggggtgcaggagttcatctcggggatcagcagcccctccttgagtgagaagcagtacttcctgaggtggatggagtggggcctggcacgggtggcccagccgcgactgagacagcctccggagacgcttctcaccctgagaccaaagcatgggggcaccacagacgtgggggagccgctctggcctgagcccctaggggtggaacacttcttgcgggagatgggacagttttatgaggctgagagctgtcttgtggaggcagggaggctgccggcaggccagaggcgttttgcccacttcccaggcttggcctcggagctgctgctgacagggctgcctctggagctaatcgatgggagcacgctgagcatgcccgtccgctgggtcacagggctcctgaaggagctgcacgtccgactggagagacggtcaaggctggtggttctgtcaaccgtcggggtgccaggcacgggcaagtccacactcctcaacaccatgtttgggctgcggtttgccacagggaagagctgcggtcctcgaggggccttcatgcagctcatcacagtggctgagggcttcagccaggacctgggctgtgaccacatcctggtgatagactccgggggcttgataggtggggccttgacgtcagctggggacagatttgagctggaggcttccttggccactctgctcatgggactgagcaatgtcaccgtgatcagtctagctgaaaccaaggacattccagcagctattctgcatgcatttctgaggttagaaaaaacggggcacatgcccaactaccagtttgtataccagaaccttcatgatgtatctgttcccggccctaggcccagagacaagagacagctcctggatccacctggtgacctgagcagggctgcagcccagatggagaaacagggcgacggcttccgggcactggcaggcctggccttctgcgaccctgagaagcagcacatctggcacatcccaggcctgtggcacggagcacctcccatggccgcagtgagcttggcctacagtgaagccatatttgaattgaagagatgcctactcgaaaacatcaggaacggcttgtcgaaccaaaacaaaaacatccagcagctcattgagctggtgagacggctgtgagtgtgcagagaaacccagttcaggtgtaggaggctgctgtgggcagccctgtctgatggggcacccgtgtggggctgtgctctggtgcctgagaatggctggtgcccaatcgacatgagaagacgaggaaaagacagggtttggagtctcctcaacagtgttaaaagaggaagtgacctcacagaccagctcagagatgttaccaagaatatcacagcccccagggtagggagacaagcagcagtttgttctgtctcagctcctgtcaaggatcctgcggggtgggccctctgtatagctgctctctgtcactggcccctggagtgggagcagcgtccttagtcactgcaggcccaggcgggcaggtggtcccaggacagaggtggggaagttgtcctgaggaagcagaagtaggccttgctcccgcccaacccaagggcctccagtggaccagcattcaagatgtgagtgcccgtggtgtgcaaggcactcccatggcaccgtatttattgactgatctgtgaaggcttccctgacccctgcccaggaagagttcactggtcgctctgttgtgccccacagcactttgttatacctctgccacacacttcacgcagcgcgttgtaactcatgtgtttacatgtctgtccccccagactgtgagctccttgagggcagggactgtacattctccagctctgtgtccccagggcctggcacattgtagacgcttaataaatgtctgttaaatgaatgagtgcacaagtgatggtaatg

SEQ ID NO: 16765 - protein, 888 aa, Homo sapiens; identical to SEQ ID NO: 16763

SEQ ID NO: 16766 - DNA, 4364 bp, Homo sapiens
ggtacgcgggcctaggggatccggggagggcgcgaggcccggaggtgcccggggcgcggcgggagcgagggcccggcgagcggctggggaaccggggtgcgggtcctcgccgcggcccggggcaacccgcggaggcctggaaatgcttcgctccggcgcctggtatcgatgttcctgggttttaaacttgctcgcgttgggagtggacgcttgtttgccgcgtcgttgagacgtacccagaatgtcaggatccgggcagatgcagaccctttgctgacagccggagagccgctccgggatctccttggtcggggccattgcctaccggcctgccttggggtggctgcgcttattttgatattacctcttttcaacttttttgatttaaatgttattccttttaggaaatgatggcgacacatatagtttgtaatttttgagaaaaaattctcacttggcaaactaaaacctcagtaattcattatttttttgttttttgttttgataattttactagtactgaaatttgggaatgacagtccaacactttcattttacaaagaaagaaattaggctcaaggtcatcgctttagttgttaaaattcttctttgactgttacccatcattcagagggtcttggatctagtggctgtgatagccattcagaacagttcccaaagagctttacagaagtggaattactgggcaaagggcattcagatttgggagaagtagccccagaaataaaagcatcagagagacgaacagctgtggccattgcagatttggaatggagagaaatggaaggagatgattgcgagttccgttatggagatggtacaaatgaggctcaggacaatgattttccaacagagagaaaaaaaacacaaaaaaacattaactagaaagccagagagtgattcagtgattatgactcctgtgggaacttcccggtgactctgagtagcccacggaagcaacacagtggggagtggagagaagcaggcttcaagaaatgctgtcacttttgggcctagagacgtaccaggtccagaaactcagcctccaggactctctgcagatcagttttgacagtatgaagaactgggcccctcaggttcccaaagacttgccctggaatttcctcaggaagttgcaggccctcaatgctgatgccaggaataccactatggtgctggacgtgctcccagacgccaggcctgtggagaaggagagccagatggaagaggagatcatctactgggacccagctgatgaccttgctgccgacatttattccttttctgagctgcccacccctgatacgccagtgaaccccttagaccttctctgtgccctgctgctctcctcagacagtttcctgcaacaagaaatagcgttgaaaatggccctctgccagtttgcactcccactcgtgttgcctgactcggagaaccactaccatacatttctgctgtgggccatgcggggcattgtgaggacatggtggtcccagcccccaaggggcatggggagcttccgggaagacagcgtggtcttgtccagggcgcccgccttcgccttcgtgcgcatggacgtcagtagcaactccaagtcccagcttctcaacgccgtcctcagcccgggccacaggcagtgggactgcttctggcatcgggacctcaacttgggcaccaatgcccgggagatttcggatgggttggtagaaatttcctggttttttcccagcggaagggaggacttggacattttcccagaacctgtggcctttctgaacctgagaggtgacatcgggtctcactggctgcagtttaagctcttgacagaaatctcctccgctgtgtttatattgactgacaatatcagtaagaaggaatacaaattgctgtactccatgaaggagtcaaccacaaaatactacttcatcctgagtccctaccgtgggaagcgcaacacaaacctgagatttctgaataagttaattcctgtgctgaaaatagaccactcacatgtcctggtaaaggtcagcagcactgacagcgacagcttcgtgaagaggatccgggccatcgttgggaatgtgctgcgggcaccctgcaggcgggtatctgtggaggacatggcgcacgcagcccgcaaactgggcctaaaggtcgacgaggactgtgaggagtgtcagaaagcgaaagaccggatggagaggattaccaggaaaatcaaagactcggatgcctacagaagggacgagctgaggctgcagggggacccctggagaaaggcagcccaagtggagaaggagttctgccagctccagtgggccgtggacccccctgagaagcacagggctgagctgaggcggcggctgctagaacttcgaatgcagcagaacggccatgatccctcctcgggggtgcaggagttcatctcggggatcagcagcccctccttgagtgagaagcagtacttcctgaggtggatggagtggggcctggcacgggtggcccagccgcgactgagacagcctccggagacgcttctcaccctgagaccaaagcatgggggcaccacagacgtgggggagccgctctggcctgagcccctaggggtggaacacttcttgcgggagatgggacagttttatgaggctgagagctgtcttgtggaggcagggaggctgccggcaggccagaggcgttttgcccacttcccaggcttggcctcggagctgctgctgacagggctgcctctggagctaatcgatgggagcacgctgagcatgcccgtccgctgggtcacagggctcctgaaggagctgcacgtccgactggagagacggtcaaggctggtggttctgtcaaccgtcggggtgccaggcacgggcaagtccacactcctcaacaccatgtttgggctgcggtttgccacagggaagagctgcggtcctcgaggggccttcatgcagctcatcacagtggctgagggcttcagccaggacctgggctgtgaccacatcctggtgatagactccgggggcttgataggtggggccttgacgtcagctggggacagatttgagctggaggcttccttggccactctgctcatgggactgagcaatgtcaccgtgatcagtctagctgaaaccaaggacattccagcagctattctgcatgcatttctgaggttagaaaaaacggggcacatgcccaactaccagtttgtataccagaaccttcatgatgtatctgttcccggccctaggcccagagacaagagacagctcctggatccacctggtgacctgagcagggctgcagcccagatggagaaacagggcgacggcttccgggcactggcaggcctggccttctgcgaccctgagaagcagcacatctggcacatcccaggcctgtggcacggagcacctcccatggccgcagtgagcttggcctacagtgaagccatatttgaattgaagagatgcctactcgaaaacatcaggaacggcttgtcgaaccaaaacaaaaacatccagcagctcattgagctggtgagacggctgtgagtgtgcagagaaacccagttcaggtgtaggaggctgctgtgggcagccctgtctgatggggcacccgtgtggggctgtgctctggtgcctgagaatggctggtgcccaatcgacatgagaagacgaggaaaagacagggtttggagtctcctcaacagtgttaaaagaggaagtgacctcacagaccagctcagagatgttaccaagaatatcacagcccccagggtagggagacaagcagcagtttgttctgtctcagctcctgtcaaggatcctgcggggtgggccctctgtatagctgctctctgtcactggcccctggagtgggagcagcgtccttagtcactgcaggcccaggcgggcaggtggtcccaggacagaggtggggaagttgtcctgaggaagcagaagtaggccttgctcccgcccaacccaagggcctccagtggaccagcattcaagatgtgagtgcccgtggtgtgcaaggcactcccatggcaccgtatttattgactgatctgtgaaggcttccctgacccctgcccaggaagagttcactggtcgctctgttgtgccccacagcactttgttatacctctgccacacacttcacgcagcgcgttgtaactcatgtgtttacatgtctgtccccccagactgtgagctccttgagggcagggactgtacattctccagctctgtgtccccagggcctggcacattgtagacgcttaataaatgtctgttaaatgaatgagtgcacaagtgatggtaatg

SEQ ID NO: 16767 - protein, 48 aa, Homo sapiens
MIASSVMEMVQMRLRTMIFQQREKKHKKTLTRKPESDSVIMTPVGTSR

SEQ ID NO: 16768 - DNA, 3561 bp, Homo sapiens
gacctcgctgcgctcatggcgtcgcccgggcattcagatttgggagaagtagccccagaaataaaagcatcagagagacgaacagctgtggccattgcagatttggaatggagagaaatggaaggagatgattgcgagttccgttatggagatggtacaaatgaggctcaggacaatgattttccaacagtggagagaagcaggcttcaagaaatgctgtcacttttgggcctagagacgtaccaggtccagaaactcagcctccaggactctctgcagatcagttttgacagtatgaagaactgggcccctcaggttcccaaagacttgccctggaatttcctcaggaagttgcaggccctcaatgctgatgccaggaataccactatggtgctggacgtgctcccagacgccaggcctgtggagaaggagagccagatggaagaggagatcatctactgggacccagctgatgaccttgctgccgacatttattccttttctgagctgcccacccctgatacgccagtgaaccccttagaccttctctgtgccctgctgctctcctcagacagtttcctgcaacaagaaatagcgttgaaaatggccctctgccagtttgcactcccactcgtgttgcctgactcggagaaccactaccatacatttctgctgtgggccatgcggggcattgtgaggacatggtggtcccagcccccaaggggcatggggagcttccgggaagacagcgtggtcttgtccagggcgcccgccttcgccttcgtgcgcatggacgtcagtagcaactccaagtcccagcttctcaacgccgtcctcagcccgggccacaggcagtgggactgcttctggcatcgggacctcaacttgggcaccaatgcccgggagatttcggatgggttggtagaaatttcctggttttttcccagcggaagggaggacttggacattttcccagaacctgtggcctttctgaacctgagaggtgacatcgggtctcactggctgcagtttaagctcttgacagaaatctcctccgctgtgtttatattgactgacaatatcagtaagaaggaatacaaattgctgtactccatgaaggagtcaaccacaaaatactacttcatcctgagtccctaccgtgggaagcgcaacacaaacctgagatttctgaataagttaattcctgtgctgaaaatagaccactcacatgtcctggtaaaggtcagcagcactgacagcgacagcttcgtgaagaggatccgggccatcgttgggaatgtgctgcgggcaccctgcaggcgggtatctgtggaggacatggcgcacgcagcccgcaaactgggcctaaaggtcgacgaggactgtgaggagtgtcagaaagcgaaagaccggatggagaggattaccaggaaaatcaaagactcggatgcctacagaagggacgagctgaggctgcagggggacccctggagaaaggcagcccaagtggagaaggagttctgccagctccagtgggccgtggacccccctgagaagcacagggctgagctgaggcggcggctgctagaacttcgaatgcagcagaacggccatgatccctcctcgggggtgcaggagttcatctcggggatcagcagcccctccttgagtgagaagcagtacttcctgaggtggatggagtggggcctggcacgggtggcccagccgcgactgagacagcctccggagacgcttctcaccctgagaccaaagcatgggggcaccacagacgtgggggagccgctctggcctgagcccctaggggtggaacacttcttgcgggagatgggacagttttatgaggctgagagctgtcttgtggaggcagggaggctgccggcaggccagaggcgttttgcccacttcccaggcttggcctcggagctgctgctgacagggctgcctctggagctaatcgatgggagcacgctgagcatgcccgtccgctgggtcacagggctcctgaaggagctgcacgtccgactggagagacggtcaaggctggtggttctgtcaaccgtcggggtgccaggcacgggcaagtccacactcctcaacaccatgtttgggctgcggtttgccacagggaagagctgcggtcctcgaggggccttcatgcagctcatcacagtggctgagggcttcagccaggacctgggctgtgaccacatcctggtgatagactccgggggcttgataggtggggccttgacgtcagctggggacagatttgagctggaggcttccttggccactctgctcatgggactgagcaatgtcaccgtgatcagtctagctgaaaccaaggacattccagcagctattctgcatgcatttctgaggttagaaaaaacggggcacatgcccaactaccagtttgtataccagaaccttcatgatgtatctgttcccggccctaggcccagagacaagagacagctcctggatccacctggtgacctgagcagggctgcagcccagatggagaaacagggcgacggcttccgggcactggcaggcctggccttctgcgaccctgagaagcagcacatctggcacatcccaggcctgtggcacggagcacctcccatggccgcagtgagcttggcctacagtgaagccatatttgaattgaagagatgcctactcgaaaacatcaggaacggcttgtcgaaccaaaacaaaaacatccagcagctcattgagctggtgagacggctgtgagtgtgcagagaaacccagttcaggtgtaggaggctgctgtgggcagccctgtctgatggggcacccgtgtggggctgtgctctggtgcctgagaatggctggtgcccaatcgacatgagaagacgaggaaaagacagggtttggagtctcctcaacagtgttaaaagaggaagtgacctcacagaccagctcagagatgttaccaagaatatcacagcccccagggtagggagacaagcagcagtttgttctgtctcagctcctgtcaaggatcctgcggggtgggccctctgtatagctgctctctgtcactggcccctggagtgggagcagcgtccttagtcactgcaggcccaggcgggcaggtggtcccaggacagaggtggggaagttgtcctgaggaagcagaagtaggccttgctcccgcccaacccaagggcctccagtggaccagcattcaagatgtgagtgcccgtggtgtgcaaggcactcccatggcaccgtatttattgactgatctgtgaaggcttccctgacccctgcccaggaagagttcactggtcgctctgttgtgccccacagcactttgttatacctctgccacacacttcacgcagcgcgttgtaactcatgtgtttacatgtctgtccccccagactgtgagctccttgagggcagggactgtacattctccagctctgtgtccccagggcctggcacattgtagacgcttaataaatgtctgttaaatgaatgagtgcacaagtgatggtaatg

SEQ ID NO: 16769 - protein, 922 aa, Homo sapiens
MASPGHSDLGEVAPEIKASERRTAVAIADLEWREMEGDDCEFRYGDGTNEAQDNDFPTVERSRLQEMLSLLGLETYQVQKLSLQDSLQISFDSMKNWAPQVPKDLPWNFLRKLQALNADARNTTMVLDVLPDARPVEKESQMEEEIIYWDPADDLAADIYSFSELPTPDTPVNPLDLLCALLLSSDSFLQQEIALKMALCQFALPLVLPDSENHYHTFLLWAMRGIVRTWWSQPPRGMGSFREDSVVLSRAPAFAFVRMDVSSNSKSQLLNAVLSPGHRQWDCFWHRDLNLGTNAREISDGLVEISWFFPSGREDLDIFPEPVAFLNLRGDIGSHWLQFKLLTEISSAVFILTDNISKKEYKLLYSMKESTTKYYFILSPYRGKRNTNLRFLNKLIPVLKIDHSHVLVKVSSTDSDSFVKRIRAIVGNVLRAPCRRVSVEDMAHAARKLGLKVDEDCEECQKAKDRMERITRKIKDSDAYRRDELRLQGDPWRKAAQVEKEFCQLQWAVDPPEKHRAELRRRLLELRMQQNGHDPSSGVQEFISGISSPSLSEKQYFLRWMEWGLARVAQPRLRQPPETLLTLRPKHGGTTDVGEPLWPEPLGVEHFLREMGQFYEAESCLVEAGRLPAGQRRFAHFPGLASELLLTGLPLELIDGSTLSMPVRWVTGLLKELHVRLERRSRLVVLSTVGVPGTGKSTLLNTMFGLRFATGKSCGPRGAFMQLITVAEGFSQDLGCDHILVIDSGGLIGGALTSAGDRFELEASLATLLMGLSNVTVISLAETKDIPAAILHAFLRLEKTGHMPNYQFVYQNLHDVSVPGPRPRDKRQLLDPPGDLSRAAAQMEKQGDGFRALAGLAFCDPEKQHIWHIPGLWHGAPPMAAVSLAYSEAIFELKRCLLENIRNGLSNQNKNIQQLIELVRRL

SEQ ID NO: 16770 - DNA, 3606 bp, Homo sapiens
gaaggaggcgggagcggagacctcgctgcgctcatggcgtcgcccgggatagaagtggaattactgggcaaagggcattcagatttgggagaagtagccccagaaataaaagcatcagagagacgaacagctgtggccattgcagatttggaatggagagaaatggaaggagatgattgcgagttccgttatggagatggtacaaatgaggctcaggacaatgattttccaacagtggagagaagcaggcttcaagaaatgctgtcacttttgggcctagagacgtaccaggtccagaaactcagcctccaggactctctgcagatcagttttgacagtatgaagaactgggcccctcaggttcccaaagacttgccctggaatttcctcaggaagttgcaggccctcaatgctgatgccaggaataccactatggtgctggacgtgctcccagacgccaggcctgtggagaaggagagccagatggaagaggagatcatctactgggacccagctgatgaccttgctgccgacatttattccttttctgagctgcccacccctgatacgccagtgaaccccttagaccttctctgtgccctgctgctctcctcagacagtttcctgcaacaagaaatagcgttgaaaatggccctctgccagtttgcactcccactcgtgttgcctgactcggagaaccactaccatacatttctgctgtgggccatgcggggcattgtgaggacatggtggtcccagcccccaaggggcatggggagcttccgggaagacagcgtggtcttgtccagggcgcccgccttcgccttcgtgcgcatggacgtcagtagcaactccaagtcccagcttctcaacgccgtcctcagcccgggccacaggcagtgggactgcttctggcatcgggacctcaacttgggcaccaatgcccgggagatttcggatgggttggtagaaatttcctggttttttcccagcggaagggaggacttggacattttcccagaacctgtggcctttctgaacctgagaggtgacatcgggtctcactggctgcagtttaagctcttgacagaaatctcctccgctgtgtttatattgactgacaatatcagtaagaaggaatacaaattgctgtactccatgaaggagtcaaccacaaaatactacttcatcctgagtccctaccgtgggaagcgcaacacaaacctgagatttctgaataagttaattcctgtgctgaaaatagaccactcacatgtcctggtaaaggtcagcagcactgacagcgacagcttcgtgaagaggatccgggccatcgttgggaatgtgctgcgggcaccctgcaggcgggtatctgtggaggacatggcgcacgcagcccgcaaactgggcctaaaggtcgacgaggactgtgaggagtgtcagaaagcgaaagaccggatggagaggattaccaggaaaatcaaagactcggatgcctacagaagggacgagctgaggctgcagggggacccctggagaaaggcagcccaagtggagaaggagttctgccagctccagtgggccgtggacccccctgagaagcacagggctgagctgaggcggcggctgctagaacttcgaatgcagcagaacggccatgatccctcctcgggggtgcaggagttcatctcggggatcagcagcccctccttgagtgagaagcagtacttcctgaggtggatggagtggggcctggcacgggtggcccagccgcgactgagacagcctccggagacgcttctcaccctgagaccaaagcatgggggcaccacagacgtgggggagccgctctggcctgagcccctaggggtggaacacttcttgcgggagatgggacagttttatgaggctgagagctgtcttgtggaggcagggaggctgccggcaggccagaggcgttttgcccacttcccaggcttggcctcggagctgctgctgacagggctgcctctggagctaatcgatgggagcacgctgagcatgcccgtccgctgggtcacagggctcctgaaggagctgcacgtccgactggagagacggtcaaggctggtggttctgtcaaccgtcggggtgccaggcacgggcaagtccacactcctcaacaccatgtttgggctgcggtttgccacagggaagagctgcggtcctcgaggggccttcatgcagctcatcacagtggctgagggcttcagccaggacctgggctgtgaccacatcctggtgatagactccgggggcttgataggtggggccttgacgtcagctggggacagatttgagctggaggcttccttggccactctgctcatgggactgagcaatgtcaccgtgatcagtctagctgaaaccaaggacattccagcagctattctgcatgcatttctgaggttagaaaaaacggggcacatgcccaactaccagtttgtataccagaaccttcatgatgtatctgttcccggccctaggcccagagacaagagacagctcctggatccacctggtgacctgagcagggctgcagcccagatggagaaacagggcgacggcttccgggcactggcaggcctggccttctgcgaccctgagaagcagcacatctggcacatcccaggcctgtggcacggagcacctcccatggccgcagtgagcttggcctacagtgaagccatatttgaattgaagagatgcctactcgaaaacatcaggaacggcttgtcgaaccaaaacaaaaacatccagcagctcattgagctggtgagacggctgtgagtgtgcagagaaacccagttcaggtgtaggaggctgctgtgggcagccctgtctgatggggcacccgtgtggggctgtgctctggtgcctgagaatggctggtgcccaatcgacatgagaagacgaggaaaagacagggtttggagtctcctcaacagtgttaaaagaggaagtgacctcacagaccagctcagagatgttaccaagaatatcacagcccccagggtagggagacaagcagcagtttgttctgtctcagctcctgtcaaggatcctgcggggtgggccctctgtatagctgctctctgtcactggcccctggagtgggagcagcgtccttagtcactgcaggcccaggcgggcaggtggtcccaggacagaggtggggaagttgtcctgaggaagcagaagtaggccttgctcccgcccaacccaagggcctccagtggaccagcattcaagatgtgagtgcccgtggtgtgcaaggcactcccatggcaccgtatttattgactgatctgtgaaggcttccctgacccctgcccaggaagagttcactggtcgctctgttgtgccccacagcactttgttatacctctgccacacacttcacgcagcgcgttgtaactcatgtgtttacatgtctgtccccccagactgtgagctccttgagggcagggactgtacattctccagctctgtgtccccagggcctggcacattgtagacgcttaataaatgtctgttaaatgaatgagtgcacaagtgatggtaatg

SEQ ID NO: 16771 - protein, 931 aa, Homo sapiens
MASPGIEVELLGKGHSDLGEVAPEIKASERRTAVAIADLEWREMEGDDCEFRYGDGTNEAQDNDFPTVERSRLQEMLSLLGLETYQVQKLSLQDSLQISFDSMKNWAPQVPKDLPWNFLRKLQALNADARNTTMVLDVLPDARPVEKESQMEEEIIYWDPADDLAADIYSFSELPTPDTPVNPLDLLCALLLSSDSFLQQEIALKMALCQFALPLVLPDSENHYHTFLLWAMRGIVRTWWSQPPRGMGSFREDSVVLSRAPAFAFVRMDVSSNSKSQLLNAVLSPGHRQWDCFWHRDLNLGTNAREISDGLVEISWFFPSGREDLDIFPEPVAFLNLRGDIGSHWLQFKLLTEISSAVFILTDNISKKEYKLLYSMKESTTKYYFILSPYRGKRNTNLRFLNKLIPVLKIDHSHVLVKVSSTDSDSFVKRIRAIVGNVLRAPCRRVSVEDMAHAARKLGLKVDEDCEECQKAKDRMERITRKIKDSDAYRRDELRLQGDPWRKAAQVEKEFCQLQWAVDPPEKHRAELRRRLLELRMQQNGHDPSSGVQEFISGISSPSLSEKQYFLRWMEWGLARVAQPRLRQPPETLLTLRPKHGGTTDVGEPLWPEPLGVEHFLREMGQFYEAESCLVEAGRLPAGQRRFAHFPGLASELLLTGLPLELIDGSTLSMPVRWVTGLLKELHVRLERRSRLVVLSTVGVPGTGKSTLLNTMFGLRFATGKSCGPRGAFMQLITVAEGFSQDLGCDHILVIDSGGLIGGALTSAGDRFELEASLATLLMGLSNVTVISLAETKDIPAAILHAFLRLEKTGHMPNYQFVYQNLHDVSVPGPRPRDKRQLLDPPGDLSRAAAQMEKQGDGFRALAGLAFCDPEKQHIWHIPGLWHGAPPMAAVSLAYSEAIFELKRCLLENIRNGLSNQNKNIQQLIELVRRL

SEQ ID NO: 16772 - DNA, 4134 bp, Homo sapiens
gctgcgcgggaggctgttctgcctccttcccaggcaggtgtatccgcgactcgcggagcctccgtcacctttcacttcacggcagcggcgccccgcccacacctcgacgcttcggacacccaaagagttggagggtgggaaagtgcgtaccttctggatccgctttagcgccatcctaccccgctgccggggacccgggcggcccggccggggctgcctgaggcggcccgctgccggctcagccgccaccaagctgcacgccgggagccgcagcctgcgcttgcgcgcgcggggcactgtggggccgtcgtcgccgcgtgccgagcgtcctggcgcggccgaggggaagcagcggggctgcccgggttacgctggccacccgcacctggtcctgtggcttcgaccactagtcagcaaggccccggagaggccagcgaagaggaggggctcgttggctttacggagacgcgcggagcaccctcaaggtgccacacgctcgcctgctccctgttcctacatcctgggcgtcttcccaggctgtcatataactcctgagaatagtggttcttaactctgatagaagtggaattactgggcaaagggcattcagatttgggagaagtagccccagaaataaaagcatcagagagacgaacagctgtggccattgcagatttggaatggagagaaatggaaggagatgattgcgagttccgttatggagatggtacaaatgaggctcaggacaatgattttccaacagtggagagaagcaggcttcaagaaatgctgtcacttttgggcctagagacgtaccaggtccagaaactcagcctccaggactctctgcagatcagttttgacagtatgaagaactgggcccctcaggttcccaaagacttgccctggaatttcctcaggaagttgcaggccctcaatgctgatgccaggaataccactatggtgctggacgtgctcccagacgccaggcctgtggagaaggagagccagatggaagaggagatcatctactgggacccagctgatgaccttgctgccgacatttattccttttctgagctgcccacccctgatacgccagtgaaccccttagaccttctctgtgccctgctgctctcctcagacagtttcctgcaacaagaaatagcgttgaaaatggccctctgccagtttgcactcccactcgtgttgcctgactcggagaaccactaccatacatttctgctgtgggccatgcggggcattgtgaggacatggtggtcccagcccccaaggggcatggggagcttccgggaagacagcgtggtcttgtccagggcgcccgccttcgccttcgtgcgcatggacgtcagtagcaactccaagtcccagcttctcaacgccgtcctcagcccgggccacaggcagtgggactgcttctggcatcgggacctcaacttgggcaccaatgcccgggagatttcggatgggttggtagaaatttcctggttttttcccagcggaagggaggacttggacattttcccagaacctgtggcctttctgaacctgagaggtgacatcgggtctcactggctgcagtttaagctcttgacagaaatctcctccgctgtgtttatattgactgacaatatcagtaagaaggaatacaaattgctgtactccatgaaggagtcaaccacaaaatactacttcatcctgagtccctaccgtgggaagcgcaacacaaacctgagatttctgaataagttaattcctgtgctgaaaatagaccactcacatgtcctggtaaaggtcagcagcactgacagcgacagcttcgtgaagaggatccgggccatcgttgggaatgtgctgcgggcaccctgcaggcgggtatctgtggaggacatggcgcacgcagcccgcaaactgggcctaaaggtcgacgaggactgtgaggagtgtcagaaagcgaaagaccggatggagaggattaccaggaaaatcaaagactcggatgcctacagaagggacgagctgaggctgcagggggacccctggagaaaggcagcccaagtggagaaggagttctgccagctccagtgggccgtggacccccctgagaagcacagggctgagctgaggcggcggctgctagaacttcgaatgcagcagaacggccatgatccctcctcgggggtgcaggagttcatctcggggatcagcagcccctccttgagtgagaagcagtacttcctgaggtggatggagtggggcctggcacgggtggcccagccgcgactgagacagcctccggagacgcttctcaccctgagaccaaagcatgggggcaccacagacgtgggggagccgctctggcctgagcccctaggggtggaacacttcttgcgggagatgggacagttttatgaggctgagagctgtcttgtggaggcagggaggctgccggcaggccagaggcgttttgcccacttcccaggcttggcctcggagctgctgctgacagggctgcctctggagctaatcgatgggagcacgctgagcatgcccgtccgctgggtcacagggctcctgaaggagctgcacgtccgactggagagacggtcaaggctggtggttctgtcaaccgtcggggtgccaggcacgggcaagtccacactcctcaacaccatgtttgggctgcggtttgccacagggaagagctgcggtcctcgaggggccttcatgcagctcatcacagtggctgagggcttcagccaggacctgggctgtgaccacatcctggtgatagactccgggggcttgataggtggggccttgacgtcagctggggacagatttgagctggaggcttccttggccactctgctcatgggactgagcaatgtcaccgtgatcagtctagctgaaaccaaggacattccagcagctattctgcatgcatttctgaggttagaaaaaacggggcacatgcccaactaccagtttgtataccagaaccttcatgatgtatctgttcccggccctaggcccagagacaagagacagctcctggatccacctggtgacctgagcagggctgcagcccagatggagaaacagggcgacggcttccgggcactggcaggcctggccttctgcgaccctgagaagcagcacatctggcacatcccaggcctgtggcacggagcacctcccatggccgcagtgagcttggcctacagtgaagccatatttgaattgaagagatgcctactcgaaaacatcaggaacggcttgtcgaaccaaaacaaaaacatccagcagctcattgagctggtgagacggctgtgagtgtgcagagaaacccagttcaggtgtaggaggctgctgtgggcagccctgtctgatggggcacccgtgtggggctgtgctctggtgcctgagaatggctggtgcccaatcgacatgagaagacgaggaaaagacagggtttggagtctcctcaacagtgttaaaagaggaagtgacctcacagaccagctcagagatgttaccaagaatatcacagcccccagggtagggagacaagcagcagtttgttctgtctcagctcctgtcaaggatcctgcggggtgggccctctgtatagctgctctctgtcactggcccctggagtgggagcagcgtccttagtcactgcaggcccaggcgggcaggtggtcccaggacagaggtggggaagttgtcctgaggaagcagaagtaggccttgctcccgcccaacccaagggcctccagtggaccagcattcaagatgtgagtgcccgtggtgtgcaaggcactcccatggcaccgtatttattgactgatctgtgaaggcttccctgacccctgcccaggaagagttcactggtcgctctgttgtgccccacagcactttgttatacctctgccacacacttcacgcagcgcgttgtaactcatgtgtttacatgtctgtccccccagactgtgagctccttgagggcagggactgtacattctccagctctgtgtccccagggcctggcacattgtagacgcttaataaatgtctgttaaatgaatgagtgcacaagtgatggtaatg

SEQ ID NO: 16773 - protein, 888 aa, Homo sapiens; identical to SEQ ID NO: 16763

SEQ ID NO: 16774 - DNA, 1176 bp, Homo sapiens
tcatctcggggatcagcagcccctccttgagtgagaagcagtacttcctgaggtggatggagtggggcctggcacgggtggcccagccgcgactgagacagcctccggagacgcttctcaccctgagaccaaagcatgggggcaccacagacgtgggggagccgctctggcctgagcccctaggggtggaacacttcttgcgggagatgggacagttttatgaggctgagagctgtcttgtggaggcagggaggctgccggcaggccagaggcgttttgcccacttcccaggcttggcctcggagctgctgctgacagggctgcctctggagctaatcgatgggagcacgctgagcatgcccgtccgctgggtcacagggctcctgaaggagctgcacgtccgactggagagacggtcaaggctggtggttctgtcaaccgtcggggtgccaggcacgggcaagtccacactcctcaacaccatgtttgggctgcggtttgccacagggaagagctgcggtcctcgaggggccttcatgcagctcatcacagtggctgagggcttcagccaggacctgggctgtgaccacatcctggtgatagactccgggggcttgataggtggggccttgacgtcagctggggacagatttgagctggaggcttccttggccactctgctcatgggactgagcaatgtcaccgtgatcagtctagctgaaaccaaggacattccagcagctattctgcatgcatttctgaggttagaaaaaacggggcacatgcccaactaccagtttgtataccagaaccttcatgatgtatctgttcccggccctaggcccagagacaagagacagctcctggatccacctggtgacctgagcagggctgcagcccagatggagaaacagggcgacggcttccgggcactggcaggcctggccttctgcgaccctgagaagcagcacatctggcacatcccaggctctgttgtgccccacagcactttgttatacctctgccacacacttcacgcagcgcgttgtaactcatgtgtttacatgtctgtccccccagactgtgagctccttgagggcagggactgtacattctccagctctgtgtccccagggcctggcacattgtagacgcttaataaatgtctgttaaatg

SEQ ID NO: 16775 - protein, 364 aa, Homo sapiens
MEWGLARVAQPRLRQPPETLLTLRPKHGGTTDVGEPLWPEPLGVEHFLREMGQFYEAESCLVEAGRLPAGQRRFAHFPGLASELLLTGLPLELIDGSTLSMPVRWVTGLLKELHVRLERRSRLVVLSTVGVPGTGKSTLLNTMFGLRFATGKSCGPRGAFMQLITVAEGFSQDLGCDHILVIDSGGLIGGALTSAGDRFELEASLATLLMGLSNVTVISLAETKDIPAAILHAFLRLEKTGHMPNYQFVYQNLHDVSVPGPRPRDKRQLLDPPGDLSRAAAQMEKQGDGFRALAGLAFCDPEKQHIWHIPGSVVPHSTLLYLCHTLHAARCNSCVYMSVPPDCELLEGRDCTFSSSVSPGPGTL

SEQ ID NO: 16776 - DNA, 1242 bp, Homo sapiens
tcatctcggggatcagcagcccctccttgagtgagaagcagtacttcctgaggtggatggagtggggcctggcacgggtggcccagccgcgactgagacagcctccggagacgcttctcaccctgagaccaaagcatgggggcaccacagacgtgggggagccgctctggcctgagcccctaggggtggaacacttcttgcgggagatgggacagttttatgaggctgagagctgtcttgtggaggcagggaggctgccggcaggccagaggcgttttgcccacttcccaggcttggcctcggagctgctgctgacagggctgcctctggagctaatcgatgggagcacgctgagcatgcccgtccgctgggtcacagggctcctgaaggagctgcacgtccgactggagagacggtcaaggctggtggttctgtcaaccgtcggggtgccaggcacgggcaagtccacactcctcaacaccatgtttgggctgcggtttgccacagggaagagctgcggtcctcgaggggccttcatgcagctcatcacagtggctgagggcttcagccaggacctgggctgtgaccacatcctggtgatagactccgggggcttgataggtggggccttgacgtcagctggggacagatttgagctggaggcttccttggccactctgctcatgggactgagcaatgtcaccgtgatcagtctagctgaaaccaaggacattccagcagctattctgcatgcatttctgaggttagaaaaaacggggcacatgcccaactaccagtttgtataccagaaccttcatgatgtatctgttcccggccctaggcccagagacaagagacagctcctggatccacctggtgacctgagcagggctgcagcccagatggagaaacagggcgacggcttccgggcactggcaggcctggccttctgcgaccctgagaagcagcacatctggcactcccatggcaccgtatttattgactgatctgtgaaggcttccctgacccctgcccaggaagagttcactggtcgctctgttgtgccccacagcactttgttatacctctgccacacacttcacgcagcgcgttgtaactcatgtgtttacatgtctgtccccccagactgtgagctccttgagggcagggactgtacattctccagctctgtgtccccagggcctggcacattgtagacgcttaataaatgtctgttaaatg

SEQ ID NO: 16777 - protein, 316 aa, Homo sapiens
MEWGLARVAQPRLRQPPETLLTLRPKHGGTTDVGEPLWPEPLGVEHFLREMGQFYEAESCLVEAGRLPAGQRRFAHFPGLASELLLTGLPLELIDGSTLSMPVRWVTGLLKELHVRLERRSRLVVLSTVGVPGTGKSTLLNTMFGLRFATGKSCGPRGAFMQLITVAEGFSQDLGCDHILVIDSGGLIGGALTSAGDRFELEASLATLLMGLSNVTVISLAETKDIPAAILHAFLRLEKTGHMPNYQFVYQNLHDVSVPGPRPRDKRQLLDPPGDLSRAAAQMEKQGDGFRALAGLAFCDPEKQHIWHSHGTVFID

SEQ ID NO: 16778 - DNA, 366 bp, Homo sapiens
cggccgcgcggaggaagcgaaggaggcgggagcggagacctcgctgcgctcatggcgtcgcccgggcattcagatttgggagaagtagccccagaaataaaagcatcagagagacgaacagctgtggccattgcagatttggaatggagagaaatggaaggagatgattgcgagttccgttatggagatggtacaaatgaggctcaggacaatgattttccaacagatcaggatactgggcccagagcttccaaacaacctgccaagggccacacactgggcagaagtgttttctttgtctttttcccattgccttttactaccatgctacttaaaaaataaaaagttattccatgtctggacaag

SEQ ID NO: 16779 - protein, 96 aa, Homo sapiens
MASPGHSDLGEVAPEIKASERRTAVAIADLEWREMEGDDCEFRYGDGTNEAQDNDFPTDQDTGPRASKQPAKGHTLGRSVFFVFFPLPFTTMLLKK

SEQ ID NO: 16780 - DNA, 903 bp, Homo sapiens
gctgcgcgggaggctgttctgcctccttcccaggcaggtgtatccgcgactcgcggagcctccgtcacctttcacttcacggcagcggcgccccgcccacacctcgacgcttcggacacccaaagagttggagggtgggaaagtgcgtaccttctggatccgctttagcgccatcctaccccgctgccggggacccgggcggcccggccggggctgcctgaggcggcccgctgccggctcagccgccaccaagctgcacgccgggagccgcagcctgcgcttgcgcgcgcggggcactgtggggccgtcgtcgccgcgtgccgagcgtcctggcgcggccgaggggaagcagcggggctgcccgggttacgctggccacccgcacctggtcctgtggcttcgaccactagtcagcaaggccccggagaggccagcgaagaggaggggctcgttggctttacggagacgcgcggagcaccctcaaggtgccacacgctcgcctgctccctgttcctacatcctgggcgtcttcccaggctgtcatataactcctgagaatagtggttcttaactctgatagaagtggaattactgggcaaagggcattcagatttgggagaagtagccccagaaataaaagcatcagagagacgaacagctgtggccattgcagatttggaatggagagaaatggaaggagatgattgcgagttccgttatggagatggtacaaatgaggctcaggacaatgattttccaacagatcaggatactgggcccagagcttccaaacaacctgccaagggccacacactgggcagaagtgttttctttgtctttttcccattgccttttactaccatgctacttaaaaaataaaaagttattccatgtctggacaag

SEQ ID NO: 16781 - protein, 66 aa, Homo sapiens
MIASSVMEMVQMRLRTMIFQQIRILGPELPNNLPRATHWAEVFSLSFSHCLLLPCYLKNKKLFHVW

SEQ ID NO: 16782 - DNA, 1418 bp, Homo sapiens
gcggctcccggcgtgcagcttggtggcggctgagccggcagcgggccgcctcaggcagccccggccgggccgcccgggtccccggcagcggggtaggatggcgctaaagcggatccagaaggaattaaccgacttgcagagggatcctcctgcccagtgttctgcaggacctgtcggtgatgacttgttccactggcaggccaccatcatgggcccgaatgacagtccttaccaaggaggtgttttcttcctgaccatccactttcctacagattacccgttcaagcccccaaaggttgctttcacaaccaaaatttatcaccctaatatcaacagcaatggcagcatctgccttgatatcctgcggtctcagtggtctccagcgttgactgtgtcaaaagttctcttgtccatctgctcgctgctctgcgaccccaaccccgatgaccccctggtgccagagatagcacacacctacaaggccgacagagagaagtacaacagactagcaagagagtggacacaaaaatatgctatgtaagtgccttggaggttttacatgagacactgtccaagagaagctggcagagaggtcttcccttaaaactttgggctgttggctgagccattcaaagagcatcatctgttcttcaaacaaatgttggtcacccactctctccagctgcagcatgttggtgccattttcagcaattacggctttgacagtgccacctctttgatgccaaatcagcaaccattgttgttatgatctgcagtcttcctggtgacactggaatctctctctctgccgcctcagtttgtctgctggtctcttggggggccaggccctgcacgtctctcctacccggcctcaaatggtgctgctgcccatgatggtaccacaccagggcctcagcctggcccctcaccacataccctttgccttttagaactcagtgccatcctgggtgcccagggcagagcaggctttgttcgcacctcatctgctgcagaaccacatcctgaggagtctcagcttatcctggagggaattgggaacagtgtcactgggaagtgaaggcctagccctgtggcttccaccagtctcctcctgcagtgccacgtggtggcatttctcgcctcacaccaagaagcagcaagtggaaaatttcaggatacaaagcacataacaccccataagagatgattatgtttttagaagcaagagcaaaattatgaaacctctagagatttgggtcatgttactccatttgatgaagattctcactaccgcccgctcctcccataggagcctacactaagtccaagtgtgagccattcacagactagaacacaaggagggagagagactcttaaacgtaaataaaaatgcaattcactcacaactctaaatgata

SEQ ID NO: 16783 - protein, 147 aa, Homo sapiens; identical to SEQ ID NO: 1946

SEQ ID NO: 16784 - DNA, 1514 bp, Homo sapiens
ggctcccggcgtgcagcttggtggcggctgagccggcagcgggccgcctcaggcagccccggccgggccgcccgggtccccggcagcggggtaggatggcgctaaagcggatccagaaggctgtacaagaagcatggtgccagcatctgcttctggtgaggcctcaggaagcttacaatcatggcagaaagcaaaggagaagcaggcgtgtcacctggaattaaccgacttgcagagggatcctcctgcccagtgttctgcaggacctgtcggtgatgacttgttccactggcaggccaccatcatgggcccgaatgacagtccttaccaaggaggtgttttcttcctgaccatccactttcctacagattacccgttcaagcccccaaaggttgctttcacaaccaaaatttatcaccctaatatcaacagcaatggcagcatctgccttgatatcctgcggtctcagtggtctccagcgttgactgtgtcaaaagttctcttgtccatctgctcgctgctctgcgaccccaaccccgatgaccccctggtgccagagatagcacacacctacaaggccgacagagagaagtacaacagactagcaagagagtggacacaaaaatatgctatgtaagtgccttggaggttttacatgagacactgtccaagagaagctggcagagaggtcttcccttaaaactttgggctgttggctgagccattcaaagagcatcatctgttcttcaaacaaatgttggtcacccactctctccagctgcagcatgttggtgccattttcagcaattacggctttgacagtgccacctctttgatgccaaatcagcaaccattgttgttatgatctgcagtcttcctggtgacactggaatctctctctctgccgcctcagtttgtctgctggtctcttggggggccaggccctgcacgtctctcctacccggcctcaaatggtgctgctgcccatgatggtaccacaccagggcctcagcctggcccctcaccacataccctttgccttttagaactcagtgccatcctgggtgcccagggcagagcaggctttgttcgcacctcatctgctgcagaaccacatcctgaggagtctcagcttatcctggagggaattgggaacagtgtcactgggaagtgaaggcctagccctgtggcttccaccagtctcctcctgcagtgccacgtggtggcatttctcgcctcacaccaagaagcagcaagtggaaaatttcaggatacaaagcacataacaccccataagagatgattatgtttttagaagcaagagcaaaattatgaaacctctagagatttgggtcatgttactccatttgatgaagattctcactaccgcccgctcctcccataggagcctacactaagtccaagtgtgagccattcacagactagaacacaaggagggagagagactcttaaacgtaaataaaaatgcaattcactcacaactctaaatgata

SEQ ID NO: 16785 - protein, 167 aa, Homo sapiens
MVPASASGEASGSLQSWQKAKEKQACHLELTDLQRDPPAQCSAGPVGDDLFHWQATIMGPNDSPYQGGVFFLTIHFPTDYPFKPPKVAFTTKIYHPNINSNGSICLDILRSQWSPALTVSKVLLSICSLLCDPNPDDPLVPEIAHTYKADREKYNRLAREWTQKYAM

SEQ ID NO: 16786 - DNA, 953 bp, Homo sapiens
cggcgtgcagcttggtggcggctgagccggcagcgggccgcctcaggcagccccggccgggccgcccgggtccccggcagcggggtaggatggcgctaaagcggatccagaaggctgtacaagaagcatggtgccagcatctgcttctggtgaggcctcaggaagcttacaatcatggcagaaagcaaaggagaagcaggcgtgtcacctggaattaaccgacttgcagagggatcctcctgcccagtgttctgcaggacctgtcggtgatgacttgttccactggcaggccaccatcatgggcccgaatgacagtccttaccaaggaggtgttttcttcctgaccatccactttcctacagattacccgttcaagcccccaaaggttgctttcacaaccaaaatttatcaccctaatatcaacagcaatggcagcatctgccttgatatcctgcggtctcagtggtctccagcgttgactgtgtcaaaaggtagagatgctgatggcatgctctgtgtgctcttttacacatgtttttaccccagcactgactgagtggaaatggaagctcagagaaagaagtcacctttcccaggtcacatagccctgtccactgctgtgcccttaagtggatatccttacacgcctacgaggcagcaccagcagaactttgtgccccgctccctggcgcttctcagcagtcaattgccctggtgtgctcaagactgtcacatgggtgcaagaagaaaatactgattctacttatatttttttatccaaaaataagaaaggcaaatattacattaccttctctgttccctcatttattcatctaataagcacaaaacggactgtgagtcagccctgaaggaagatacagggcatgcctccgggggcctcgaagttggtggagaaatcctcccttcccaaaataaatgatgttgagcacatg

SEQ ID NO: 16787 - protein, 142 aa, Homo sapiens
MVPASASGEASGSLQSWQKAKEKQACHLELTDLQRDPPAQCSAGPVGDDLFHWQATIMGPNDSPYQGGVFFLTIHFPTDYPFKPPKVAFTTKIYHPNINSNGSICLDILRSQWSPALTVSKGRDADGMLCVLFYTCFYPSTD

SEQ ID NO: 16788 - DNA, 1297 bp, Homo sapiens
cgtgcagcttggtggcggctgagccggcagcgggccgcctcaggcagccccggccgggccgcccgggtccccggcagcggggtaggatggcgctaaagcggatccagaaggaattaaccgacttgcagagggatcctcctgcccagtgttctgcaggacctgtcggtgatgactgttgctttcacaaccaaaatttatcaccctaatatcaacagcaatggcagcatctgccttgatatcctgcggtctcagtggtctccagcgttgactgtgtcaaaagttctcttgtccatctgctcgctgctctgcgaccccaaccccgatgaccccctggtgccagagatagcacacacctacaaggccgacagagagaagtacaacagactagcaagagagtggacacaaaaatatgctatgtaagtgccttggaggttttacatgagacactgtccaagagaagctggcagagaggtcttcccttaaaactttgggctgttggctgagccattcaaagagcatcatctgttcttcaaacaaatgttggtcacccactctctccagctgcagcatgttggtgccattttcagcaattacggctttgacagtgccacctctttgatgccaaatcagcaaccattgttgttatgatctgcagtcttcctggtgacactggaatctctctctctgccgcctcagtttgtctgctggtctcttggggggccaggccctgcacgtctctcctacccggcctcaaatggtgctgctgcccatgatggtaccacaccagggcctcagcctggcccctcaccacataccctttgccttttagaactcagtgccatcctgggtgcccagggcagagcaggctttgttcgcacctcatctgctgcagaaccacatcctgaggagtctcagcttatcctggagggaattgggaacagtgtcactgggaagtgaaggcctagccctgtggcttccaccagtctcctcctgcagtgccacgtggtggcatttctcgcctcacaccaagaagcagcaagtggaaaatttcaggatacaaagcacataacaccccataagagatgattatgtttttagaagcaagagcaaaattatgaaacctctagagatttgggtcatgttactccatttgatgaagattctcactaccgcccgctcctcccataggagcctacactaagtccaagtgtgagccattcacagactagaacacaaggagggagagagactcttaaacgtaaataaaaatgcaattcactcacaactctaaatgata

SEQ ID NO: 16789 - protein, 83 aa, Homo sapiens [sequence omitted]

SEQ ID NO: 16790 - DNA, 1360 bp, Homo sapiens
cggctgagccggcagcgggccgcctcaggcagccccggccgggccgcccgggtccccggcagcggggtaggatggcgctaaagcggatccagaaggaattaaccgacttgcagagggatcctcctgcccagtgttctgcaggacctgtcggtgatgactaatgacagtccttaccaaggaggtgttttcttcctgaccatccactttcctacagattacccgttcaagcccccaaaggttgctttcacaaccaaaatttatcaccctaatatcaacagcaatggcagcatctgccttgatatcctgcggtctcagtggtctccagcgttgactgtgtcaaaagttctcttgtccatctgctcgctgctctgcgaccccaaccccgatgaccccctggtgccagagatagcacacacctacaaggccgacagagagaagtacaacagactagcaagagagtggacacaaaaatatgctatgtaagtgccttggaggttttacatgagacactgtccaagagaagctggcagagaggtcttcccttaaaactttgggctgttggctgagccattcaaagagcatcatctgttcttcaaacaaatgttggtcacccactctctccagctgcagcatgttggtgccattttcagcaattacggctttgacagtgccacctctttgatgccaaatcagcaaccattgttgttatgatctgcagtcttcctggtgacactggaatctctctctctgccgcctcagtttgtctgctggtctcttggggggccaggccctgcacgtctctcctacccggcctcaaatggtgctgctgcccatgatggtaccacaccagggcctcagcctggcccctcaccacataccctttgccttttagaactcagtgccatcctgggtgcccagggcagagcaggctttgttcgcacctcatctgctgcagaaccacatcctgaggagtctcagcttatcctggagggaattgggaacagtgtcactgggaagtgaaggcctagccctgtggcttccaccagtctcctcctgcagtgccacgtggtggcatttctcgcctcacaccaagaagcagcaagtggaaaatttcaggatacaaagcacataacaccccataagagatgattatgtttttagaagcaagagcaaaattatgaaacctctagagatttgggtcatgttactccatttgatgaagattctcactaccgcccgctcctcccataggagcctacactaagtccaagtgtgagccattcacagactagaacacaaggagggagagagactcttaaacgtaaataaaaatgcaattcactcacaactctaaatgata

SEQ ID NO: 16791 - protein, 109 aa, Homo sapiens
MTNDSPYQGGVFFLTIHFPTDYPFKPPKVAFTTKIYHPNINSNGSICLDILRSQWSPALTVSKVLLSICSLLCDPNPDDPLVPEIAHTYKADREKYNRLAREWTQKYAM

SEQ ID NO: 16792 - DNA, 1436 bp, Homo sapiens
gcagccccggccgggccgcccgggtccccggcagcggggtaggatggcgctaaagcggatccagaaggaattaaccgacttgcagagggatcctcctgcccagtgttctgcaggacctgtcggtgatgacttgttccactggcaggccaccatcatgggcccgaatgacagtccttaccaaggaggtgttttcttcctgaccatccactttcctacagattacccgttcaagcccccaaaggtgaggtccctctcccaactcccctgatgtttggatgaaggacagcatgtgacaaggggcccttcaagtcaggttgctttcacaaccaaaatttatcaccctaatatcaacagcaatggcagcatctgccttgatatcctgcggtctcagtggtctccagcgttgactgtgtcaaaagttctcttgtccatctgctcgctgctctgcgaccccaaccccgatgaccccctggtgccagagatagcacacacctacaaggccgacagagagaagtacaacagactagcaagagagtggacacaaaaatatgctatgtaagtgccttggaggttttacatgagacactgtccaagagaagctggcagagaggtcttcccttaaaactttgggctgttggctgagccattcaaagagcatcatctgttcttcaaacaaatgttggtcacccactctctccagctgcagcatgttggtgccattttcagcaattacggctttgacagtgccacctctttgatgccaaatcagcaaccattgttgttatgatctgcagtcttcctggtgacactggaatctctctctctgccgcctcagtttgtctgctggtctcttggggggccaggccctgcacgtctctcctacccggcctcaaatggtgctgctgcccatgatggtaccacaccagggcctcagcctggcccctcaccacataccctttgccttttagaactcagtgccatcctgggtgcccagggcagagcaggctttgttcgcacctcatctgctgcagaaccacatcctgaggagtctcagcttatcctggagggaattgggaacagtgtcactgggaagtgaaggcctagccctgtggcttccaccagtctcctcctgcagtgccacgtggtggcatttctcgcctcacaccaagaagcagcaagtggaaaatttcaggatacaaagcacataacaccccataagagatgattatgtttttagaagcaagagcaaaattatgaaacctctagagatttgggtcatgttactccatttgatgaagattctcactaccgcccgctcctcccataggagcctacactaagtccaagtgtgagccattcacagactagaacacaaggagggagagagactcttaaacgtaaataaaaatgcaattcactcacaactctaaatgata

SEQ ID NO: 16793 - protein, 74 aa, Homo sapiens
MALKRIQKELTDLQRDPPAQCSAGPVGDDLFHWQATIMGPNDSPYQGGVFFLTIHFPTDYPFKPPKVRSLSQLP

SEQ ID NO: 16794 - DNA, 783 bp, Homo sapiens
cccggcagcggggtaggatggcgctaaagcggatccagaaggaattaaccgacttgcagagggatcctcctgcccagtgttctgcaggacctgtcggtgatgacttgttccactggcaggccaccatcatgggcccgaatgacagtccttaccaaggaggtgttttcttcctgaccatccactttcctacagattacccgttcaagcccccaaaggttgctttcacaaccaaaatttatcaccctaatatcaacagcaatggcagcatctgccttgatatcctgcggtctcagtggtctccagcgttgactgtgtcaaaaggtagagatgctgatggcatgctctgtgtgctcttttacacatgtttttaccccagcactgactgagtggaaatggaagctcagagaaagaagtcacctttcccaggtcacatagccctgtccactgctgtgcccttaagtggatatccttacacgcctacgaggcagcaccagcagaactttgtgccccgctccctggcgcttctcagcagtcaattgccctggtgtgctcaagactgtcacatgggtgcaagaagaaaatactgattctacttatatttttttatccaaaaataagaaaggcaaatattacattaccttctctgttccctcatttattcatctaataagcacaaaacggactgtgagtcagccctgaaggaagatacagggcatgcctccgggggcctcgaagttggtggagaaatcctcccttcccaaaataaatgatgttgagcacatg

SEQ ID NO: 16795 - protein, 122 aa, Homo sapiens
MALKRIQKELTDLQRDPPAQCSAGPVGDDLFHWQATIMGPNDSPYQGGVFFLTIHFPTDYPFKPPKVAFTTKIYHPNINSNGSICLDILRSQWSPALTVSKGRDADGMLCVLFYTCFYPSTD

SEQ ID NO: 16796 - DNA, 612 bp, Homo sapiens
ggatcctcctgcccagtgttctgcaggacctgtcggtgatgactgttgctttcacaaccaaaatttatcaccctaatatcaacagcaatggcagcatctgccttgatatcctgcggtctcagtggtctccagcgttgactgtgtcaaaaggtagagatgctgatggcatgctctgtgtgctcttttacacatgtttttaccccagcactgactgagtggaaatggaagctcagagaaagaagtcacctttcccaggtcacatagccctgtccactgctgtgcccttaagtggatatccttacacgcctacgaggcagcaccagcagaactttgtgccccgctccctggcgcttctcagcagtcaattgccctggtgtgctcaagactgtcacatgggtgcaagaagaaaatactgattctacttatatttttttatccaaaaataagaaaggcaaatattacattaccttctctgttccctcatttattcatctaataagcacaaaacggactgtgagtcagccctgaaggaagatacagggcatgcctccgggggcctcgaagttggtggagaaatcctcccttcccaaaataaatgatgttgagcacatg

SEQ ID NO: 16797 - protein, 58 aa, Homo sapiens
MTVAFTTKIYHPNINSNGSICLDILRSQWSPALTVSKGRDADGMLCVLFYTCFYPSTD

SEQ ID NO: 16798 - DNA, 6503 bp, Homo sapiens
ttattagggctctggtggcggcggcggcagacacttggggtctggacgcaacggaggcgggagcgtgaacgcccctccagccttcgagtcgttcttgctcttcgagggcgagaagaagatcaccattaacaaggacaccaaggtacccaatgcctgtttattcaccatcaacaaagaagaccacacactgggaaacatcattaaatcacagtgtgacctaaaggacccgcaagtgctatttgctggctacaaagtcccccaccccttggagcacaagatcatcatccgagtgcagaccacgccggactacagcccccaggaagcctttaccaacgccatcaccgacctcatcagtgagctgtccctgctggaggagcgcttccggacgtgcctgcttccccttcgccttctgccgtgattgtcagtttcctgaggcctccccagccacgctttctgtacagcctgcagaactctgccccagagcacatcagctatgtgccccagctctcaaacgacaccctggcggggaggctcaccctgtccaccttcacgctggagcagcctctaggccagttcagcagccacaacatctctgacttggataccatctggctggtggtggccctcagcaacgccacccagagcttcacggccccacggacaaaccaggacatccctgctcctgccaacttctcccagaggggctactatctcacactgagggccaaccgggtgctgtaccaggccagaggccagctccatgtcctccgtgttggcaatgatacccactgccaaccaacaaaaattggctgcaaccatcccctaccaggaccgagcccctacagggtgaagttcctggtgatgaatgacaaaggacccgtggctgaaacaaagtggtccagcaacactcgcctgcagcaaggacagccacagtgtggaagaccctgtgccccttctggggtgaggagtaccaagtgcacctgccgcccaccttccacgctgtggctttctacgtcatggatgaggatgccctcagccgggacgacgttatcggaaaggtctgccttacaagggacaccatagcttctcaccctaagggtttcagcgggtgggcccacctgacggaggttgaccctgatgaggaggtgcagggcgagatccacctgcggctggaagtgcgcccaggggcccgggcctgccagctacgctgctctgtgctggaggccagatcatgaagaagtcatgctacccacgctggaatgagacgtttgaatttgagctgcaggagggggccgtggaggcgctgtgcgtggaggcctgggactgggaccttgtcagccgaaacgacttcctgggcaaagtggtgatcgatgtccagagactgcgggtggcgcagcaggaggagggctggttccggctgcagcccgaccagtccaagagccggcagcatgacgagggcaacctgggctccttgcagctggaggtgcggctgcgggacgagacggtgctgccctccagctactaccagccactggtgcacctgctgtgccacgaggtcaagctgggcatgcaggataagctgagactcctcaggatgtggttctgcagcagatgaggtgcgaacaaagcctgctctgccctgggcacccaggatggcactgagttctaaaaggcaaagggtatgtggtgaggggccaggctgaggccctggtgtggtaccatcatgggcagcagcaccatttgaggccgggtaggagagacgtgcagggcctggccccccaagagaccagcagacaaactgaggcggcagagagagagattccagtgtcaccaggaagactgcagatcataacaacaatggttgctgatttggcatcaaagaggtggcactgtcaaagccgtaattgctgaaaatggcaccaacatgctgcagctggagagagtgggtgaccaacatttgtttgaagaacagatgatgctctttgaatggctcagccaacagcccaaagttttaagggaagacctctctgccagcttctcttggacagtgtctcatgtaaaacctccaaggcacttacatagcatatttttgtgtccactctcttgctagtctgttgtacctggaataaaaaagcagaggaagtgacaccctcacttgaaatggtcacttcccttcaatgtgctgcagagaacaggactgatgtggggaatgctgctgctgctgcttgtcaaacatctacggctgatggccacacattacttcttcaaatgaccttggacctcagagccttcactataagtaggtacatggtacctctcccagggatgttgtgggacccatgaagagtccgctgtctgtgatgtgcaaggtgctctgagtcaggtgcagcttgtactgctataggagcctaagaatctgcctcacctacactccctctgggcaattaggtatgctgaaaatgcccaacagacattcaggactacattggtatctgtttaaggaaaatcctcagctgctcacacagtaatgaaagagacaagctagaaaattactacttgataagactctgccacagtctctccagaggggaagggagaaggggtggatcacagcaccatgaagcatgcttatgatttttcaaccaaactcccttgaacagcagttgtactccaatgtggtgaagctattttagcatctgtcattgtcctgctcagcacactccactcccttgctaaaagcttaaaaggtctctgggatcctaagcatatttaacaaagatttaaaatgctcaggcaccaggtagcctctggtggcgatgtctggacagagctgcagctggtgagcacagaaggggcttcttcacattgactcagataaacaacatgcaaaacagcagctaagcctctgactcaaattgaggcatcaaggccaagtcaaggtagtaagacatagcaatatcacaacccctcagctaaggggtctgatgcagatgcaggactttcgagtaagtcttgacaaaatgcacaacctggccaagcgtggtggctcacacttggaatcccagcactttgggaggcggaggtgggtggatcacctaaggccaggagttcgagaccagcttggccaacattgtgaaaccctgtctctactaaaaataacacaaaaattagccacatgtggtggcgagtgcctgtagtcccagctactcaggaggctgaagcaggagaatcacttgaaccccagccttttctccacaaggcagcagagtgattgtgtcggtgtggcgatccccacaacggcgtgcagaccctactcctggggccatccgtacccctctggcctccttcccaactcctcacaggctcactcccctggggcagtttcctggggacctgtccgccctcttgctgagctcctgcagttcccctttctcagggcaatctctccaccaccctggctcctgctgccaaccactgcttgtgctccttcccagtgctgagtagctcacatgctaaatgccctgtctcctccacaggactatgagcctcagggcaggctcggccacccatgcagagcccaggtgagaaggagtacgaggtccaagggtccagggagtgagacgacctgcggtgcacaagacatgctagggcagggtggtcgaggcagctccctgggcttctccttccctttggtggcactgctctctaaagctccactgatgggatggtgtgtgcatgaagggcaaaggaggcttgctattcttttaacttaataaagaaaagtgaaggtgtgactcaccagtcctaaaccagggtgtgtccaccttggcactattgacacttggggctgatcattatctgtcatgggaagggtggctctcctgtgcactgcagggaatccctggaataccctggcctttgccgactagataccagtagtactccctcaccacggttttgataacccaaaatatcctaagatgttgctcaaatgtccctggggcagtagcaaaatcaccccggctgagaacccctgtcctaactctaagggactgcagagaagggagccagagcctggagacatgaccagactcagctacagtcacaaggagaagcattcaaactgtggcctcagtaaggccagcaccagctcaccccactgacccttgatcacaacaggtgctaattcccaaagtccagtaattaaagtcctgggaaactctcaccacagggtggagcagtgggccctcagagaaaccccacgtacagctctttttacctatacctgacttgaagggccccttgtcacatgctgtccttcatccaaacatcaggggagttgggagagggacctcacctttgggggcttgaacgggtaatctgtaggaaagtggatggtcaggaagaaaacacctccttggtaaggactgtcattctggaaggatgagacacagaaagagatcagtgcatgtgctaagcccaaagtgcaagaagcaaaactggagtggtgcgctcagcagctactacctaccgggcccatgatggtggcctgccagtggaacactacaaaacaaaagagagacgggcatgtaagagaccccccaagaaacatgtcattctactgaaaacgcactgctaaattacagcgcactgtctacacaagatgcactcacttctgacaccaactgcaagactggggttccccaaaccacccaagatgcaataactgcctaggactcccagagctcactgaaagtggttgtgcttaagattgctggttatcacagggaaacaacataggttaacatcaggagggtccaaacgcagagtttctattcttctctctccgtggagtcaggatgtgttactctcctggcattgctgtatggcaacacacacagaacacccaatcaggaatgctcactggagcctccgtattcagaattctcattggagctccaccctgagagcatgactgacttatttgaatgcccataggactgatctcaggctccagtctccagctcctccaggcatgatccaagcccccaccttattttattttttagttttttgagatggtctcactctgccacccaggctggtgggcagtggcatgattatagctcactgcagtctcaaactcctgggctcaagctatccttctgcctcaacctcctgaggagctgggacaacaggtgtgtgccaccacatctggctaatttttttacttttattttttcatttttgtagagatggggtcttgctatgttgcccgggctaggctctcacctgaaatcacatggctggtctacttggtatggccattcctcaccctaaatcacattgttggtgtgcattaaagcttccagccaaacaaagacattcctatcaggtatggtatcttacagatcgccccctacgtgttaaggatgaaggccagatcttttggggacaagattaaattctttttgttgttattgttttgtagagatggggttttaccatgttgcccaggctgggctcaagaaatctgctagcctcagcctcccaaagtgctgggattacaggcgtgagacactgtgcttagccaagattaaattctttactacacaaatgccagtaactacaattcagtcagttctttgcacagaattaagccttggctaggcttcagccattttccttattgctctttataaacccttctattccttggttcttctcctgattcattgtgaagccctcttcaaagagtgtctctcaggagccaactgcccgtggccctggagcctcaagggtgctgccttcatctgagtcctctcctgcccaacccctgggcagtgccctgtgctctaggcactcagtaacaaggtcacgatgagcccctctcatgcttcccttccaggtcaccaccatttggtgagagtttagagccccctcttgctgcacatcacaccctctccagcatctcaggtgactttcactgctctacccattcccagaaaagctcctgtgtatcagcaaggctagcccagtatggcccaaacactcacattcaaggctcccaagtcatacaaatggtcccagggatattgactctagggccttggtggaaaatgcctactcacccacaggagtgggttgctgggatcatctgaagggcctgttattaccaagagaattctgtctcatatggattcatagtagatatggaattagcccagagtttcagacctggtcctgtcctgggtttcctgtcacctgtttaagtaccccacaggctctacacaacaggaggcctaggaaagcaccaaggtttggggtgggagcacaagtgcagggactaaagcagaagtttcccaagcccctagaggtgttcaaaagtagtcaaggtggcccatgagcccttttcaatatttcaaagaaatggtgctgaaaagaacacctttacctgtaataagcctgcctgagttaataaaaatatcacttttttttgcttt

SEQ ID NO: 16799 - protein, 127 aa, Homo sapiens
MKKSCYPRWNETFEFELQEGAVEALCVEAWDWDLVSRNDFLGKVVIDVQRLRVAQQEEGWFRLQPDQSKSRQHDEGNLGSLQLEVRLRDETVLPSSYYQPLVHLLCHEVKLGMQDKLRLLRMWFCSR

SEQ ID NO: 16800 - DNA, 2082 bp, Homo sapiens
gcagacacttggggtctggacgcaacggaggcgggagcgtgaacgcccctccagccttcgagtcgttcttgctcttcgagggcgagaagaagatcaccattaacaaggacaccaaggtacccaatgcctgtttattcaccatcaacaaagaagaccacacactgggaaacatcattaaatcacgtgcctgcttccccttcgccttctgccgtgattgtcagtttcctgaggcctccccagccacgctttctgtacagcctgcagaactgacagccacagtgtggaagaccctgtgccccttctggggtgaggagtaccaagtgcacctgccgcccaccttccacgctgtggctttctacgtcatggatgaggatgccctcagccgggacgacgttatcggaaaggtctgccttacaagggacaccatagcttctcaccctaaggatcatgaagaagtcatgctacccacgctggaatgagacgtttgaatttgagctgcaggagggggccgtggaggcgctgtgcgtggaggcctgggactgggaccttgtcagccgaaacgacttcctgggcaaagtggtgatcgatgtccagagactgcgggtggcgcagcaggaggagggctggttccggctgcagcccgaccagtccaagagccggcagcatgacgagggcaacctgggctccttgcagctggaggtgcggctgcgggacgagacggtgctgccctccagctactaccagccactggtgcacctgctgtgccacgaggtcaagctgggcatgcaggataagctgagactcctcaggatgtggttctgcagcagatgaggtgcgaacaaagcctgctctgccctgggcacccaggatggcactgagttctaaaaggcaaagggtatgtggtgaggggccaggctgaggccctggtgtggtaccatcatgggcagcagcaccatttgaggccgggtaggagagacgtgcagggcctggccccccaagagaccagcagacaaactgaggcggcagagagagagattccagtgtcaccaggaagactgcagatcataacaacaatggttgctgatttggcatcaaagaggtggcactgtcaaagccgtaattgctgaaaatggcaccaacatgctgcagctggagagagtgggtgaccaacatttgtttgaagaacagatgatgctctttgaatggctcagccaacagcccaaagttttaagggaagacctctctgccagcttctcttggacagtgtctcatgtaaaacctccaaggcacttacatagcatatttttgtgtccactctcttgctagtctgttgtacctggaataaaaaagcagaggaagtgacaccctcacttgaaatggtcacttcccttcaatgtgctgcagagaacaggactgatgtggggaatgctgctgctgctgcttgtcaaacatctacggctgatgggtgagtggaataaaggctttccctggagcaggagcacatcagacatggctgtaaacccccagctgggtgaacccctcatgtgtaaaccccaaactgttgattctccataactatctgctgtggaagatttaataatgcaacagacttcctccctttctttctcctgtcctacaatatggatgcagggaggacagagaagagacacacaaaggtcagtttgtactagttacaggccgtccagcacacaaactccagaacaagggcttgggaatctgcctaccggggtgtgcatcagtacagtcctcagcagctgttccgcccctctgtgtcctggcttttttgattgcttgccatggggaaagtatctgccttgtgtgcttgtggggaaactagagaagtctgtatgtaaagcacatggagcaggccaggcatccattgaagactatgcaggtgtgtgcacttactctcatcattgtaatgacacttgatgctatgagactataaattagagagatttatagttacaagaggcactgaaaaaaaatcacttttggtatgtctaaaatatcttgtaaaaagtgttaaaataaacaaacccagtcaattaaaaattttga

SEQ ID NO: 16801 - protein, 127 aa, Homo sapiens; identical to SEQ ID NO: 16799

SEQ ID NO: 16802 - DNA, 725 bp, Homo sapiens
agtgccttggaggttttacatgagacactgtccaagagaagctggcagagaggtcttcccttaaaactttgggctgttggctgagccattcaaagagcatcatctgttcttcaaacaaatgttggtcacccactctctccagctgcagcatgttggtgccattttcagcaattacggctttgacagtgctgctgcccatgatggtaccacaccagggcctcagcctggcccctcaccacataccctttgccttttagaactcagtgccatcctgggtgcccagggcagagcaggctttgttcgcacctcatctgctgcagaaccacatcctgaggagtctcagcttatcctggagggaattgggaacagtgtcactgggaagtgaaggcctagccctgtggcttccaccagtctcctcctgcagtgccacgtggtggcatttctcgcctcacaccaagaagcagcaagtggaaaatttcaggatacaaagcacataacaccccataagagatgattatgtttttagaagcaagagcaaaattatgaaacctctagagatttgggtcatgttactccatttgatgaagattctcactaccgcccgctcctcccataggagcctacactaagtccaagtgtgagccattcacagactagaacacaaggagggagagagactcttaaacgtaaataaaaatgcaattcactcacaactctaaatgata

SEQ ID NO: 16803 - protein, 88 aa, Homo sapiens
MLVTHSLQLQHVGAIFSNYGFDSAAAHDGTTPGPQPGPSPHTLCLLELSAILGAQGRAGFVRTSSAAEPHPEESQLILEGIGNSVTGK

SEQ ID NO: 16804 - DNA, 1270 bp, Homo sapiens
ttattagggctctggtggcggcggcggcagacacttggggtctggacgcaacggaggcgggagcgtgaacgcccctccagccttcgagtcgttcttgctcttcgagggcgagaagaagatcaccattaacaaggacaccaaggtacccaatgcctgtttattcaccatcaacaaagaagaccacacactgggaaacatcattaaatcacagtgtgacctaaaggacccgcaagtgctatttgctggctacaaagtcccccaccccttggagcacaagatcatcatccgagtgcagaccacgccggactacagcccccaggaagcctttaccaacgccatcaccgacctcatcagtgagctgtccctgctggaggagcgcttccgggacagccacagtgtggaagaccctgtgccccttctggggtgaggagtaccaagtgcacctgccgcccaccttccacgctgtggctttctacgtcatggatgaggatgccctcagccgggacgacgttatcggaaaggtctgccttacaagggacaccatagcttctcaccctaaggatcatgaagaagtcatgctacccacgctggaatgagacgtttgaatttgagctgcaggagggggccgtggaggcgctgtgcgtggaggcctgggactgggaccttgtcagccgaaacgacttcctgggcaaagtggtgatcgatgtccagagactgcgggtggcgcagcaggaggagggctggttccggctgcagcccgaccagtccaagagccggcagcatgacgagataagctgagactcctcaggatgtggttctgcagcagatgaggtgcgaacaaagcctgctctgccctgggcacccaggatggcactgagttctaaaaggcaaagggtatgtggtgaggggccaggctgaggccctggtgtggtaccatcatgggcagcagcaccatttgaggccgggtaggagagacgtgcagggcctggccccccaagagaccagcagacaaactgaggcggcagagagagagattccagtgtcaccaggaagactgcagatcataacaacaatggttgctgatttggcatcaaagaggtggcactgtcaaagccgtaattgctgaaaatggcaccaacatgctgcagctggagagagtgggtgaccaacatttgtttgaagaacagatgatgctctttgaatggctcagccaacagcccaaagttttaagggaagacctctctgccagcttctcttggacagtgtctca

SEQ ID NO: 16805 - protein, 77 aa, Homo sapiens
MKKSCYPRWNETFEFELQEGAVEALCVEAWDWDLVSRNDFLGKVVIDVQRLRVAQQEEGWFRLQPDQSKSRQHDEIS

SEQ ID NO: 16806 - DNA, 422 bp, Homo sapiens
tttccctgcagacctcagaccagggttcaagtctccaaggggcaacctgggctccttgcagctggaggtgcggctgcgggacgagacggtgctgccctccagctactaccagccactggtgcacctgctgtgccacgaggtcaagctgggcatgcagggcccagggcagctgatcccactcatcgaggagacaaccagcaccgagtgtcgccaggacgtggccacgaacctgctcaagctcttcctggggcaggggctggccaaggacttcctggacctgctcttccagctggagctgagtcgcaccagataagctgagactcctcaggatgtggttctgcagcagatgaggtgcgaacaaagcctgctctgccctgggcacccaggatggcactgagttctaaaaggcaaagggtatgtgg

SEQ ID NO: 16807 - protein, 53 aa, Homo sapiens
MQGPGQLIPLIEETTSTECRQDVATNLLKLFLGQGLAKDFLDLLFQLELSRTR

SEQ ID NO: 16808 - DNA, 2020 bp, Homo sapiens
gtgatcggctttctgccttggctttctgatgcagcacattttaagatttgcctttaaagctttgagccttgagattaggttagttaggaagaggacaacaaagggaagagattattctaataaaacttccacagagggaagaaaattgaggagcttcagatctctaaagccaaattcaacctgatctttctaggttggttataaagctggtccacttccaggaagtgatgtgtaggtgaataggaacaaaaggtgaagaagcagtaaaactgtgaccaatagccggaattacaggcatgtgccaccatgctgggctaatttttgtatttttagtggagacggtgtttcaccatgttggccaggctgttcttgaactcctggcctcaagtgacccgcccacattggcctcccaaagtgctgggattacaggcgtgagcccccgtgcccagcaaggattgctgttttaattcttgtatcttcgttgcttctttggtctttgcttaaacaaaacaataaagcttaatagttggggagaatgctgttaccagtgtcctctaggaaggctgttagcatatggctctactgagcagcagtgccatctggtgcctgagatcatgtgcttcaggcagttgtcacactgcatctacagccaagcatcacagaaacacttcactcatgtggtcagggaaggtgggactgattcacatgttagagacaggtcagatgggaaaattaaggcccaacttggtgttggggaataaccatactctggtctttcaagtgtagtagctgatgattcccaagaaactgatgaattttctgagtccagacaaaatttccccaagcctgctctctctgttggatatacataatagagaaagtcaaatcagccctttggggtttgtggtaaaaattcactcacccattgaagcctaaggtggctttgtaccttccagatctctcagcaaatcccctgggcagaaatgtcacctgcttgccatgtctttgaggggttcaggtcagcctggagaacaggctccttaggtcaaaaaccttgttttaagagccactgtggtacagtcaatgtaacccacttgtgcagaagccatgcttccaaggaaggtctcaggttgacaactagacatcaaatctgagaagccaactgtggagtaatgtgtttttttctctgtggacaagagtgatcagaaaggtgcttgatcttgaacaattgatccatgatgaaaaaatgaccattagctctcccccagaagcgtctgtgtttgctgaatggagctgagattttgatccgctatcagactccagaaagatccaggagttccaagaacatggcaaagagtcaaaatcttaggacaaggaattaaaatgccagaatgcaaatgtccaacaggcctggtagctcacagctatcaacaccctagaattccacactgcctcactgcagttgctcaaggatgggtatgtttctgtctctgaaattcgggaaaaagccttaagtgccagagaaggtgcttccaagactgtctgcagaattcctttcctagggtctgtctctggtacccaaaagggcagagaaggaaccctaagattagcatagagccactcatctctcctcccctccccaccccttcttcccctgcttccattccccatggctctctcctctgactgtgaaacacttcctctccagcagtgttgggaaagttctggacctctactggatctagccataaatggtggtcttcagaaaaatggagattgtggctgccagcacccacaagacagcagcctcatgccatgcaggcagcaagccatcctgaacagcgttcctcccagagtctgtttcctcacctgctgttcactggtgagaggaaaagggacttgttctcccttgaccagttttctagttttcctgttcccaccctggtctttgcctgatgacagagaaactttctaaaaaaaaacaaaaacaaaagctataaaaaatctgcaaaacacccta

SEQ ID NO: 16809 - protein, 101 aa, Homo sapiens
MALSSDCETLPLQQCWESSGPLLDLAINGGLQKNGDCGCQHPQDSSLMPCRQQAILNSVPPRVCFLTCCSLVRGKGTCSPLTSFLVFLFPPWSLPDDRETF

SEQ ID NO: 16810 - DNA, 1099 bp, Homo sapiens
gatctgagttcaagtaattctcctgcctcagcctcctgaggagctgggattacaggcatgcgccaccacacctggctcacagggtgagaccctgtctctaaaaacaacaacgacaaaaatgacacaatagtgagggcacaggccccaggtcactgacttagattctaatcccagctcttccaactgctgtttcttcacctgctgagcctcagtttccccatctgtcattggggataccagcccctgcttcacgggtgcctaggggattcccaggagattatggaggtgcctcaaggtgcctggtagggctgagggtggagggtatgggggttcagggccgtgtccctggctgagctgaccccacaggtttcagcgggtgggcccacctgacggaggttgaccctgatgaggaggtgcagggcgagatccacctgcggctggaagtgcgcccaggggcccgggcctgccagctacgctgctctgtgctggaggccagatcatgaagaagtcatgctacccacgctggaatgagacgtttgaatttgagctgcaggagggggccgtggaggcgctgtgcgtggaggcctgggactgggaccttgtcagccgaaacgacttcctgggcaaagtggtgatcgatgtccagagactgcgggtggcgcagcaggaggagggctggttccggctgcagcccgaccagtccaagagccggcagcatgacgagggcaacctgggctccttgcagctggaggtgcggctgcgggacgagacggtgctgccctccagctactaccagccactggtgcacctgctgtgccacgaggtcaagctgggcatgcagggcccagggcagctgatcccactcatcgaggagacaaccagcaccgagtgtcgccaggacgtggccacgaacctgctcaagctcttcctggggcaggggctggccaaggacttcctggacctgctcttccagctggagctgagtcgcaccagtgaggcctgggaaggagctgggcccagaacgctgggagtgcaggtctccctacttctctactttgacttcactactgtttacattagaaaaagtgaatttacataa

SEQ ID NO: 16811 - protein, 199 aa, Homo sapiens
MKKSCYPRWNETFEFELQEGAVEALCVEAWDWDLVSRNDFLGKVVIDVQRLRVAQQEEGWFRLQPDQSKSRQHDEGNLGSLQLEVRLRDETVLPSSYYQPLVHLLCHEVKLGMQGPGQLIPLIEETTSTECRQDVATNLLKLFLGQGLAKDFLDLLFQLELSRTSEAWEGAGPRTLGVQVSLLLYFDFTTVYIRKSEFT

SEQ ID NO: 16812 - DNA, 1326 bp, Homo sapiens
aaaatgctgggattacaggcgtgagccaccatgcctggacttccatctggtaattttctgtcttgaggaggaactaccctgccctggcagaggctggggatgaaggaggaagagagagccggtcccctggataaagagacccctccctggcgatgccagattcactgggctggcagattctgcccccaaacctgtccaaccagttgtttgagaggagggggtatctgggaggggcagcaggagatgccaggaacagcttcccctagcgcagcacagactacagacgggggagcctctggggctgcagacactgcagacggacggacagacagatggacaacagctggaggcttggccccagccatagggctctctgcgggacagtcccagctgctagtgttgctgttgctgctactgacccgtgtccagcctgggacagacgtggctgccccagagcacatcagctatgtgccccagctctcaaacgacaccctggcggggaggctcaccctgtccaccttcacgctggagcagcctctaggccagttcagcagccacaacatctctgacttggataccatctggctggtggtggccctcagcaacgccacccagagcttcacggccccacggacaaaccaggacatccctgctcctgccaacttctcccagaggggctactatctcacactgagggccaaccgggtgctgtaccaggccagaggccagctccatgtcctccgtgttggcaatgatacccactgccaaccaacaaaaattggctgcaaccatcccctaccaggaccgagcccctacagggtgaagttcctggtgatgaatgacaaaggacccgtggctgaaacaaagtggtccagcaacactcgcctgcagcaagcccaggcacttcgggctgtccctggcccccagagcccgggcaccgtggtcatcatcgccatcctgtctatcctcctggccgtcgtcctcacggtcctcctggctgtgctcatatacagctggacagccacagtgtggaagaccctgtgccccttctggggtgaggagtaccaagtgcacctgccgcccaccttccacgctgtggctttctacgtcatggatgaggatgccctcagccgggacgacgttatcggaaaggtctgccttacaagggacaccatagcttctcaccctaagggtttcagcgggtgggcccacctgacggaggttgaccctgatgaggaggtgcagggcgagatccacctgcggctggaagtgcgcccaggggcccgggcctgccagctacgctgctctgtgctggaggccaggtga

SEQ ID NO: 16813 - protein, 408 aa, Homo sapiens [sequence omitted]

SEQ ID NO: 16814 - DNA, 734 bp, Homo sapiens
gtgaagttcctggtgatgaatgacaaaggacccgtggctgaaacaaagtggtccagcaacactcgcctgcagcaaggacagccacagtgtggaagaccctgtgccccttctggggtgaggagtaccaagtgcacctgccgcccaccttccacgctgtggctttctacgtcatggatgaggatgccctcagccgggacgacgttatcggaaaggtctgccttacaagggacaccatagcttctcaccctaagggtaagttctcccttccctcccgcactggtctgcccagtccctggcctccctcccactcagagacctcccctctaggctccgtctggtctcctgctcagggaaagccatttctactctccccagaagccggggccacgttctgtactcctggcctctgttctgcagcatgttcccaagcctggttgttactgcctcttccctagggtgaagaggggctgctatgggtggaatctgaggcctctgctggcagaagaaggggcctccttacactctattgctgaagcatagggaccccttctccaaatcaggccagctccttctgtaacccatggggtctcctccatctgggccctagtactactgtgtcctaagtctgaagggttggcctagagccagtccaggctggagatccctttcaattatttctgggatgcagacattgttttgtgttattgtttttacaatttttatatagtttttta

SEQ ID NO: 16815 - protein, 94 aa, Homo sapiens
MDEDALSRDDVIGKVCLTRDTIASHPKGKFSLPSRTGLPSPWPPSHSETSPLGSVWSPAQGKPFLLSPEAGATFCTPGLCSAACSQAWLLLPLP

SEQ ID NO: 16816 - DNA, 212 bp, Homo sapiens
agggcctgggggtggcctgggcacatgctgagggttctctcctgcaggacagccacagtgtggaagaccctgtgccccttctggggtgaggagtaccaagtgcacctgccgcccaccttccacgctgtggctttctacgtcatggatgaggatgccctcagccgggacgacgttatcggaaaggtctgccttacaagggacaccatagcttc

SEQ ID NO: 16817 - protein, 61 aa, Homo sapiens
MLRVLSCRTATVWKTLCPFWGEEYQVHLPPTFHAVAFYVMDEDALSRDDVIGKVCLTRDTI

SEQ ID NO: 16818 - DNA, 1020 bp, Homo sapiens
ttattagggctctggtggcggcggcggcagacacttggggtctggacgcaacggaggcgggagcgtgaacgcccctccagccttcgagtcgttcttgctcttcgagggcgagaagaagatcaccattaacaaggacaccaaggtacccaatgcctgtttattcaccatcaacaaagaagaccacacactgggaaacatcattaaatcacagtgtgacctaaaggacccgcaagtgctatttgctggctacaaagtcccccaccccttggagcacaagatcatcatccgagtgcagaccacgccggactacagcccccaggaagcctttaccaacgccatcaccgacctcatcagtgagctgtccctgctggaggagcgcttccggacgtgcctgcttccccttcgccttctgccgtgattgtcagtttcctgaggcctccccagccacgctttctgtacagcctgcagaactctgccccagagcacatcagctatgtgccccagctctcaaacgacaccctggcggggaggctcaccctgtccaccttcacgctggagcagcctctaggccagttcagcagccacaacatctctgacttggataccatctggctggtggtggccctcagcaacgccacccagagcttcacggccccacggacaaaccaggacatccctgctcctgccaacttctcccagaggggctactatctcacactgagggccaaccgggtgctgtaccaggccagaggccagctccatgtcctccgtgttggcaatgatacccactgccaaccaacaaaaattggctgcaaccatcccctaccaggaccgagcccctacagggtgaagttcctggtgatgaatgacaaaggacccgtggctgaaacaaagtggtccagcaacactcgcctgcagcaagcccaggcacttcgggctgtccctggcccccagagcccgggcaccgtggtcatcatcgccatcctgtctatcctcctggccgtcgtcctcacggtcctc

SEQ ID NO: 16819 - protein, 52 aa, Homo sapiens
MNDKGPVAETKWSSNTRLQQAQALRAVPGPQSPGTVVIIAILSILLAVVLTV

SEQ ID NO: 16820 - DNA, 497 bp, Homo sapiens
agacacttggggtctggacgcaacggaggcgggagcgtgaacgcccctccagccttcgagtcgttcttgctcttcgagggcgagaagaagatcaccattaacaaggacaccaaggtacccaatgcctgtttattcaccatcaacaaagaagaccacacactgggaaacatcattaaatcacgtgcctgcttccccttcgccttctgccgtgattgtcagtttcctgaggcctccccagccacgctttctgtacagcctgcagaactctgccccagagcacatcagctatgtgccccagctctcaaacgacaccctggcggggaggctcaccctgtccaccttcacgctggagcagcctctaggccagttcagcagccacaacatctctgacttggataccatctggctggtggtggccctcagcaacgccacccagagcttcacggccccacggacaaaccaggacatccctgctcctgccaacttctcccagaggg

SEQ ID NO: 16821 - protein, 124 aa, Homo sapiens
MPVYSPSTKKTTHWETSLNHVPASPSPSAVIVSFLRPPQPRFLYSLQNSAPEHISYVPQLSNDTLAGRLTLSTFTLEQPLGQFSSHNISDLDTIWLVVALSNATQSFTAPRTNQDIPAPANFSQ

SEQ ID NO: 16822 - DNA, 1500 bp, Homo sapiens
ttattagggctctggtggcggcggcggcagacacttggggtctggacgcaacggaggcgggagcgtgaacgcccctccagccttcgagtcgttcttgctcttcgagggcgagaagaagatcaccattaacaaggacaccaaggtacccaatgcctgtttattcaccatcaacaaagaagaccacacactgggaaacatcattaaatcacagtgtgacctaaaggacccgcaagtgctatttgctggctacaaagtcccccaccccttggagcacaagatcatcatccgagtgcagaccacgccggactacagcccccaggaagcctttaccaacgccatcaccgacctcatcagtgagctgtccctgctggaggagcgcttccggtcccctcacctgatggtcccaacacttcatcatccaccacctcctggagggggtaccccgaggtgctccgctggggactctgctcattctggcggtgcggttgacggctggtcgtgatctttcccgtaatctgtcccctcttacggaacctagtctccgttctgtccatggccttcttctggacactgctaggatccagaagagtatgttatcaattctcaagcctaggagaagtcaggagtggagaacagctctgagaagatactgttgtccaactgatctccaggcaccacggagtccggtccctccaatcaggaaggtcggaatctctgatgtcatcgttcatgccaacctggcaaccagtttgaaaaaaaaacacatgtaactgccaggctgatctcttgtcctggagatcctgggtgaatggtatctcctgccactgtcccaacctcagaccattgtccaaaagcatcttcagggactccacatccctctgttccctgtcccagcagaggctgtgtcctctccactcaaagcctgaagcatgttggggtctcttcgtctctgtacgtgcccatttcagagtccagtctggtgggagagggaacagagtgggaaagaaaactagggtaagcagaaacgatgaaaccttataagagtgagattatcatgtacaagagtgagattatcatgtacaagagtgagattatcatgtacaagagatcccaggaatactgacttgatgaaaaagtcacatcagagcactcagtttggcagagcttttctgctgaatgtttactcacattcactgtccaagattctgtactgggggtacatacgtcctctgccctaaggcaattttgagtccaagagacattttgaggcctaaaaatcataggaaactgcccctgagctcacacatatttccaatggagctcacacatatttccaatggtgtccccaatttcagggaatccatggattacctaagccagcccctccagttcggctaagaaactctagtctatatatcaagttttgtatcatatgtattgctctgaactcagaaatttcccttccatttatggattctatgaataaaatatcacatgtac

SEQ ID NO: 16823 - protein, 73 aa, Homo sapiens
MFTHIHCPRFCTGGTYVLCPKAILSPRDILRPKNHRKLPLSSHIFPMELTHISNGVPNFRESMDYLSQPLQFG

SEQ ID NO: 16824 - DNA, 2872 bp, Homo sapiens
ctgtaatcccagccacctgagaggctgaggcagaagaataaatggaatccaggagatggatgttgcagtgagctgagattgcaccactacactccaacctgggtgacaaagcaagattctgtgtcaaaacaaaacaaaacaaaacaaaaaaggagggactcagagagccagggaccagggaaggacatgaagcagcgttcggaggacagagagagagaagaatggggaggggaaggagcggcacatggggttgagcagaggagaaaatcagaaagatggcttagagaagtcagcagtctgcgagtctggggaggatggagagtggtttggggttttgggtcggggtctaaggtgatcagatgcagaagcattacacagtggcctggtttctttactcagcccctggggtagatcccagccccccatgtaggtcccttggctggaaaaggaagagggagtggtcagatgaatctgaggaggagccggagaaggagctcgcccctgagcctgaggagacctgggtagtggagacgctgtgtgggctcaagatgaagctgaagcaacagcgagtgtcacccatcctccttgagcaccacaaggacttcaacagtcagcttgcccctggggtagatcccagccccccgcataggtccttttgctggaaaaggaagatggagtggtgggacaaatctgaggagtcggaggaggagccacggaaggtgctcgcccctgagcctgaggagatctgggtggcggagatgctgtgtggcctcaagatgaagctgaagcgacggcgagtgtcgctcgtgctccctgagcaccacgaggccttcaacaggctgcttgaggatcctgtcattaaaagattcctggcctgggacaaagatctgagggtgtcggacaagtatctccttgctatggtcatagcgtatttcagccgagccggcttcccctcctggcaataccaacgccttcatttcttcctggctctctacctggccaatgacatggaggaggacgacgaggactccaaacaaaacatcttccacttcctgtatgggaagaaccgctctcgcatacccttgctccgtaagcgtcggttccagttataccgttccatgaacccgagggccaggaagaaccgctctcacatacccttggtccgtaagcgtcggttccagttacgccgttgcatgaacccgagggccaggaagaaccgctctcagatagtcctgttccagaaacgtcggttccacttcttctgttccatgagctgcagggcttgggtttccccagaggagttggaggagatccaggcttatgacccagagcactgggtgtgggcgcgagatcgcgctcgcctttcctagagctccagggaccgtggaggcctgaggtcatcggcctgagagaagaacaccggacccaggggagatgtggattttcagcaggaactttattccaatgctaatggcagacaccaggaaggaggagaggaaccatttgtgcagatcatctagaagaacctggaccattcttgatggagctgaatacagtgatcacgttgtcctcctaggagcaggggtggggggagggggatggggtccttctaggagtccttggagaaaagtaagaaaccaggagtgtttccagttccaccctttcctggggcaccaccaccctttttatattgctgaattccaacctccctggggcggaacctggaggtcctgtttcttacggacttggttgccacagtccaggagcatttgaaggcacaatgcaggggctcagattggcacagaattcttttgtgaaatatcagtgccacagattgtaacagatagcttcatgcacactctgcattttattggtttgtttggaaaatgttggccattgaattattcatagatttatttcaaatagtttggaaattgttgtacttttgaaaacatgctgttcctgtagttttttgatgagagttatagttgttatatatacataaagataattttcttttcatttttgagacaattctttttatcctaaatattttatcatctttaaatttgtttctgtattattatatgtgctcctgaagcgagcactctttttatctatgatacttccataataatctcttctatttatagctattggtagttcccctaaattctgacgatagaaatttttatttgctgtttaggtttgtgactgaattgtgagaattcagttgtgatttttaacatgtgtcagatatatatactaacacgtctaatatatactattttattggtttattttgaaaaacatgggtatagaattatttaaatattattttatttatttaaatatttattaaatatatttatttatttaaatgttattattactttaaatattattttaaatattttggaaatactggtatttttgaatagatgctgtttctataaagctgtgtgatggtattataactgttatatacacatacatataattttgttttcctttttaagagaggattcttttcatcctaaatcttttacctttcaatctttgtatctattattacacgtgctgctgaagggagcatggtttttatctatgatacttagttaacatatatattacatttatagctatgtagtagttcccctaaattcttgtaaaaataaatttttatttgatatttcatctatgtttgaaatgtgagaattcagatgtaattttttaccttgatttggcatgtttgtatgttactttaaagaggatgtgtgttctaaaggaggacatgagctgtgtgttttcaagagaacaatagagtgtgtctcttggggaaacgtaataaaaatgaacttttctcaccttc

SEQ ID NO: 16825 - protein, 336 aa, Homo sapiens; identical to SEQ ID NO: 1950

SEQ ID NO: 16826 - DNA, 2887 bp, Homo sapiens
attttatctgctgcctttcattctataccctgcttctgaaccatcgtgttcaactgtgaaactcacactttggtgaccatgactccaaaactcacttaatacacccaaggtcagccccagtgatctgcttcatagcaaggactttgggtgggtctgcccagggagtagggcaccctcagagaatgtggctttggacttcatcacagctgaggccttttgtgtcacttaagatctaaacttgtaaccatgctagatgtgtttctaatgtgacaacatcacgaaccacaagtccagaagcctaatccttaatcctacctcctcatgatgaagtctcatgctctgtgctcaacgtggttagctgcacaagatgtaaaccaaagcttcactgaaccctcgacccaaatcggtaactcaagtgcgtcaatcataatgaacctccccaaactcagtatttatgattatttttgaggcagggtctcactctgtcgcccagactggagtgcagtggcaggatcagggctccgtgcagccccgaccttccaggctccagcaatcctcccgcctcggcctcctgagtagttgggagtagagatgcgtcccacattgcctggctaatttttgtatttttgtggagaggggatctcgccacgttgcccaggcttgaagccggatcaagcaattgggttcttcggatttccgaaatagaccccaatattctgcctttaccccggaggatgcagatgtaccttctctcaggccgatgacctcaggcctccacggtccctggagctctaggaaaggcgagcgcgatctcgcgcccacacccagtgctctgggtcataagcctggatctggaaaaacaaacgccctttgagaagacggggactcgccaggatacccctctctcccctcatccagcctccagcccacccaattcctccccacctcctccacctccccaggccccactcacctcctccaactcctctggggaaacccaagccctgcagctcatggaacagaagaagtggaaccgacgtttctggaacaggactatctgagagcggttcttcctggccctcgggttcatgcaacggcgtaactggaaccgacgcttacggaccaagggaagtggaagatgttttgtttggagtcctcgtcgtcctcctccatgtcattggccaggtagctgaggacaggaatcaggttgctgctcaggggcaccaccaggagagacctccggctgaggtcagcttcccagagaggaagagtaaagaggacaaataggtgaaagaataaatgaaaggctggaatcccacttcccccgctgtcccagggcattggatattgacggataggaggcagcaaaccactcacagagccaggaagaaatgaaggcgttggtattgccaggaggggaagccggctcggctgaaatacgctatgaccatagcaaggagatactgatggagagaaaggaacacagagagggagaggtcacatcttggaagaggaagattgtggagagggggaatgagggtctggggaggggctgcccatcagagaagggacctcagtgttggggtgactgtactcatttggaaattgcgggatggaggggtattcgaaggtcggatgcaaatccgagaagccagaggaagggttttgggtgatgctcccaggatggtgggctccgatgggatctttggagggggtgtgtctaggttggctggtgtcaggagggtcttttgtgtgccaggcagagaactgtcccgaagagctgagagtagaggggccaggagcttcagggctgcggccagactgtggcccagagctcagatcccaaaggacccataggagaggcaggggccactcattcactctgcaagagaccagcagaatcctgagggagatgctgacaaatcataaaaagaccaagaatagccgggagtggcggctcaagcctgtgatcccagtactttttgagaggtggagacaggaggatcatgtgagcccaacagttcgagaacaacctgggcaacatagtgagaccctgtttccacaaacatttcaaaaattagttgagcatggtggcatgtgcctagtcccagctcctcaggaggctgaggaaagaagattgcttgagcccaggaattagaggctgcaatgagctatgatcatgccactgcactccatcctggggagcagagctagattctgtctcacaaaaaaaaaatttgtgggtgccaagactcaagaccatgggagctggtcgggcacagtggctgacgtctataatctcagcactttgggaggccaaggtgggtggattgcctgaggtcaggtgttcaggaccaacctggccaacatggcaaaaccccgtttctactaaaaacacaaaaattagccaggcgtggtggttcatgtctgtaatcccagctgcttggaggctgaggcaggagaatcgcttgaacccaggaggcatcggctgcagtgagtgaagatcgagacactgccctccagcctgggcaacagagcaagactctgtctcacacacacaaaaaaaaaaaaaaaaaaaagactgtaggagcatctggtgggaggtggtggagggagaactgtgggtttggaagctgcgccctccccccagccatgcgttggaacaggaacagttacatggagaacaaccttaccttgtccgacaccctcagatctttgtcccaggccaggaatcttttaatgacaggatcctctgtgattagagagcagatgtcagtgtgagaagcaggacagggtttccgtgggagcagcagggcagcgaggagaagtgtgcctcccggggggaagtctcaggattgtggccgcgggtgaggtggatgggagaggg

SEQ ID NO: 16827 - protein, 34 aa, Homo sapiens
MQRRNWNRRLRTKGSGRCFVWSPRRPPPCHWPGS

SEQ ID NO: 16828 - DNA, 236 bp, Homo sapiens
caatatccaatgccctgggacagcgggggaagtgggattccagcctttcatttattctttcacctatttgtcctctttactctgtgtacaaaaaagagaggattatactatcatagactgttgtttctaaacagaaactcaggctgggcacagtggaatacgcctgtaatcccagcactttgggaggccgaggcaggcaagagaactctttgaacccaggaggtggaggttgcagt

SEQ ID NO: 16829 - protein, 67 aa, Homo sapiens [sequence omitted]

SEQ ID NO: 16830 - DNA, 786 bp, Homo sapiens
ttattagggctctggtggcggcggcggcagacacttggggtctggacgcaacggaggcgggagcgtgaacgcccctccagccttcgagtcgttcttgctcttcgagggcgagaagaagatcaccattaacaaggacaccaaggtacccaatgcctgtttattcaccatcaacaaagaagaccacacactgggaaacatcattaaatcacagtgtgacctaaaggacccgcaagtgctatttgctggctacaaagtcccccaccccttggagcacaagatcatcatccgagtgcagaccacgccggactacagcccccaggaagcctttaccaacgccatcaccgacctcatcagtgagctgtccctgctggaggagcgcttccggacgtgcctgcttccccttcgccttctgccgtgattgtcagtttcctgaggcctccccagccacgctttctgtacagcctgcagaactccctgcagctcatggaacagaagaagtggaaccgacgtttctggaacaggactatctgagagcggttcttcctggccctcgggttcatgcaacggcgtaactggaaccgacgcttacggaccaagggaagtggaagatgttttgtttggagtcctcgtcgtcctcctccatgtcattggccaggtagctgaggacaggaatcaggttgctgctcaggggcaccaccaggagagacctccggctgaggtcagcttcccagagaggaaggtaagggaccgttcctagctcaggactggcacccaccctgcagagag

SEQ ID NO: 16831 - protein, 34 aa, Homo sapiens; identical to SEQ ID NO: 16827

SEQ ID NO: 16832 - DNA, 1420 bp, Homo sapiens
gggctctggtggcggcggcggcagacacttggggtctggacgcaacggaggcgggagcgtgaacgcccctccagccttcgagtcgttcttgctcttcgagggcgagaagaagatcaccattaacaaggacaccaaggtacccaatgcctgtttattcaccatcaacaaagaagaccacacactgggaaacatcattaaatcacagtgtgacctaaaggacccgcaagtgctatttgctggctacaaagtcccccaccccttggagcacaagatcatcatccgagtgcagaccacgccggactacagcccccaggaagcctttaccaacgccatcaccgacctcatcagtgagctgtccctgctggaggagcgcttccgggtgagggcggggcctggaggggcagacggggtgggctggacactggcccgtgtgcccaggcctgggacagccctggcctgtttcttcggaggtcctgggggagaggcggcggtgatggaagagcagggacttccaccacaggctccaggacatgtggactgaggggctgtggagtctgggcctgtggctcccgtctgccccatgggacttctgtagtgctgcagggtccctcgggtgctgtgggccagatcagggcggggacctactgtcctttgggggtgctcttctatgtcccttgtcggtgattggcaaggcctggtccttccaggcctctgggaggcagctcacaccagggtggcccacacctgttcctggcagggcgcctgggaatctagaacagtttagaggggaaagagccacagcaaagaaaagccgaggcagggtgatcacgaggtcaggagttcaagaccagcctagcaaacatggtgaagccctgtctctactaaaaatacaaaaattagctaggcatggtgtcatgtgctgtagtcccagctactcaggaggctgaggcaggagaatcgcttgaacccgggaggcggaggttgcggtgagccgagattgtgccactgcactccagcctaggtaacagagcaggactccatctcagtcaatcaatcaatcaatcaatctcagcggttgaactacccttgacatggttcagctctgtatccacacccaaatctcatgtcaaattgtaattcccagtgttgtgggagggacctggtgggaggtgattggctcatgggggccgacttcccccttgctgttctcgtgatattgagtgagcgcttgtgggatctggttgtttaaaagcttgcagccctcccacttcactctctctgtctctcctgctccaacatggccagacgtgcctgcttccccttcgccttctgccgtgattgtcagtttcctgaggcctccccagccacgctttctgtacagcctgcagaactgtgagtcaattaaacctcttttcttcat

SEQ ID NO: 16833 - protein, 138 aa, Homo sapiens
MWTEGLWSLGLWLPSAPWDFCSAAGSLGCCGPDQGGDLLSFGGALLCPLSVIGKAWSFQASGRQLTPGWPTPVPGRAPGNLEQFRGERATAKKSRGRVITRSGVQDQPSKHGEALSLLKIQKLARHGVMCCSPSYSGG

SEQ ID NO: 16834 - DNA, 4749 bp, Homo sapiens
accaacaccctgttccggagcaactctctggcctcaaagtccatggagtcttttctgaaggtggccgggatgcagtacctgcacggcgtcctgggccccatcatcaacaaggtgtttgaggagaagtacgtggagctggaccccagcaaagtggaagttaaggatgtagggtgttccgggctgcaccgcccgcagaccgaggccgaggtgctggagcagagcgcgcagacgctgcgcgcccacctgggggccctgctgagcgcgctcagccgctcggttcccgcgtgccccgccgtggtgcgcgccaccttccgccagctcttccggcgcgtgcgcgagcgcttccccggcgcccagcacgagaatgtaccgttcatcgccgtcaccagcttcctgtgcctgcgcttcttctctcccgccatcatgtcgcccaagctcttccacctgcgggagcgccacgcggacgcccgcaccagccgcaccctgctcctgttggccaaggcagtccagaacgtgggcaacatggacacgccggcttccagggccaaggaggcttggatggagccgctgcagcccaccgtgcgccagggcgtggcgcagctgaaggacttcatcaccaagctcgtggacatcgaggagaaggacgagctggacctgcagcggacgctgagtttgcaggcgccacctgtgaaggaggggccactcttcatccacaggaccaagggcaagggccccctcatgtcctcctccttcaagaagctctacttctccctcactaccgaggccctcagcttcgcgaagacgcccagctccaagaaaagcgccctcatcaagttagccaacatccgggcagcagaaaaggttgaggaaaagaactttggcagctcgcacgtcatgcaggtcatctacacggacgacgccggcaggccccagactgcctacctgcagtgcaagtgtgtgaatgagcttaaccagtggctgtctgtgctgcggaaggtgagcatcaacaacaccggactgctgggctcctaccaccctggcatcttctgtggggacaagtggagctgctgccaccaaaaagagaagacaggtcagggctgcgataagacccggtcacgggtgaccctgcaggagtggaatgaccctcttgaccatgaccttgaggcccagctcatctaccggcacctgctgggcgtggaggccatgctgtgggagaggcaccgggagctgagcgggggtgcagaggcaggcacggtgcccacgagccctggcaaagtccccgaggactcattggcccggctgctccgggtgctgcaggacctccgcgaggcccatagctccagcccggccggctccccaccctcagagcccaactgcctcctggagctgcagacgtgaggcccgccctacgctcccttgctgagtcccctgccaagcgctcggagcccctccaggacactctgcaccccctcaccccggtcctcctcattagggtgcagggcctaggtctcttccaagtgggggaggggggagagtcaggaataaggggatccccagaagtgcagagctgagcaggcttgggcctgtcatggctggcctgaagtgtccccagctccctacagccgctgtagccatcactgcctctccagggaccctcctctcctgcctaggacagacccagccagaaccactgctaggatgggccacacccaggggtctggcctccagggacctagagaatgggagggagaacggggccccaggagacccggccgccaccccacccgctacccttgggtgccacagggctgtgctgttgccaacagtaaacctgctgttactgtccaggctctggggtcttgtgatgagggtctggggagaaagtgggcccggggggaccccggaggctgtcggtggatgtgccgatgatggggctgacagtatgggctctgggcatccctgttcccccctctttcttccccccactcttctggggtcgggggttcctttcccttcccagttgctgtccctgggtcccctctttcatgtcccacaggccacagagcccagtgtgtccaaccagctgttctctcctcaaagcagcccccaagcaagtcccttctctagggtgtccctgaggacagcacagatgcgggactcagagaccccattcctcttcacgcagcccttaccccaagccctctagctgtgtggctggcagtgttggccacgtaggggctcccatccccccaccattgtgtcacataggctgccaggctcagctcccagctgcgtccacagtgacctggatcagggtggggacaaggactggaccctccttctccagaaggccttcagctcttgccttgccatgcagtcacctccttccccctctgaccccagatcccaaaggtgcaccgttgccccagcccctttctggccccatggggtttctctgatgccttcatcatagaggcccggggctggtccgatggttggcaaaacttgactccggcccagtccccactcttggggacttagaacccctggtgtcctgggatctggcctgcctttctttggtcagtccctgtggtcccccaccagctccccctcccatagggctgcccaccaagccctgcccccagcccaagaggagcccccactgcctgcggggcagtgatgtctggccaccggctcacaccaatgacttggtcctggggtggcagaagcagcaggtgacaggagcagggcccctgtccctctcttctggccctgtggtacccaggccacacgttgtgcccgctcttagggctgaccggctgcagggaccaccagccgctgctactgtgggccgccccggggcagggtgggcagggcttttgtgggttatgaggacacagaagtccctgaggcccccagacctggcacagccaacctccttcctcccccggttgcccccaactctaaagcctcctccctcccagtgtccactggctccaggctcctcacaacagcagctcatagacacagggcgtctccaggtgtcccagccctccagatgtttctagctctccagatgggcgctgttttcacgtctgcctgcatccattcattccttcattcctcacctttatcctgttatctctatttttttaagctaccaggaaggaaagggaagaagagatcacgaaactgggacccccagaagggaggagtgggctttgaacttagacatctacctcagagctcaaataggttgtttaaaatcacattcaattttcagatgaaggggaactttatagttttttttgtttgtttgtttttttgagacagagtctcactctgttgcccaggctggagtgcaaatggcttgatcttggttcactgcaacctctgcctcccaggttcaagcaattctcttgcctcagcctcccgagtagctgggactacaggcgtgtgccaccacgcccagctaattcttgtatttttagtagagacggagtttctccatgttggccagactggtctcgaactcctgacctcaggtgatctgaccgccttggcttccgaaagtgctgagattacagttgcgagccactgtgcatggccagaactttataataattaaaagagacttgaagctgggtgtgacggtgcacacctctagtcccagctactcgggaggccaaggcagaaggatcaccttgaggccaggagtttaaggccagcctgggcaacatagcaaaacctagtccctaaaattaaaaaaaaaaaaaaaaaaaggaaaataaaggagacttgaaatttttgaactaaatagtggtgatggctatacattgtgaatgtaattaacaccactgagttaaacacttaaaatggttaaaatggcaaattgtatgttatacctattttactacaataaaaagtataaaaaagaggcaagatatttaggtgacttacagcaaccaattgcaacaaaacaaaatgttaagaaatgatctttttatgaggcaattggaaatttgaacactgatcaactataggatgattggaattattaattttgtaaaggtgtgataagatactgcacttggctgggcacagtggcacatgcctgtaatcccagctacttggcaggctgaggtgggagaatcgcttgagctcaggagttcgagaccagcctgggcaatgtggcgaaatccccgtctttacaaaaacaaacaaacaaacaaaaaagatattgcagttgtgttgtaagcgtccttatctttcagagctacatagtggaatgtttatggaatatttaggataaatgatatacgcatttgggatttgctgcaaaatgacccagagtcaggggtcagggggagaggtagagatgagacaagaggtagaggggagaggtagaggtagccacgagctgataattacagacaagagatgcggagtatgtgggggctcattatcctgcatagtctatctttgtatatctttgaacttttcaagaataaaaaagcttaaaaagtatacatggcctggtcctaccagagactcacccaatgccagcctccagccagggagagccaagtttgcattttcacacgcatctcacactcctctgcactctcaacttggagagctccaaacagggaaaccccaagccttgctggcttctgccaaccccctgaacagaagcatgggtccccctgatcaccacctcaccaccctcatcctgatctcactgtacac

SEQ ID NO: 16835 - protein, 451 aa, Homo sapiens
MESFLKVAGMQYLHGVLGPIINKVFEEKYVELDPSKVEVKDVGCSGLHRPQTEAEVLEQSAQTLRAHLGALLSALSRSVPACPAVVRATFRQLFRRVRERFPGAQHENVPFIAVTSFLCLRFFSPAIMSPKLFHLRERHADARTSRTLLLLAKAVQNVGNMDTPASRAKEAWMEPLQPTVRQGVAQLKDFITKLVDIEEKDELDLQRTLSLQAPPVKEGPLFIHRTKGKGPLMSSSFKKLYFSLTTEALSFAKTPSSKKSALIKLANIRAAEKVEEKNFGSSHVMQVIYTDDAGRPQTAYLQCKCVNELNQWLSVLRKVSINNTGLLGSYHPGIFCGDKWSCCHQKEKTGQGCDKTRSRVTLQEWNDPLDHDLEAQLIYRHLLGVEAMLWERHRELSGGAEAGTVPTSPGKVPEDSLARLLRVLQDLREAHSSSPAGSPPSEPNCLLELQT

SEQ ID NO: 16836 - DNA, 634 bp, Homo sapiens
tcttccacctgcgggagcgccacgcggacgcccgcaccagccgcaccctgctcctgttggccaaggcagtccagaacgtgggcaacatggacacgccggcttccagggccaaggaggcttggatggagccgctgcagcccaccgtgcgccagggcgtggcgcagctgaaggacttcatcaccaagctcgtggacatcgaggagaaggacggtgagcgccgccctgcacagacccgcccacagcctactgctgacgtttgctccgcccttgagccccacggccccacccaccgctgtttgttcctctcgtggccccacccaccgcctgctgttgacatttgccaggcccccaggccatagacccacgcaccactgtttgtgcttcctgtgaccctgcccactgcctgctgttgacgtttgccccacccctagacccatggcctcacctcccatcatctgtgcctgttgacatttgctccatccttgagctccatagccccgccgccacctgctactgacgcgtgtcccgcctccaagcccatggccctgccttcctcagtccacctgtcaccccgctcaccaccagctgttgatgtttgctccgcccttgagccccatgactacgtccactgcct

SEQ ID NO: 16837 - protein, 90 aa, Homo sapiens; identical to SEQ ID NO: 1958

SEQ ID NO: 16838 - DNA, 723 bp, Homo sapiens
ctgaggaaggcagggccatgggcttggaggcgggacacgcgtcagtagcaggtggcggcggggctatggagctcaaggatggagcaaatgtcaacaggcacagatgatgggaggtttaactgacgctgctgcactggataccccaccccggtgccgggcacataggtgcagcctgagagtaagcagacctgggttggaaggtcccgcgattcaccaccgacaggatgggcggccttggcaacccccgacccctcgcaggcctgttcccttatccatgagatggaactcggacaaggtggccacaggaaggctttgcaaactgtgaagtgcagtgcctacgtgggcgtgccagtggcctcgccggagccggtagggaacactctgcagtccaggccagggccccggtaggacacccagctgtgcatcccgcccgtggccgcaaggcccgcaccttggccaacaggagcagggtgcggctggtgcgggcgtccgcgtggcgctcccgcaggtggaagagcttgggcgacatgatggcgggagagaagaagcgcaggcacaggaagctggtgacggcgatgaacggtacattctggaggggtgcggaagagcgcgggctggagtcccccagaccagggctcctggcagccccctccccttaggctccgtccctgaccctcgccgggacacagcctccctggtcctccccagcgctccctggttccc

SEQ ID NO: 16839 - protein, 73 aa, Homo sapiens
MMGGLTDAAALDTPPRCRAHRCSLRVSRPGLEGPAIHHRQDGRPWQPPTPRRPVPLSMRWNSDKVATGRLCKL

SEQ ID NO: 16840 - DNA, 1904 bp, Homo sapiens
ggcggcggggctatggagctcaaggatggagcaaatgtcaacaggcacagatgatgggaggtttaactgacgctgctgcactggataccccaccccggtgccgggcacataggtgcagcctgagagtaagcagacctgggttggaaggtcccgcgattcaccaccgacaggatgggcggccttggcaacccccgacccctcgcaggcctgttcccttatccatgagatggaactcggacaaggtggccacaggaaggctttgcaaactgtgaagtgcagtgcctacgtgggcgtgccagtggcctcgccggagccggtagggaacactctgcagtccaggccagggccccggtaggacacccagctgtgcatcccgcccgtggccgcaaggcccgcaccttggccaacaggagcagggtgcggctggtgcgggcgtccgcgtggcgctcccgcaggtggaagagcttgggcgacatgatggcgggagagaagaagcgcaggcacaggaagctggtgacggcgatgaacggtacattctggaggggtgcggaagagcgcgggctggagtcccccagaccagggctcctggcagccccctccccttaggctccgtccctgaccctcgccgggacacagcctccctggtcctccccagcgctccctggttccccaccgctcttcgcccgcccctcgccccagcccagtccaacccggcccagcctagcccagcgggtggagggcgcacctcgtgctgggcgccggggaagcgctcgcgcacgcgccggaagagctggcggaaggtggcgcgcaccacggcggggcacgcgggaaccgagcggctgagcgcgctcagcagggcccccaggtgggcgcgcagcgtctgcgcgctctgctccagcacctcggcctcggtctgcgggcggtgcagcccggaacacctgcgtggaacggggcgggttggcagaggaggtcacggtcagcgccagggccacgacaggaacagtggctctcacagcagccgggacacggacacaggggacaatacacgggtgggcagaagcacaaacacacatgctgacagggcctgatcccaacccgctgccgctgcgccccgcacccccccggagttacccccggcctcaccctacatccttaacttccactttgctggggtccagctccacgtacttctcctcaaacaccttgttgatgatggggcccaggacgccgtgcaggtactgcatcccggccacctggggaccaccgcaggtcacattgatcctgtctcccccagtcccactccagctgcccaccttctcccggcagccgcccttgcaccgtttgcctgccgtatccgcccaggagggggacaggtacacaagcagggcaaactgtttattcatgaatgaatgaatgagtgagtgaatgaatgactagaattcttagcccttgtaatcctagcactttgggaggccgaggcaggaggatcacttgaggccaggagtttgagaccagcctgggcaacatagtgagactgtctctaacttaaattttaatcacacacacattcttttggggggggggggtgcggggcacggagtctagcacggggcccaggctagagtgcagtggcgtgagctcactacaatctctggcttctggttcaagtgagtctcctgcctcagcctccccagtagctgggatcacaggtgcccaccacatggtgaaaccctatctctactaaaaatacaaaaattatctgggcatggtggcacgtgcctgtagtcccagctactcaggaggctgaggcaggagaattacttgaacttgggaggcagaggtttcagtgagccgagttcgtggtcactgcactccagcctggctacagagtgagattccatctc

SEQ ID NO: 16841 - protein, 73 aa, Homo sapiens; identical to SEQ ID NO: 16839

SEQ ID NO: 16842 - DNA, 2590 bp, Homo sapiens
cttctcctcgatgtccacgagcttggtgatgaagtccttcagctgcgccacgccctggcgcacggtgggctgcagcggctccatccaagcctccttggccctggaagccggcgtgtccatgttgcccacgttctggactgcctggaggtgacagcaggaaggaccaggttctgctaggtttaactgacgctgctgcactggataccccaccccggtgccgggcacataggtgcagcctgagagtaagcagacctgggttggaaggtcccgcgattcaccaccgacaggatgggcggccttggcaacccccgacccctcgcaggcctgttcccttatccatgagatggaactcggacaaggtggccacaggaaggctttgcaaactgtgaagtgcagtgcctacgtgggcgtgccagtggcctcgccggagccggtagggaacactctgcagtccaggccagggccccggtaggacacccagctgtgcatcccgcccgtggccgcaaggcccgcaccttggccaacaggagcagggtgcggctggtgcgggcgtccgcgtggcgctcccgcaggtggaagagcttgggcgacatgatggcgggagagaagaagcgcaggcacaggaagctggtgacggcgatgaacggtacattctggaggggtgcggaagagcgcgggctggagtcccccagaccagggctcctggcagccccctccccttaggctccgtccctgaccctcgccgggacacagcctccctggtcctccccagcgctccctggttccccaccgctcttcgcccgcccctcgccccagcccagtccaacccggcccagcctagcccagcgggtggagggcgcacctcgtgctgggcgccggggaagcgctcgcgcacgcgccggaagagctggcggaaggtggcgcgcaccacggcggggcacgcgggaaccgagcggctgagcgcgctcagcagggcccccaggtgggcgcgcagcgtctgcgcgctctgctccagcacctcggcctcggtctgcgggcggtgcagcccggaacacctgcgtggaacggggcgggttggcagaggaggtcacggtcagcgccagggccacgacaggaacagtggctctcacagcagccgggacacggacacaggggacaatacacgggtgggcagaagcacaaacacacatgctgacagggcctgatcccaacccgctgccgctgcgccccgcacccccccggagttacccccggcctcaccctacatccttaacttccactttgctggggtccagctccacgtacttctcctcaaacaccttgttgatgatggggcccaggacgccgtgcaggtactgcatcccggccacctggggaccaccgcaggtcacattgatcctgtctcccccagtcccactccagctgcccaccttctcccggcagccgcccttgcaccgtttgcctgccgtatccgcccaggagggggacaggtacacaagcagggcaaactgtttattcatgaatgaatgaatgagtgagtgaatgaatgactagaattcttagcccttgtaatcctagcactttgggaggccgaggcaggaggatcacttgaggccaggagtttgagaccagcctgggcaacatagtgagactgtctctaacttaaattttaatcacacacacattcttttggggggggggggtgcggggcacggagtctagcacggggcccaggctagagtgcagtggcgtgagctcactacaatctctggcttctggttcaagtgagtctcctgcctcagcctccccagtagctgggatcacaggtgcccaccaccatgccaggctaatttttgtatttttagtagagatggggtttcgccatgttggccaggctggtctcgaactcctgaccttaagtgatccgcccgcctcagcctcccaaagtgctggaattacaggcatgagccactatgcccagccacattcttaaccttaaagggctctcaatatggagatagaacactggagtcgaagtcccagccccctctgtcgctctctctgaagctcagtgttgtcatttgcaagatgaggacaatatagcatgcaacctcaccttcagaaaagactccatggactttgaggccagagagttgctccggaacagggtgttggtcttttgttacttggtcataagtaggcgttttccttttgatttggttctaggaggttagtgtgcattggcgttctgttgcctgcttccagcccctattctcctgcctcaggttcattagaaaagactgagtttggggccgggcagggtggctcacacctgtaatcccagtactttgggaggccaaggtgggcagatcacgaggtcaagagatcgagaccatcctggccaacatggtgaaaccctatctctactaaaaatacaaaaattatctgggcatggtggcacgtgcctgtagtcccagctactcaggaggctgaggcaggagaattacttgaacttgggaggcagaggtttcagtgagccgagttcgtggtcactgcactccagcctggctacagagtgagattccatctc

SEQ ID NO: 16843 - protein, 113 aa, Homo sapiens
MLTGPDPNPLPLRPAPPRSYPRPHPTSLTSTLLGSSSTYFSSNTLLMMGPRTPCRYCIPATWGPPQVTLILSPPVPLQLPTFSRQPPLHRLPAVSAQEGDRYTSRANCLFMNE

SEQ ID NO: 16844 - DNA, 2071 bp, Homo sapiens
cacgagcttggtgatgaagtccttcagctgcgccacgccctggcgcacggtgggctgcagcggctccatccaagcctccttggccctggaagccggcgtgtccatgttgcccacgttctggactgcctggaggtgacagcaggaaggaccaggttctgctaggtttaactgacgctgctgcactggataccccaccccggtgccgggcacataggtgcagcctgagagtaagcagacctgggttggaaggtcccgcgattcaccaccgacaggatgggcggccttggcaacccccgacccctcgcaggcctgttcccttatccatgagatggaactcggacaaggtggccacaggaaggctttgcaaactgtgaagtgcagtgcctacgtgggcgtgccagtggcctcgccggagccggtagggaacactctgcagtccaggccagggccccggtaggacacccagctgtgcatcccgcccgtggccgcaaggcccgcaccttggccaacaggagcagggtgcggctggtgcgggcgtccgcgtggcgctcccgcaggtggaagagcttgggcgacatgatggcgggagagaagaagcgcaggcacaggaagctggtgacggcgatgaacggtacattctggaggggtgcggaagagcgcgggctggagtcccccagaccagggctcctggcagccccctccccttaggctccgtccctgaccctcgccgggacacagcctccctggtcctccccagcgctccctggttccccaccgctcttcgcccgcccctcgccccagcccagtccaacccggcccagcctagcccagcgggtggagggcgcacctcgtgctgggcgccggggaagcgctcgcgcacgcgccggaagagctggcggaaggtggcgcgcaccacggcggggcacgcgggaaccgagcggctgagcgcgctcagcagggcccccaggtgggcgcgcagcgtctgcgcgctctgctccagcacctcggcctcggtctgcgggcggtgcagcccggaacacctgcgtggaacggggcgggttggcagaggaggtcacggtcagcgccagggccacgacaggaacagtggctctcacagcagccgggacacggacacaggggacaatacacgggtgggcagaagcacaaacacacatgctgacagggcctgatcccaacccgctgccgctgcgccccgcacccccccggagttacccccggcctcaccctacatccttaacttccactttgctggggtccagctccacgtacttctcctcaaacaccttgttgatgatggggcccaggacgccgtgcaggtactgcatcccggccacctggggaccaccgcaggtcacattgatcctgtctcccccagtcccactccagctgcccaccttctcccggcagccgcccttgcaccgtttgcctgccgtatccgcccaggagggggacaggtacacaagcagggcaaactgtttattcatgaatgaatgaatgagtgagtgaatgaatgactagaattcttagcccttgtaatcctagcactttgggaggccgaggcaggaggatcacttgaggccaggagtttgagaccagcctgggcaacatagtgagactgtctctaacttaaattttaatcacacacacattcttttggggggggggggtgcggggcacggagtctagcacggggcccaggctagagtgcagtggcgtgagctcactacaatctctggcttctggttcaagtgagtctcctgcctcagctactcaggaggctgaggcaggagaattacttgaacttgggaggcagaggtttcagtgagccgagttcgtggtcactgcactccagcctggctacagagtgagattccatctcaaaaaaaaaaaaaaaaaaaagaatgagtctggcccctttttgtctttctctcatcctctttgcctttcaccatgttatgatgcagcaagaagcccctcatcagatactagtgccatgaccttggacttcccagcctccagaactgtgagaaaataaatttctgttctatgt

SEQ ID NO: 16845 - protein, 113 aa, Homo sapiens; identical to SEQ ID NO: 16843

SEQ ID NO: 16846 - DNA, 842 bp, Homo sapiens
gtcggaggcgaggcttgtcggctgtcaaaggggcggcccggcccggcccggaagctacagcagcggcgcggagactgcggggcgggccatggcggcgaacctgagccggaacgggccagcgctgcaagaggcctacgtgcgggtggtcaccgagaagtccccgaccgactgggctctctttacctatgaaggcaacagcaatgacatccgcgtggctggcacaggggagggtggcctggaggagatggtggaggagctcaacagcgggaaggtgatgtacgccttctgcagagtgaaggaccccaactctggactgcccaaatttgtcctcatcaactggacaggcgagggcgtgaacgatgtgcggaagggagcctgtgccagccacgtcagcaccatggccagcttcctgaagggggcccatgtgaccatcaacgcacgggccgaggaggatgtggagcctgagtgcatcatggagaaggtggccaaggcttcaggtgccaactacagctttcacaaggagagtggccgcttccaggacgtgggaccccaggccccagtgggctctgtgtaccagaagaccaatgccgtgtctgagattaaaagggttggtaaagacagcttctgggccaaagcagagaaggaggaggagaaccgtcggctggaggaaaagcggcgggccgaggaggcacagcggcagctggagcaggagcgccgggagcgtgagctgcgtgaggctgcacgccgggagcagcgctatcaggagcagggtggcgaggccagcccccagaggacgtgggagcagcagcaagaagtggtttcaaggaaccgaaatgagcagg

SEQ ID NO: 16847 - protein, 250 aa, Homo sapiens
MAANLSRNGPALQEAYVRVVTEKSPTDWALFTYEGNSNDIRVAGTGEGGLEEMVEELNSGKVMYAFCRVKDPNSGLPKFVLINWTGEGVNDVRKGACASHVSTMASFLKGAHVTINARAEEDVEPECIMEKVAKASGANYSFHKESGRFQDVGPQAPVGSVYQKTNAVSEIKRVGKDSFWAKAEKEEENRRLEEKRRAEEAQRQLEQERRERELREAARREQRYQEQGGEASPQRTWEQQQEVVSRNRNE

SEQ ID NO: 16848 - DNA, 1838 bp, Homo sapiens
gtcggaggcgaggcttgtcggctgtcaaaggggcggcccggcccggcccggaagctacagcagcggcgcggagactgcggggcgggccatggcggcgaacctgagccggaacgggccagcgctgcaagaggcctacgtgcgggtggtcaccgagaagtccccgaccgactgggctctctttacctatgaaggcaacagcaatgacatccgcgtggctggcacaggggagggtggcctggaggagatggtggaggagctcaacagcgggaaggtgatgtacgccttctgcagagtgaaggaccccaactctggactgcccaaatttgtcctcatcaactggacaggcgagggcgtgaacgatgtgcggaagggagcctgtgccagccacgtcagcaccatggccagcttcctgaagggggcccatgtgaccatcaacgcacgggccgaggaggatgtggagcctgagtgcatcatggagaaggtggccaaggcttcaggtgccaactacagctttcacaaggagagtggccgcttccaggacgtgggaccccaggccccagtgggctctgtgtaccagaagaccaatgccgtgtctgagattaaaagggttggtaaagacagcttctgggccaaagcagagaaggaggaggagaaccgtcggctggaggaaaagcggcgggccgaggaggcacagcggcagctggagcaggagcgccgggagcgtgagctgcgtgaggctgcacgccgggagcagcgctatcaggagcagggtggcgaggccagcccccagaggacgtgggagcagcagcaagaagtggtttcaaggaaccgaaatgagcaggagtctgccgtgcacccgagggagattttcaagcagaaggagagggccatgtccaccacctccatctccagtcctcagcctggcaagctgaggagccccttcctgcagaagcagctcacccaaccagagacccactttggcagagagccagctgctgccatctcaaggcccagggcagatctccctgctgaggagccggcgcccagcactcctccatgtctggtgcaggcagaagaggaggctgtgtatgaggaacctccagagcaggagaccttctacgagcagcccccactggtgcagcagcaaggtgctggctctgagcacattgaccaccacattcagggccaggggctcagtgggcaagggctctgtgcccgtgccctgtacgactaccaggcagccgacgacacagagatctcctttgaccccgagaacctcatcacgggcatcgaggtgatcgacgaaggctggtggcgtggctatgggccggatggccattttggcatgttccctgccaactacgtggagctcattgagtgaggctgagggcacatcttgcccttcccctctcagacatggcttccttattgctggaagaggaggcctgggagttgacattcagcactcttccaggaataggacccccagtgaggatgaggcctcagggctccctccggcttggcagactcagcctgtcaccccaaatgcagcaatggcctggtgattcccacacatccttcctgcatcccccgaccctcccagacagcttggctcttgcccctgacaggatactgagccaagccctgcctgtggccaagccctgagtggccactgccaagctgcggggaagggtcctgagcaggggcatctgggaggctctggctgccttctgcatttatttgccttttttctttttctcttgcttctaaggggtggtggccaccactgtttagaatgacccttgggaacagtgaacgtagagaattgtttttagcag

SEQ ID NO: 16849 - protein, 430 aa, Homo sapiens; identical to SEQ ID NO: 1976

SEQ ID NO: 16850 - DNA, 2048 bp, Homo sapiens
gtcggaggcgaggcttgtcggctgtcaaaggggcggcccggcccggcccggaagctacagcagcggcgcggagactgcggggcgggccatggcggcgaacctgagccggaacgggccagcgctgcaagaggcctacgtgcgggtggtcaccgagaagtccccgaccgactgggctctctttacctatgaaggcaacagcaatgacatccgcgtggctggcacaggggagggtggcctggaggagatggtggaggagctcaacagcgggaaggtgatgtacgccttctgcagagtgaaggaccccaactctggactgcccaaatttgtcctcatcaactggacaggcgagggcgtgaacgatgtgcggaagggagcctgtgccagccacgtcagcaccatggccagcttcctgaagggggcccatgtgaccatcaacgcacgggccgaggaggatgtggagcctgagtgcatcatggagaaggtggccaaggcttcaggtgccaactacagctttcacaaggagagtggccgcttccaggacgtgggaccccaggccccagtgggctctgtgtaccagaagaccaatgccgtgtctgagattaaaagggttggtaaagacagcttctgggccaaagcagagaaggaggaggagaaccgtcggctggaggaaaagcggcgggccgaggaggcacagcggcagctggagcaggagcgccgggagcgtgagctgcgtgaggctgcacgccgggagcagcgctatcaggagcagggtggcgaggccagcccccagaggacgtgggagcagcagcaagaagtggtttcaaggaaccgaaatgagcaggagtctgccgtgcacccgagggagattttcaagcagaaggagagggccatgtccaccacctccatctccagtcctcagcctggcaagctgaggagccccttcctgcagaagcagctcacccaaccagagacccactttggcagagagccagctgctgccatctcaaggcccagggcagatctccctgctgaggagccggcgcccagcactcctccatgtctggtgcaggcagaagaggaggctgtgtatgaggaacctccagagcaggagaccttctacgagcagcccccactggtgcagcagcaaggtgctggctctgagcacattgaccaccacattcagggccaggggctcagtgggcaagggctctgtgcccgtgccctgtacgactaccaggcagccgacgacacagagatctcctttgaccccgagaacctcatcacgggcatcgaggtgatcgacgaaggctggtggcgtggctatgggccggatggccattttggcatgttccctgccaactacgtggagctcattgagtgaggctgagggcacatcttgcccttcccctctcagacatggcttccttattgctggaagaggaggcctgggagttgacattcagcactcttccaggaataggacccccagtgaggatgaggcctcagggctccctccggcttggcagactcagcctgtcaccccaaatgcagcaatggcctggtgattcccacacatccttcctgcatcccccgaccctcccagacagcttggctcttgcccctgacaggatactgagccaagccctgcctgtggccaagccctgagtggccactgccaagctgcggggaagggtcctgagcaggggcatctgggaggctctggctgccttctgcatttatttgccttttttctttttctcttgcttctaaggggtggtggccaccactgtttagaatgacccttgggaacagtgaacgtagagaattgtttttagcagagtttgtgaccaaagtcagagtggatcatggtggtttggcagcagggaatttgtcttgttggagcctgctctgtgctccccactccatttctctgtccctctgcctgggctatgggaagtggggatgcagatggccaagctcccaccctgggtattcaaaaacggcagacacaacatgttcctccacgcggctcactcgatgcctgcagg

SEQ ID NO: 16851 - protein, 430 aa, Homo sapiens; identical to SEQ ID NO: 1976

SEQ ID NO: 16852 - DNA, 2124 bp, Homo sapiens
gtcggaggcgaggcttgtcggctgtcaaaggggcggcccggcccggcccggaagctacagcagcggcgcggagactgcggggcgggccatggcggcgaacctgagccggaacgggccagcgctgcaagaggcctacgtgcgggtggtcaccgagaagtccccgaccgactgggctctctttacctatgaaggcaacagcaatgacatccgcgtggctggcacaggggagggtggcctggaggagatggtggaggagctcaacagcgggaaggtgatgtacgccttctgcagagtgaaggaccccaactctggactgcccaaatttgtcctcatcaactggacaggcgagggcgtgaacgatgtgcggaagggagcctgtgccagccacgtcagcaccatggccagcttcctgaagggggcccatgtgaccatcaacgcacgggccgaggaggatgtggagcctgagtgcatcatggagaaggtggccaaggcttcaggtgccaactacagctttcacaaggagagtggccgcttccaggacgtgggaccccaggccccagtgggctctgtgtaccagaagaccaatgccgtgtctgagattaaaagggttggtaaagacagcttctgggccaaagcagagaaggaggaggagaaccgtcggctggaggaaaagcggcgggccgaggaggcacagcggcagctggagcaggagcgccgggagcgtgagctgcgtgaggctgcacgccgggagcagcgctatcaggagcagggtggcgaggccagcccccagaggacgtgggagcagcagcaagaagtggtttcaaggaaccgaaatgagcaggagtctgccgtgcacccgagggagattttcaagcagaaggagagggccatgtccaccacctccatctccagtcctcagcctggcaagctgaggagccccttcctgcagaagcagctcacccaaccagagacccactttggcagagagccagctgctgccatctcaaggcccagggcagatctccctgctgaggagccggcgcccagcactcctccatgtctggtgcaggcagaagaggaggctgtgtatgaggaacctccagagcaggagaccttctacgagcagcccccactggtgcagcagcaaggtgctggctctgagcacattgaccaccacattcagggccaggggctcagtgggcaagggctctgtgcccgtgccctgtacgactaccaggcagccgacgacacagagatctcctttgaccccgagaacctcatcacgggcatcgaggtgatcgacgaaggctggtggcgtggctatgggccggatggccattttggcatgttccctgccaactacgtggagctcattgagtgaggctgagggcacatcttgcccttcccctctcagacatggcttccttattgctggaagaggaggcctgggagttgacattcagcactcttccaggaataggacccccagtgaggatgaggcctcagggctccctccggcttggcagactcagcctgtcaccccaaatgcagcaatggcctggtgattcccacacatccttcctgcatcccccgaccctcccagacagcttggctcttgcccctgacaggatactgagccaagccctgcctgtggccaagccctgagtggccactgccaagctgcggggaagggtcctgagcaggggcatctgggaggctctggctgccttctgcatttatttgccttttttctttttctcttgcttctaaggggtggtggccaccactgtttagaatgacccttgggaacagtgaacgtagagaattgtttttagcagagtttgtgaccaaagtcagagtggatcatggtggtttggcagcagggaatttgtcttgttggagcctgctctgtgctccccactccatttctctgtccctctgcctgggctatgggaagtggggatgcagatggccaagctcccaccctgggtattcaaaaacggcagacacaacatgttcctccacgcggctcactcgatgcctgcaggccccagtgtgtgcctcaactgattctgacttcaggaaaagtaacacagagtggccttggcctgttgtcttccccta

SEQ ID NO: 16853 - protein, 430 aa, Homo sapiens; identical to SEQ ID NO: 1976

SEQ ID NO: 16854 - DNA, 2179 bp, Homo sapiens
gtcggaggcgaggcttgtcggctgtcaaaggggcggcccggcccggcccggaagctacagcagcggcgcggagactgcggggcgggccatggcggcgaacctgagccggaacgggccagcgctgcaagaggcctacgtgcgggtggtcaccgagaagtccccgaccgactgggctctctttacctatgaaggcaacagcaatgacatccgcgtggctggcacaggggagggtggcctggaggagatggtggaggagctcaacagcgggaaggtgatgtacgccttctgcagagtgaaggaccccaactctggactgcccaaatttgtcctcatcaactggacaggcgagggcgtgaacgatgtgcggaagggagcctgtgccagccacgtcagcaccatggccagcttcctgaagggggcccatgtgaccatcaacgcacgggccgaggaggatgtggagcctgagtgcatcatggagaaggtggccaaggcttcaggtgccaactacagctttcacaaggagagtggccgcttccaggacgtgggaccccaggccccagtgggctctgtgtaccagaagaccaatgccgtgtctgagattaaaagggttggtaaagacagcttctgggccaaagcagagaaggaggaggagaaccgtcggctggaggaaaagcggcgggccgaggaggcacagcggcagctggagcaggagcgccgggagcgtgagctgcgtgaggctgcacgccgggagcagcgctatcaggagcagggtggcgaggccagcccccagaggacgtgggagcagcagcaagaagtggtttcaaggaaccgaaatgagcaggagtctgccgtgcacccgagggagattttcaagcagaaggagagggccatgtccaccacctccatctccagtcctcagcctggcaagctgaggagccccttcctgcagaagcagctcacccaaccagagacccactttggcagagagccagctgctgccatctcaaggcccagggcagatctccctgctgaggagccggcgcccagcactcctccatgtctggtgcaggcagaagaggaggctgtgtatgaggaacctccagagcaggagaccttctacgagcagcccccactggtgcagcagcaaggtgctggctctgagcacattgaccaccacattcagggccaggggctcagtgggcaagggctctgtgcccgtgccctgtacgactaccaggcagccgacgacacagagatctcctttgaccccgagaacctcatcacgggcatcgaggtgatcgacgaaggctggtggcgtggctatgggccggatggccattttggcatgttccctgccaactacgtggagctcattgagtgaggctgagggcacatcttgcccttcccctctcagacatggcttccttattgctggaagaggaggcctgggagttgacattcagcactcttccaggaataggacccccagtgaggatgaggcctcagggctccctccggcttggcagactcagcctgtcaccccaaatgcagcaatggcctggtgattcccacacatccttcctgcatcccccgaccctcccagacagcttggctcttgcccctgacaggatactgagccaagccctgcctgtggccaagccctgagtggccactgccaagctgcggggaagggtcctgagcaggggcatctgggaggctctggctgccttctgcatttatttgccttttttctttttctcttgcttctaaggggtggtggccaccactgtttagaatgacccttgggaacagtgaacgtagagaattgtttttagcagagtttgtgaccaaagtcagagtggatcatggtggtttggcagcagggaatttgtcttgttggagcctgctctgtgctccccactccatttctctgtccctctgcctgggctatgggaagtggggatgcagatggccaagctcccaccctgggtattcaaaaacggcagacacaacatgttcctccacgcggctcactcgatgcctgcaggccccagtgtgtgcctcaactgattctgacttcaggaaaagtaacacagagtggccttggcctgttgtcttcccctattttctgtcccagctcatccgtgtctctgaagaacaaatatgcttttggaccacg

SEQ ID NO: 16855 - protein, 430 aa, Homo sapiens; identical to SEQ ID NO: 1976

SEQ ID NO: 16856 - DNA, 2372 bp, Homo sapiens
gtcggaggcgaggcttgtcggctgtcaaaggggcggcccggcccggcccggaagctacagcagcggcgcggagactgcggggcgggccatggcggcgaacctgagccggaacgggccagcgctgcaagaggcctacgtgcgggtggtcaccgagaagtccccgaccgactgggctctctttacctatgaaggcaacagcaatgacatccgcgtggctggcacaggggagggtggcctggaggagatggtggaggagctcaacagcgggaaggtgatgtacgccttctgcagagtgaaggaccccaactctggactgcccaaatttgtcctcatcaactggacaggcgagggcgtgaacgatgtgcggaagggagcctgtgccagccacgtcagcaccatggccagcttcctgaagggggcccatgtgaccatcaacgcacgggccgaggaggatgtggagcctgagtgcatcatggagaaggtggccaaggcttcaggtgccaactacagctttcacaaggagagtggccgcttccaggacgtgggaccccaggccccagtgggctctgtgtaccagaagaccaatgccgtgtctgagattaaaagggttggtaaagacagcttctgggccaaagcagagaaggaggaggagaaccgtcggctggaggaaaagcggcgggccgaggaggcacagcggcagctggagcaggagcgccgggagcgtgagctgcgtgaggctgcacgccgggagcagcgctatcaggagcagggtggcgaggccagcccccagaggacgtgggagcagcagcaagaagtggtttcaaggaaccgaaatgagcaggagtctgccgtgcacccgagggagattttcaagcagaaggagagggccatgtccaccacctccatctccagtcctcagcctggcaagctgaggagccccttcctgcagaagcagctcacccaaccagagacccactttggcagagagccagctgctgccatctcaaggcccagggcagatctccctgctgaggagccggcgcccagcactcctccatgtctggtgcaggcagaagaggaggctgtgtatgaggaacctccagagcaggagaccttctacgagcagcccccactggtgcagcagcaaggtgctggctctgagcacattgaccaccacattcagggccaggggctcagtgggcaagggctctgtgcccgtgccctgtacgactaccaggcagccgacgacacagagatctcctttgaccccgagaacctcatcacgggcatcgaggtgatcgacgaaggctggtggcgtggctatgggccggatggccattttggcatgttccctgccaactacgtggagctcattgagtgaggctgagggcacatcttgcccttcccctctcagacatggcttccttattgctggaagaggaggcctgggagttgacattcagcactcttccaggaataggacccccagtgaggatgaggcctcagggctccctccggcttggcagactcagcctgtcaccccaaatgcagcaatggcctggtgattcccacacatccttcctgcatcccccgaccctcccagacagcttggctcttgcccctgacaggatactgagccaagccctgcctgtggccaagccctgagtggccactgccaagctgcggggaagggtcctgagcaggggcatctgggaggctctggctgccttctgcatttatttgccttttttctttttctcttgcttctaaggggtggtggccaccactgtttagaatgacccttgggaacagtgaacgtagagaattgtttttagcagagtttgtgaccaaagtcagagtggatcatggtggtttggcagcagggaatttgtcttgttggagcctgctctgtgctccccactccatttctctgtccctctgcctgggctatgggaagtggggatgcagatggccaagctcccaccctgggtattcaaaaacggcagacacaacatgttcctccacgcggctcactcgatgcctgcaggccccagtgtgtgcctcaactgattctgacttcaggaaaagtaacacagagtggccttggcctgttgtcttcccctattttctgtcccagctcatccgtgtctctgaagaacaaatatgcttttggaccacgaattcccagtttggtctacacaggctcgcagctctcacctgtcctgctgtagcctgaatgctcccatgtgggaatagcaccccaccacctgcccagtgtctgcctctgctccgtgtctggggtgagcaccctcaccctgagactgtggctgatgatgatcagccaccaggaagaggctaaatgttaagatggg

SEQ ID NO: 16857 - protein, 430 aa, Homo sapiens; identical to SEQ ID NO: 1976

SEQ ID NO: 16858 - DNA, 862 bp, Homo sapiens
ggaggcgaggcttgtcggctgtcaaaggggcggcccggcccggcccggaagctacagcagcggcgcggagactgcggggcgggccatggcggcgaacctgagccggaacgggccagcgctgcaagaggcctacgtgcgggtggtcaccgagaagtccccgaccgactgggctctctttacctatgaaggcaacagcaatgacatccgcgtggctggcacaggggagggtggcctggaggagatggtggaggagctcaacagcgggaaggtgatgtacgccttctgcagagtgaaggaccccaactctggactgcccaaatttgtcctcatcaactggacaggcgagggcgtgaacgatgtgcggaagggagcctgtgccagccacgtcagcaccatggccagcttcctgaagggggcccatgtgaccatcaacgcacgggccgaggaggatgtggagcctgagtgcatcatggagaaggtggccaaggcttcaggtgccaactacagctttcacaaggagagtggccgcttccaggacgtgggaccccaggccccagtgggctctgtgtaccagaagaccaatgccgtgtctgagattaaaagggttggtaaagacagcttctgggccaaagcagaggtgagtgctgccccggggcatgctgggcacgtgggagtgttctgcttgctgtggctcatctttcctcacaagtgagctcatgcagcatccactctccttggtgcccattacagatggtcacactgaggctcgggtaagttaagccacaaggctaatgatcgactggctctggtgcccgtctttggccatgtgcctaaaactcagtcctgggcaggggattaggct

SEQ ID NO: 16859 - protein, 208 aa, Homo sapiens
MAANLSRNGPALQEAYVRVVTEKSPTDWALFTYEGNSNDIRVAGTGEGGLEEMVEELNSGKVMYAFCRVKDPNSGLPKFVLINWTGEGVNDVRKGACASHVSTMASFLKGAHVTINARAEEDVEPECIMEKVAKASGANYSFHKESGRFQDVGPQAPVGSVYQKTNAVSEIKRVGKDSFWAKAEVSAAPGHAGHVGVFCLLWLIFPHK

SEQ ID NO: 16860 - DNA, 662 bp, Homo sapiens
caaaggggcggcccggcccggcccggaagctacagcagcggcgcggagactgcggggcgggccatggcggcgaacctgagccggaacgggccagcgctgcaagaggcctacgtgcgggtggtcaccgagaagtccccgaccgactgagggtggcctggaggagatggtggaggagctcaacagcgggaaggtgatgtacgccttctgcagagtgaaggaccccaactctggactgcccaaatttgtcctcatcaactggacaggcgagggcgtgaacgatgtgcggaagggagcctgtgccagccacgtcagcaccatggccagcttcctgaagggggcccatgtgaccatcaacgcacgggccgaggaggatgtggagcctgagtgcatcatggagaaggtggccaaggcttcaggtgccaactacagctttcacaaggagagtggccgcttccaggacgtgggaccccaggccccagtgggctctgtgtaccagaagaccaatgccgtgtctgagattaaaagggttggtaaagacagcttctgggccaaagcagagatggtcacactgaggctcgggtaagttaagccacaaggctaatgatcgactggctctggtgcccgtctttggccatgtgcctaaaactcagtcctgggcaggg

SEQ ID NO: 16861 - protein, 139 aa, Homo sapiens
MVEELNSGKVMYAFCRVKDPNSGLPKFVLINWTGEGVNDVRKGACASHVSTMASFLKGAHVTINARAEEDVEPECIMEKVAKASGANYSFHKESGRFQDVGPQAPVGSVYQKTNAVSEIKRVGKDSFWAKAEMVTLRLG

SEQ ID NO: 16862 - DNA, 622 bp, Homo sapiens
gcggagactgcggggcgggccatggcggcgaacctgagccggaacgggccagcgctgcaagaggcctacgtgcgggtggtcaccgagaagtccccgaccgactgggctctctttacctatgaaggcaacagcaatgacatccgcgtggctggcacaggggagggtggcctggaggagatggtggaggagctcaacagcgggaaggtgatgtacgccttctgcagagtgaaggaccccaactctggactgcccaaatttgtcctcatcaactggggggcccatgtgaccatcaacgcacgggccgaggaggatgtggagcctgagtgcatcatggagaaggtggccaaggcttcaggtgccaactacagctttcacaaggagagtggccgcttccaggacgtgggaccccaggccccagtgggctctgtgtaccagaagaccaatgccgtgtctgagattaaaagggttggtaaagacagcttctgggccaaagcagaggtgagtgctgccccggggcatgctgggcacgtgggagtgttctgcttgctgtggctcatctttcctcacaagtgagctcatgcagcatccactctccttggtgcccattacagatggtcacact

SEQ ID NO: 16863 - protein, 183 aa, Homo sapiens
MAANLSRNGPALQEAYVRVVTEKSPTDWALFTYEGNSNDIRVAGTGEGGLEEMVEELNSGKVMYAFCRVKDPNSGLPKFVLINWGAHVTINARAEEDVEPECIMEKVAKASGANYSFHKESGRFQDVGPQAPVGSVYQKTNAVSEIKRVGKDSFWAKAEVSAAPGHAGHVGVFCLLWLIFPHK

SEQ ID NO: 16864 - DNA, 4112 bp, Homo sapiens
atttgacacatgaatgtatagcagtcattgggaaactccacagctcatgttttcctcatagtagatgtgtgctcccatctccatggctttgtccctcacaacccccaccccatggtaagtcaggccagtgtcctcccagctgcagagctgagaaggctgcacagttgcctactgagaacctgcctagtgggtcagagcaaagtgagaacgggcctgtgcccacccacagtgttactgtcagcccaagctctttgggatgtagtggaaagtcatggtggatacggtgaggagagatggaacccaaggtgctggctacagagctcacttgtgtttcgtttcagggctctctttacctatgaaggcaacagcaatgacatccgcgtggctggcacagggggtgagtatgactccaaatggactcagggacaccaggaggtaggagggtgacgacgaggggtcagcgcactcagctgtcttggtccactgagccacatggggcttccagtgctcactggccacttctggcaggccttaggtttcagatatgtgtaagtgaaaacattcctccttggttctccttccctctgggtgcaggggagtgctttctctttgtctacttggggagagctgagagggaaacaggcctctccagcttgtgggcagcctgcgttgggagctgcggtgggaagctcaccagtcccagaactggtgctggtggaaagaaagtccacagacatatcttcttctccctttgtcctgccctggtcttgtgccgagtgcttgcaggggccccatcctcactgggagaggcagtatcactgcagatagtcacgggggaggctctggaggtctctacaggaaggacaggctcttggccagcacagagcagaggttgtcagggtaggcttcgtcagagtgtgacctgtgggcccctcagctgacacccgtgactgctcctcctccagaagttgcctgacccctccctctgtcctgagctggacatggcttcattgttcaatgaacactcggagtggttctccacggtttgatgtctgttgttggtagaaagccccttcctttcacaatctttctgggaggtgtcccctttctagaaggattgccattgaacagtagacatgtggtgtggcaggtgactgggagttgcagagatcaacaacttgagagtttcctgtcatccccagtggcacaggacagggctctgccacaaatgcaacaatttgctgtccccagagtggggctcatgactgcctccactcatacggagccctgtagatgaaatacctgatcagctcttcctccttataacctggaaaagtttgtgagggctaagcctcagtgtcagggagaattgtttagagctgcccactcctgtgctccccctgtccccatcaccctctcttctggagtctgaggactgagccagttacgccactgcaggatgttcaatctggtctggccgtctgggtggccctggaacttgagcagacacaggtgcaggcagtggtgactctacaggccctgctattccgggcccttttgcaacgttgtggcaacaataaaattttgacgtagccatcctccatttggaagtctggtggctggtttgccgtggaaatgaccctgtttttatttccagaattacctctgggtttagagaagtggtttttaaacgagtgtgggtaaaaaaaattacctgaggtacttgtcagaatcgcagacttctaggtcccacccagctctcatcaatcagtttagtgagggtggtgcccaggactctgattttaaacatacccctagaaagattctgatacaggtagaggtgagaagccctggtttagaagcagctcggcctcccttcatggtgggaccagggccagcagggaatgtcagggccacccctgaccttcactgtgactctgctgcagagggtggcctggaggagatggtggaggagctcaacagcgggaaggtgatgtacgccttctgcagagtgaaggaccccaactctggactgcccaaatttgtcctcatcaactggacaggcgagggcgtgaacgatgtgcggaagggagcctgtgccagccacgtcagcaccatggccagcttcctgaagggggcccatgtgaccatcaacgcacgggccgaggaggatgtggagcctgagtgcatcatggagaaggtggccaaggcttcaggtgccaactacagctttcacaaggagagtggccgcttccaggacgtgggaccccaggccccagtgggctctgtgtaccagaagaccaatgccgtgtctgagattaaaagggttggtaaagacagcttctgggccaaagcagaggtgagtgctgccccggggcatgctgggcacgtgggagtgttctgcttgctgtggctcatctttcctcacaagtgagctcatgcagcatccactctccttggtgcccattacagatggtcacactgaggctcgggtaagttaagccacaaggctaatgatcgactggctctggtgcccgtctttggccatgtgcctaaaactcagtcctgggcaggggattaggctgaagtggcagcatagggctgagcgggcagtggctctccctgcagaaggaggaggagaaccgtcggctggaggaaaagcggcgggccgaggaggcacagcggcagctggagcaggagcgccgggagcgtgagctgcgtgaggctgcacgccgggagcagcgctatcaggagcagggtggcgaggccagcccccagaggacgtgggagcagcagcaagaagtggtttcaaggaaccgaaatgagcaggagtctgccgtgcacccgagggagattttcaagcagaaggagagggccatgtccaccacctccatctccagtcctcagcctggcaagctgaggagccccttcctgcagaagcagctcacccaaccagagacccactttggcagagagccagctgctgccatctcaaggcccagggcagatctccctgctgaggagccggcgcccagcactcctccatgtctggtgcaggcagaagaggaggctgtgtatgaggaacctccagagcaggagaccttctacgagcagcccccactggtgcagcagcaaggtgctggctctgagcacattgaccaccacattcagggccaggggctcagtgggcaagggctctgtgcccgtgccctgtacgactaccaggcagccgacgacacagagatctcctttgaccccgagaacctcatcacgggcatcgaggtgatcgacgaaggctggtggcgtggctatgggccggatggccattttggcatgttccctgccaactacgtggagctcattgagtgaggctgagggcacatcttgcccttcccctctcagacatggcttccttattgctggaagaggaggcctgggagttgacattcagcactcttccaggaataggacccccagtgaggatgaggcctcagggctccctccggcttggcagactcagcctgtcaccccaaatgcagcaatggcctggtgattcccacacatccttcctgcatcccccgaccctcccagacagcttggctcttgcccctgacaggatactgagccaagccctgcctgtggccaagccctgagtggccactgccaagctgcggggaagggtcctgagcaggggcatctgggaggctctggctgccttctgcatttatttgccttttttctttttctcttgcttctaaggggtggtggccaccactgtttagaatgacccttgggaacagtgaacgtagagaattgtttttagcagagtttgtgaccaaagtcagagtggatcatggtggtttggcagcagggaatttgtcttgttggagcctgctctgtgctccccactccatttctctgtccctctgcctgggctatgggaagtggggatgcagatggccaagctcccaccctgggtattcaaaaacggcagacacaacatgttcctccacgcggctcactcgatgcctgcaggccccagtgtgtgcctcaactgattctgacttcaggaaaagtaacacagagtggccttggcctgttgtcttccccta

SEQ ID NO: 16865 - protein, 184 aa, Homo sapiens
MVGPGPAGNVRATPDLHCDSAAEGGLEEMVEELNSGKVMYAFCRVKDPNSGLPKFVLINWTGEGVNDVRKGACASHVSTMASFLKGAHVTINARAEEDVEPECIMEKVAKASGANYSFHKESGRFQDVGPQAPVGSVYQKTNAVSEIKRVGKDSFWAKAEVSAAPGHAGHVGVFCLLWLIFPHK

SEQ ID NO: 16866 - DNA, 587 bp, Homo sapiens
gtggaaatgaccctgtttttatttccagaattacctctgggtttagagaagtggtttttaaacgagtgtgggtaaaaaaaattacctgaggtacttgtcagaatcgcagacttctaggtcccacccagctctcatcaatcagtttagtgagggtggtgcccaggactctgattttaaacatacccctagaaagattctgatacaggtagaggtgagaagccctggtttagaagcagctcggcctcccttcatggtgggaccagggccagcagggaatgtcagggccacccctgaccttcactgtgactctgctgcagagggtggcctggaggagatggtggaggagctcaacagcgggaaggtgatgtacgccttctgcagagtgaaggaccccaactctggactgcccaaatttgtcctcatcaactggacaggcgagggcgtgaacgatgtgcggaagggagcctgtgccagccacgtcagcaccatggccagcttcctgaagggggcccatgtgaccatcaacgcacgggccgaggaggatgtggagcctgagtgcatcatggagaaggtggccaaggcttcag

SEQ ID NO: 16867 - protein, 111 aa, Homo sapiens
MVGPGPAGNVRATPDLHCDSAAEGGLEEMVEELNSGKVMYAFCRVKDPNSGLPKFVLINWTGEGVNDVRKGACASHVSTMASFLKGAHVTINARAEEDVEPECIMEKVAKA

SEQ ID NO: 16868 - DNA, 1203 bp, Homo sapiens
tgcagaaggaggaggagaaccgtcggctggaggaaaagcggcgggccgaggaggcacagcggcagctggagcaggagcgccgggagcgtgagctgcgtgaggctgcacgccgggagcagcgctatcaggagcagggtggcgaggccagcccccagaggacgtgggagcagcagcaagaagtggtttcaaggaaccgaaatgagcaggagtctgccgtgcacccgagggagattttcaagcagaaggagagggccatgtccaccacctccatctccagtcctcagcctggcaagctgaggagccccttcctgcagaagcagctcacccaaccagagacccactttggcagagagccagctgctgccatctcaaggcccagggcagatctccctgctgaggagccggcgcccagcactcctccatgtctggtgcaggcagaagaggaggctgtgtatgaggaacctccagagcaggagaccttctacgagcagcccccactggtgcagcagcaaggtgctggctctgagcacattgaccaccacattcagggccaggggctcagtgggcaagggctctgtgcccgtgccctgtacgactaccaggcagccgacgacacagagatctcctttgaccccgagaacctcatcacgggcatcgaggtgatcgacgaaggctggtggcgtggctatgggccggatggccattttggcatgttccctgccaactacgtggagctcattgagtgaggctgagggcacatcttgcccttcccctctcagacatggcttccttattgctggaagaggaggcctgggagttgacattcagcactcttccaggaataggacccccagtgaggatgaggcctcagggctccctccggcttggcagactcagcctgtcaccccaaatgcagcaatggcctggtgattcccacacatccttcctgcatcccccgaccctcccagacagcttggctcttgcccctgacaggatactgagccaagccctgcctgtggccaagccctgagtggccactgccaagctgcggggaagggtcctgagcaggggcatctgggaggctctggctgccttctgcatttatttgccttttttctttttctcttgcttctaaggggtggtggccaccactgtttagaatgacccttgggaacagtgaacgtagagaattgtttttagcag

SEQ ID NO: 16869 - protein, 163 aa, Homo sapiens [sequence omitted]

SEQ ID NO: 16870 - DNA, 1413 bp, Homo sapiens
tgcagaaggaggaggagaaccgtcggctggaggaaaagcggcgggccgaggaggcacagcggcagctggagcaggagcgccgggagcgtgagctgcgtgaggctgcacgccgggagcagcgctatcaggagcagggtggcgaggccagcccccagaggacgtgggagcagcagcaagaagtggtttcaaggaaccgaaatgagcaggagtctgccgtgcacccgagggagattttcaagcagaaggagagggccatgtccaccacctccatctccagtcctcagcctggcaagctgaggagccccttcctgcagaagcagctcacccaaccagagacccactttggcagagagccagctgctgccatctcaaggcccagggcagatctccctgctgaggagccggcgcccagcactcctccatgtctggtgcaggcagaagaggaggctgtgtatgaggaacctccagagcaggagaccttctacgagcagcccccactggtgcagcagcaaggtgctggctctgagcacattgaccaccacattcagggccaggggctcagtgggcaagggctctgtgcccgtgccctgtacgactaccaggcagccgacgacacagagatctcctttgaccccgagaacctcatcacgggcatcgaggtgatcgacgaaggctggtggcgtggctatgggccggatggccattttggcatgttccctgccaactacgtggagctcattgagtgaggctgagggcacatcttgcccttcccctctcagacatggcttccttattgctggaagaggaggcctgggagttgacattcagcactcttccaggaataggacccccagtgaggatgaggcctcagggctccctccggcttggcagactcagcctgtcaccccaaatgcagcaatggcctggtgattcccacacatccttcctgcatcccccgaccctcccagacagcttggctcttgcccctgacaggatactgagccaagccctgcctgtggccaagccctgagtggccactgccaagctgcggggaagggtcctgagcaggggcatctgggaggctctggctgccttctgcatttatttgccttttttctttttctcttgcttctaaggggtggtggccaccactgtttagaatgacccttgggaacagtgaacgtagagaattgtttttagcagagtttgtgaccaaagtcagagtggatcatggtggtttggcagcagggaatttgtcttgttggagcctgctctgtgctccccactccatttctctgtccctctgcctgggctatgggaagtggggatgcagatggccaagctcccaccctgggtattcaaaaacggcagacacaacatgttcctccacgcggctcactcgatgcctgcagg

SEQ ID NO: 16871 - protein, 163 aa, Homo sapiens [sequence omitted]

SEQ ID NO: 16872 - DNA, 1544 bp, Homo sapiens
tgcagaaggaggaggagaaccgtcggctggaggaaaagcggcgggccgaggaggcacagcggcagctggagcaggagcgccgggagcgtgagctgcgtgaggctgcacgccgggagcagcgctatcaggagcagggtggcgaggccagcccccagaggacgtgggagcagcagcaagaagtggtttcaaggaaccgaaatgagcaggagtctgccgtgcacccgagggagattttcaagcagaaggagagggccatgtccaccacctccatctccagtcctcagcctggcaagctgaggagccccttcctgcagaagcagctcacccaaccagagacccactttggcagagagccagctgctgccatctcaaggcccagggcagatctccctgctgaggagccggcgcccagcactcctccatgtctggtgcaggcagaagaggaggctgtgtatgaggaacctccagagcaggagaccttctacgagcagcccccactggtgcagcagcaaggtgctggctctgagcacattgaccaccacattcagggccaggggctcagtgggcaagggctctgtgcccgtgccctgtacgactaccaggcagccgacgacacagagatctcctttgaccccgagaacctcatcacgggcatcgaggtgatcgacgaaggctggtggcgtggctatgggccggatggccattttggcatgttccctgccaactacgtggagctcattgagtgaggctgagggcacatcttgcccttcccctctcagacatggcttccttattgctggaagaggaggcctgggagttgacattcagcactcttccaggaataggacccccagtgaggatgaggcctcagggctccctccggcttggcagactcagcctgtcaccccaaatgcagcaatggcctggtgattcccacacatccttcctgcatcccccgaccctcccagacagcttggctcttgcccctgacaggatactgagccaagccctgcctgtggccaagccctgagtggccactgccaagctgcggggaagggtcctgagcaggggcatctgggaggctctggctgccttctgcatttatttgccttttttctttttctcttgcttctaaggggtggtggccaccactgtttagaatgacccttgggaacagtgaacgtagagaattgtttttagcagagtttgtgaccaaagtcagagtggatcatggtggtttggcagcagggaatttgtcttgttggagcctgctctgtgctccccactccatttctctgtccctctgcctgggctatgggaagtggggatgcagatggccaagctcccaccctgggtattcaaaaacggcagacacaacatgttcctccacgcggctcactcgatgcctgcaggccccagtgtgtgcctcaactgattctgacttcaggaaaagtaacacagagtggccttggcctgttgtcttcccctattttctgtcccagctcatccgtgtctctgaagaacaaatatgcttttggaccacg

SEQ ID NO: 16873 - protein, 163 aa, Homo sapiens [sequence omitted]

SEQ ID NO: 16874 - DNA, 1737 bp, Homo sapiens
tgcagaaggaggaggagaaccgtcggctggaggaaaagcggcgggccgaggaggcacagcggcagctggagcaggagcgccgggagcgtgagctgcgtgaggctgcacgccgggagcagcgctatcaggagcagggtggcgaggccagcccccagaggacgtgggagcagcagcaagaagtggtttcaaggaaccgaaatgagcaggagtctgccgtgcacccgagggagattttcaagcagaaggagagggccatgtccaccacctccatctccagtcctcagcctggcaagctgaggagccccttcctgcagaagcagctcacccaaccagagacccactttggcagagagccagctgctgccatctcaaggcccagggcagatctccctgctgaggagccggcgcccagcactcctccatgtctggtgcaggcagaagaggaggctgtgtatgaggaacctccagagcaggagaccttctacgagcagcccccactggtgcagcagcaaggtgctggctctgagcacattgaccaccacattcagggccaggggctcagtgggcaagggctctgtgcccgtgccctgtacgactaccaggcagccgacgacacagagatctcctttgaccccgagaacctcatcacgggcatcgaggtgatcgacgaaggctggtggcgtggctatgggccggatggccattttggcatgttccctgccaactacgtggagctcattgagtgaggctgagggcacatcttgcccttcccctctcagacatggcttccttattgctggaagaggaggcctgggagttgacattcagcactcttccaggaataggacccccagtgaggatgaggcctcagggctccctccggcttggcagactcagcctgtcaccccaaatgcagcaatggcctggtgattcccacacatccttcctgcatcccccgaccctcccagacagcttggctcttgcccctgacaggatactgagccaagccctgcctgtggccaagccctgagtggccactgccaagctgcggggaagggtcctgagcaggggcatctgggaggctctggctgccttctgcatttatttgccttttttctttttctcttgcttctaaggggtggtggccaccactgtttagaatgacccttgggaacagtgaacgtagagaattgtttttagcagagtttgtgaccaaagtcagagtggatcatggtggtttggcagcagggaatttgtcttgttggagcctgctctgtgctccccactccatttctctgtccctctgcctgggctatgggaagtggggatgcagatggccaagctcccaccctgggtattcaaaaacggcagacacaacatgttcctccacgcggctcactcgatgcctgcaggccccagtgtgtgcctcaactgattctgacttcaggaaaagtaacacagagtggccttggcctgttgtcttcccctattttctgtcccagctcatccgtgtctctgaagaacaaatatgcttttggaccacgaattcccagtttggtctacacaggctcgcagctctcacctgtcctgctgtagcctgaatgctcccatgtgggaatagcaccccaccacctgcccagtgtctgcctctgctccgtgtctggggtgagcaccctcaccctgagactgtggctgatgatgatcagccaccaggaagaggctaaatgttaagatggg

SEQ ID NO: 16875 - protein, 163 aa, Homo sapiens [sequence omitted]

SEQ ID NO: 16876 - DNA, 1000 bp, Homo sapiens
caggagtctgccgtgcacccgagggagattttcaagcagaaggagagggccatgtccaccacctccatctccagtcctcagcctggcaagctgaggagccccttcctgcagaagcagctcacccaaccagagacccactttggcagagagccagctgctgccatctcaaggcccagggcagatctccctgctgaggagccggcgcccagcactcctccatgtctggtgcaggcagaagaggaggctgtgtatgaggaacctccagagcaggagaccttctacgagcagcccccactggtgcagcagcaaggtgctggctctgagcacattgaccaccacattcagggccaggggctcagtgggcaagggctctgtgcccgtgccctgtacgactaccaggcagccgacgacacagagatctcctttgaccccgagaacctcatcacgggcatcgaggtgatcgacgaaggctggtggcgtggctatgggccggatggccattttggcatgttccctgccaactacgtggagctcattgagtgaggctgagggcacatcttgcccttcccctctcagacatggcttccttattgctggaagaggaggcctgggagttgacattcagcactcttccaggaataggacccccagtgaggatgaggcctcagggctccctccggcttggcagactcagcctgtcaccccaaatgcagcaatggcctggtgattcccacacatccttcctgcatcccccgaccctcccagacagcttggctcttgcccctgacaggatactgagccaagccctgcctgtggccaagccctgagtggccactgccaagctgcggggaagggtcctgagcaggggcatctgggaggctctggctgccttctgcatttatttgccttttttctttttctcttgcttctaaggggtggtggccaccactgtttagaatgacccttgggaacagtgaacgtagagaattgtttttagcag

SEQ ID NO: 16877 - protein, 163 aa, Homo sapiens [sequence omitted]

SEQ ID NO: 16878 - DNA, 1210 bp, Homo sapiens
caggagtctgccgtgcacccgagggagattttcaagcagaaggagagggccatgtccaccacctccatctccagtcctcagcctggcaagctgaggagccccttcctgcagaagcagctcacccaaccagagacccactttggcagagagccagctgctgccatctcaaggcccagggcagatctccctgctgaggagccggcgcccagcactcctccatgtctggtgcaggcagaagaggaggctgtgtatgaggaacctccagagcaggagaccttctacgagcagcccccactggtgcagcagcaaggtgctggctctgagcacattgaccaccacattcagggccaggggctcagtgggcaagggctctgtgcccgtgccctgtacgactaccaggcagccgacgacacagagatctcctttgaccccgagaacctcatcacgggcatcgaggtgatcgacgaaggctggtggcgtggctatgggccggatggccattttggcatgttccctgccaactacgtggagctcattgagtgaggctgagggcacatcttgcccttcccctctcagacatggcttccttattgctggaagaggaggcctgggagttgacattcagcactcttccaggaataggacccccagtgaggatgaggcctcagggctccctccggcttggcagactcagcctgtcaccccaaatgcagcaatggcctggtgattcccacacatccttcctgcatcccccgaccctcccagacagcttggctcttgcccctgacaggatactgagccaagccctgcctgtggccaagccctgagtggccactgccaagctgcggggaagggtcctgagcaggggcatctgggaggctctggctgccttctgcatttatttgccttttttctttttctcttgcttctaaggggtggtggccaccactgtttagaatgacccttgggaacagtgaacgtagagaattgtttttagcagagtttgtgaccaaagtcagagtggatcatggtggtttggcagcagggaatttgtcttgttggagcctgctctgtgctccccactccatttctctgtccctctgcctgggctatgggaagtggggatgcagatggccaagctcccaccctgggtattcaaaaacggcagacacaacatgttcctccacgcggctcactcgatgcctgcagg

SEQ ID NO: 16879 - protein, 163 aa, Homo sapiens [sequence omitted]

SEQ ID NO: 16880 - DNA, 1286 bp, Homo sapiens
caggagtctgccgtgcacccgagggagattttcaagcagaaggagagggccatgtccaccacctccatctccagtcctcagcctggcaagctgaggagccccttcctgcagaagcagctcacccaaccagagacccactttggcagagagccagctgctgccatctcaaggcccagggcagatctccctgctgaggagccggcgcccagcactcctccatgtctggtgcaggcagaagaggaggctgtgtatgaggaacctccagagcaggagaccttctacgagcagcccccactggtgcagcagcaaggtgctggctctgagcacattgaccaccacattcagggccaggggctcagtgggcaagggctctgtgcccgtgccctgtacgactaccaggcagccgacgacacagagatctcctttgaccccgagaacctcatcacgggcatcgaggtgatcgacgaaggctggtggcgtggctatgggccggatggccattttggcatgttccctgccaactacgtggagctcattgagtgaggctgagggcacatcttgcccttcccctctcagacatggcttccttattgctggaagaggaggcctgggagttgacattcagcactcttccaggaataggacccccagtgaggatgaggcctcagggctccctccggcttggcagactcagcctgtcaccccaaatgcagcaatggcctggtgattcccacacatccttcctgcatcccccgaccctcccagacagcttggctcttgcccctgacaggatactgagccaagccctgcctgtggccaagccctgagtggccactgccaagctgcggggaagggtcctgagcaggggcatctgggaggctctggctgccttctgcatttatttgccttttttctttttctcttgcttctaaggggtggtggccaccactgtttagaatgacccttgggaacagtgaacgtagagaattgtttttagcagagtttgtgaccaaagtcagagtggatcatggtggtttggcagcagggaatttgtcttgttggagcctgctctgtgctccccactccatttctctgtccctctgcctgggctatgggaagtggggatgcagatggccaagctcccaccctgggtattcaaaaacggcagacacaacatgttcctccacgcggctcactcgatgcctgcaggccccagtgtgtgcctcaactgattctgacttcaggaaaagtaacacagagtggccttggcctgttgtcttccccta

SEQ ID NO: 16881 - protein, 163 aa, Homo sapiens [sequence omitted]

SEQ ID NO: 16882 - DNA, 548 bp, Homo sapiens
caggagcgtcggtacgcaggcctgaagcccggggaactccccacctgcgagagcctcaaggacaccattgcccggcccacgggaacagcctgcggggcattgtcaagcacctggaagggatgtcagaccaggcgatcatggagctgaacctgcccacggggatccccattgtgtatgagctgaacaaggagctgaagcccaccaagcccatgcagttcctgggtgatgaggaaacggtgcggaaggccatggaggctgtggctgcccagggcaaggccaagtgaggggtgggcttgggcaataaaggcacctcccccaacagcctggagtccagcgcagccgtgcatgccaggctcacaccgccatcagctgtggggactccagaaccaggggtgcagccacccaccctcccccactccatacgtgtgtcaccaggggcaggagcctagtacccacacctagtcatcaggacactgagccagggctgcaaccactccatgagtttgcagtcaggacaagcctgtggtgaccctgaagcttcagagcca

SEQ ID NO: 16883 - protein, 78 aa, Homo sapiens
MRKRCGRPWRLWLPRARPSEGWAWAIKAPPPTAWSPAQPCMPGSHRHQLWGLQNQGCSHPPSPTPYVCHQGQEPSTHT

SEQ ID NO: 16884 - DNA, 898 bp, Homo sapiens
tgttgggaagcagccgtccccgtccagagtcctctgtggtccctgctgccaccatggccactcaccgcctcgtgatggtccggcacggcgagagcacatggaaccaggagaaccgtttctgtggctggttcgatgcagagctgagtgaaaaggggaccgaggaggccaagcggggagccaaggccatcaaggatgccaagatggagtttgacatctgctacacgtcagtgctgaagcgggccatccgcaccctctgggccatcctggacggcacggaccagatgtggctgcctgtggtgcgcacttggcgcctcaatgagcggcattacgggggcctcacaggcctcaacaaggcagaaacggccgccaagcacggggaggagcaggtgaagatctggaggcgctccttcgacatcccgccgcccccgatggacgagaagcacccctactacaactccattagcaagggatgtcagaccaggcgatcatggagctgaacctgcccacggggatccccattgtgtatgagctgaacaaggagctgaagcccaccaagcccatgcagttcctgggtgatgaggaaacggtgcggaaggccatggaggctgtggctgcccagggcaaggccaagtgaggggtgggcttgggcaataaaggcacctcccccaacagcctggagtccagcgcagccgtgcatgccaggctcacaccgccatcagctgtggggactccagaaccaggggtgcagccacccaccctcccccactccatacgtgtgtcaccaggggcaggagcctagtacccacacctagtcatcaggacactgagccagggctgcaaccactccatgagtttgcagtcaggacaagcctgtggtgaccctgaagcttcagagcca

SEQ ID NO: 16885 - protein, 147 aa, Homo sapiens
MATHRLVMVRHGESTWNQENRFCGWFDAELSEKGTEEAKRGAKAIKDAKMEFDICYTSVLKRAIRTLWAILDGTDQMWLPVVRTWRLNERHYGGLTGLNKAETAAKHGEEQVKIWRRSFDIPPPPMDEKHPYYNSISKGCQTRRSWS

SEQ ID NO: 16886 - DNA, 1079 bp, Homo sapiens
tgttgggaagcagccgtccccgtccagagtcctctgtggtccctgctgccaccatggccactcaccgcctcgtgatggtccggcacggcgagagcacatggaaccaggagaaccgtttctgtggctggttcgatgcagagctgagtgaaaaggggaccgaggaggccaagcggggagccaaggccatcaaggatgccaagatggagtttgacatctgctacacgtcagtgctgaagcgggccatccgcaccctctgggccatcctggacggcacggaccagatgtggctgcctgtggtgcgcacttggcgcctcaatgagcggcattacgggggcctcacaggcctcaacaaggcagaaacggccgccaagcacggggaggagcaggtgaagatctggaggcgctccttcgacatcccgccgcccccgatggacgagaagcacccctactacaactccattagcaaggagcgtcggtacgcaggcctgaagcccggggaactccccacctgcgagagcctcaaggacaccattgcccgggccctgcccttctggaacgaggagattgttccccagatcaaggccggcaagcgagtgctcattgcagcccacgggaacagcctgcggggcattgtcaagcacctggaagggatgtcagaccaggcgatcatggagctgaacctgcccacggggatccccattgtgtatgagctgaacaaggagctgaagcccaccaagcccatgcagttcctgggtgatgaggaaacggtgcggaaggccatggaggctgtggctgcccagggcaaggccaagtgaggggtgggcttgggcaataaaggcacctcccccaacagcctggagtccagcgcagccgtgcatgccaggctcacaccgccatcagctgtggggactccagaaccaggggtgcagccacccaccctcccccactccatacgtgtgtcaccaggggcaggagcctagtacccacacctagtcatcaggacactgagccagggctgcaaccactccatgagtttgcagtcaggacaagcctgtggtgaccctgaagcttcagagcca

SEQ ID NO: 16887 - protein, 253 aa, Homo sapiens; identical to SEQ ID NO: 1980

SEQ ID NO: 16888 - DNA, 320 bp, Homo sapiens
caggagcgtcggtacgcaggcctgaagcccggggaactccccacctgcgagagcctcaaggacaccattgcccggcccacgggaacagcctgcggggcattgtcaagcacctggaagggatgtcagaccaggcgatcatggagctgaacctgcccacggggatccccattgtgtatgagctgaacaaggagctgaagcccaccaagcccatgcagttcctgggtgatgaggaaacggtgcggaaggccatggaggctgtggctgcccagggcaaggccaagtgaggggtgggcttgggcaataaaggcacctcccccaac

SEQ ID NO: 16889 - protein, 54 aa, Homo sapiens [sequence omitted]

SEQ ID NO: 16890 - DNA, 670 bp, Homo sapiens
tgttgggaagcagccgtccccgtccagagtcctctgtggtccctgctgccaccatggccactcaccgcctcgtgatggtccggcacggcgagagcacatggaaccaggagaaccgtttctgtggctggttcgatgcagagctgagtgaaaaggggaccgaggaggccaagcggggagccaaggccatcaaggatgccaagatggagtttgacatctgctacacgtcagtgctgaagcgggccatccgcaccctctgggccatcctggacggcacggaccagatgtggctgcctgtggtgcgcacttggcgcctcaatgagcggcattacgggggcctcacaggcctcaacaaggcagaaacggccgccaagcacggggaggagcaggtgaagatctggaggcgctccttcgacatcccgccgcccccgatggacgagaagcacccctactacaactccattagcaagggatgtcagaccaggcgatcatggagctgaacctgcccacggggatccccattgtgtatgagctgaacaaggagctgaagcccaccaagcccatgcagttcctgggtgatgaggaaacggtgcggaaggccatggaggctgtggctgcccagggcaaggccaagtgaggggtgggcttgggcaataaaggcacctcccccaac

SEQ ID NO: 16891 - protein, 147 aa, Homo sapiens; identical to SEQ ID NO: 16885

SEQ ID NO: 16892 - DNA, 851 bp, Homo sapiens
tgttgggaagcagccgtccccgtccagagtcctctgtggtccctgctgccaccatggccactcaccgcctcgtgatggtccggcacggcgagagcacatggaaccaggagaaccgtttctgtggctggttcgatgcagagctgagtgaaaaggggaccgaggaggccaagcggggagccaaggccatcaaggatgccaagatggagtttgacatctgctacacgtcagtgctgaagcgggccatccgcaccctctgggccatcctggacggcacggaccagatgtggctgcctgtggtgcgcacttggcgcctcaatgagcggcattacgggggcctcacaggcctcaacaaggcagaaacggccgccaagcacggggaggagcaggtgaagatctggaggcgctccttcgacatcccgccgcccccgatggacgagaagcacccctactacaactccattagcaaggagcgtcggtacgcaggcctgaagcccggggaactccccacctgcgagagcctcaaggacaccattgcccgggccctgcccttctggaacgaggagattgttccccagatcaaggccggcaagcgagtgctcattgcagcccacgggaacagcctgcggggcattgtcaagcacctggaagggatgtcagaccaggcgatcatggagctgaacctgcccacggggatccccattgtgtatgagctgaacaaggagctgaagcccaccaagcccatgcagttcctgggtgatgaggaaacggtgcggaaggccatggaggctgtggctgcccagggcaaggccaagtgaggggtgggcttgggcaataaaggcacctcccccaac

SEQ ID NO: 16893 - protein, 253 aa, Homo sapiens; identical to SEQ ID NO: 1980

SEQ ID NO: 16894 - DNA, 1301 bp, Homo sapiens
ctgaaggtggcctcaccttccaggtgcttgacaatgccccgcaggctgttcccgtgggctgcaatgagcactcgcttgccggccttgatctggggaacaatctcctcgttccagaagggcagggcccgggcaatggtgtccttgaggctctcgcaggtggggagttccccgggcttcaggcctgcgtaccgacgctcctgggggacacaggcacgctgctttccctcccaagccagtgggcccccacccgactccccactctgcagcttcccagaggccttcccagcaaaggcagcccaccttgctaatggagttgtagtaggggtgcttctcgtccatcgggggcggcgggatgtcgaaggagcgcctccagatcttcacctgctcctccccgtgcttggcggccgtttctgccttgttgaggcctgtgaggcccccgtaatgccgctcattgaggcgccaagtgcgcaccacaggcagccacatctggtccgtgccgtccaggatggcccagagggtgcggatggcccgcttcagcactgacgtgtagcagatgtcaaactccatcttggcatccttgatggccttggctccccgcttggcctcctcggtccccttttcactcagctctgcatcgaaccagccacagaaacggttctcctggttccatgtgctctcgccgtgccggaccatcacgaggcgccaggctaggaggcggccctcagcaggcagaggaggagagccagaggagctggtgcagaccacagctttgtggagaggagtctggccttgtggaaggttatccaaaataacccagtgtatgaaaaccaggaaaatcttaacatgggagaaaagaagatgatcaatacatgcccatcctgagatgattcaactattggaatgatcagatacagacttcaaagcagctatttataaccagccttcagaaagtattggtgaatattcttaaacagaatggaaatgacaaagcatggagtccataaattagatgatagtttggaaaaagatataaacttacaaaccaagaagctcagtgaaccacacaactggataaattaacaacaaaagtccaagcttagacacatcataaagaaacttctgaaaactaaagaccaagaaaaataagatcagccagagaaaaacgatacatttcattcaggtgaacaattctttgaaagactggatcttcaccagaaactatagaggccagaaagaagtggaacatttttagttttgaaataactgtcacccaagaattctatatccagtaaaaatttcta

SEQ ID NO: 16895 - protein, 102 aa, Homo sapiens
MSNSILASLMALAPRLASSVPFSLSSASNQPQKRFSWFHVLSPCRTITRRQARRRPSAGRGGEPEELVQTTALWRGVWPCGRLSKITQCMKTRKILTWEKRR

SEQ ID NO: 16896 - DNA, 889 bp, Homo sapiens
ctgaaggtggcctcaccttccaggtgcttgacaatgccccgcaggctgttcccgtgggctgcaatgagcactcgcttgccggccttgatctggggaacaatctcctcgttccagaagggcagggcccgggcaatggtgtccttgaggctctcgcaggtggggagttccccgggcttcaggcctgcgtaccgacgctcctgggggacacaggcacgctgctttccctcccaagccagtgggcccccacccgactccccactctgcagcttcccagaggccttcccagcaaaggcagcccaccttgctaatggagttgtagtaggggtgcttctcgtccatcgggggcggcgggatgtcgaaggagcgcctccagatcttcacctgctcctccccgtgcttggcggccgtttctgccttgttgaggcctgtgaggcccccgtaatgccgctcattgaggcgccaagtgcgcaccacaggcagccacatctggtccgtgccgtccaggatggcccagagggtgcggatggcccgcttcagcactgacgtgtagcagatgtcaaactccatcttggcatccttgatggccttggctccccgcttggcctcctcggtccccttttcactcagctctgcatcgaaccagccacagaaacggttctcctggttccatgtgctctcgccgtgccggaccatcacgaggcgccaggctaggaggcggccctcagcaggcagaggaggagagccagaggagctggtgcagaccacagctttgtggagaggagtctggccttgtggaaggggtgctcacaacgctggtggactgcaaaatgacagacgcactcgggacaacaacttggctcttatgaaataaacatatacttaccaaatg

SEQ ID NO: 16897 - protein, 105 aa, Homo sapiens
MSNSILASLMALAPRLASSVPFSLSSASNQPQKRFSWFHVLSPCRTITRRQARRRPSAGRGGEPEELVQTTALWRGVWPCGRGAHNAGGLQNDRRTRDNNLALMK

SEQ ID NO: 16898 - DNA, 1464 bp, Homo sapiens
acagggcctcatcctgtaccaccagcaccagcacagctgctgtgagtcccctacccgcctggcccaacagagccacatggacgcttttgagagaagtttctgcattttccgcctaccacaacctccaggggctgctgtggggggatccacgaggccctgcccatcctggaaggccgtgagagtggacttggtagttgcacccgtcagccagttccctttcgccctgctcggttggactggctccaagcttttccagcgggagctgcgccgcttcagccggaaggagaagggcctgtggctgaacagccatgggctgtttgacccggagcagaagacatttttccaagcggcttcagaggaagacatcttcagacacctgggccttgagtaccttcctccagagcagagaaacgcctgagcctgcctgtgtcccccacttccactcaggaaattgggctgcccccaacctggccactgaatgtctccaggcagatatgctgccccctgacccccaccttcacccctccccgccaaggcctggctcttccggaggtcaattgtgcctgcaggatcagttgagcccctgctggtgtgctgcagggtgtgatgaggtgggagccctcagtgccagcctcatcactgtgtgaccctgggtctgctcttagcctccccatggctcacgttcctgccctggatgggatgtgagtggggcccacatcgtggagctgtggtggggcctgcagtcatgaatggcaagtggtccctgatgtgcagtgtctcattagttgcactgcagttaactgtggctcctgcagggcaccctgcccagaatgcccagaagagaaccatgcatacctgcactgcatttgagagccatgagctggaggctgtggttcgtgccagcaaggagcctactgtctggtgtgctgtaggcatctggagagggagagggcctgggtaggagctgggaggaagataattttcaactatggggcttcagtactgcagcgccccgagccaggctctgtgcttctgcctttaaggcctgttctcagcacaatgtctcaaaaataggtcatatcctgccactcccgtcgcagagccctttaatggttccaaaccctaagtccacacatagcccctggctctggcatctctccagccccactggccccgagctgcttgactcaccggcttcctatttgatgcacccaggcccccttgtggccaactccctccccttctcactgaggcagaagcactgaggtgggctggacatgggtgccctccacgtccctcatatccccaggcacactctggcctcaggttttgccctggccatgtcatctacctggagtgggccctccccttcttcaggccttgaatcaaaagccactttgttaggcgaggatttcccagaccactcatcacattaaaaaatattttgaaaacatgcagtaaagt

SEQ ID NO: 16899 - protein, 113 aa, Homo sapiens
MDAFERSFCIFRLPQPPGAAVGGSTRPCPSWKAVRVDLVVAPVSQFPFALLGWTGSKLFQRELRRFSRKEKGLWLNSHGLFDPEQKTFFQAASEEDIFRHLGLEYLPPEQRNA

SEQ ID NO: 16900 - DNA, 2393 bp, Homo sapiens
gctcggagtttccctctgcgttcgctccgcgctgctggaggctgtcgtcccaatgctccccaaacggcggcgagcgcgggtcgggtcccctagcggcgatgccgcttcctccacgccgccctcgacgcgcttcccgggagtcgccatctacctggtcgagcctcgcatgggtcgcagccgccgggccttcctcacaggcctggcgcgctccaaaggcttccgcgtccttgacgcctgcagctccgaagcgacacatgttgtgatggaagagacctcagcagaggaggccgtcagctggcaggagcgcaggatggcagctgctcccccgggttgcacccccccagctctgctggacataagctggttaacagagagcctgggagctgggcagcctgtacctgtggagtgccggcaccgcctggaggagctgctggagcatggagtgtgtgaggaggtggagagagttcggcgctcagagagggctccagcaccaccaggacctgagcaccccagtcctgcggtccgatgtagatgccctgcagcaggtggtggaggaagctgtggggcaggccctgcctggggccaccgtcacgctgaccggcggcttccgcaggtaagaaggcccgacgtgcccctctggcttggcttcagacccctccccagtgaagggacctgagtcggggaccctgaagcgggcccactcgttggaagggatgtggcctggggctggagtgagcaggccgtgtccctgagtcagagtcagactgacgccctcagggggaagttgcagggccatgacgtggacttcctcatcacccaccccaaggagggtcaggaggcggggctgctgcctagagtgatgtgccgcctgcaggaccagggcctcatcctgtaccaccagcaccagcacagctgctgtgagtcccctacccgcctggcccaacagagccacatggacgcttttgagagaagtttctgcattttccgcctaccacaacctccaggggctgctgtggggggatccacgaggccctgcccatcctggaaggccgtgagagtggacttggtagttgcacccgtcagccagttccctttcgccctgctcggttggactggctccaagcttttccagcgggagctgcgccgcttcagccggaaggagaagggcctgtggctgaacagccatgggctgtttgacccggagcagggaagcagcagtggcaagactcctaggtcacggaagtcctgcttctgttgcagaagacatttttccaagcggcttcagaggaagacatcttcagacacctgggccttgagtaccttcctccagagcagagaaacgcctgagcctgcctgtgtcccccacttccactcaggaaattgggctgcccccaacctggccactgaatgtctccaggcagatatgctgccccctgacccccaccttcacccctccccgccaaggcctggctcttccggaggtcaattgtgcctgcaggatcagttgagcccctgctggtgtgctgcagggtgtgatgaggtgggagccctcagtgccagcctcatcactgtgtgaccctgggtctgctcttagcctccccatggctcacgttcctgccctggatgggatgtgagtggggcccacatcgtggagctgtggtggggcctgcagtcatgaatggcaagtggtccctgatgtgcagtgtctcattagttgcactgcagttaactgtggctcctgcagggcaccctgcccagaatgcccagaagagaaccatgcatacctgcactgcatttgagagccatgagctggaggctgtggttcgtgccagcaaggagcctactgtctggtgtgctgtaggcatctggagagggagagggcctgggtaggagctgggaggaagataattttcaactatggggcttcagtactgcagcgccccgagccaggctctgtgcttctgcctttaaggcctgttctcagcacaatgtctcaaaaataggtcatatcctgccactcccgtcgcagagccctttaatggttccaaaccctaagtccacacatagcccctggctctggcatctctccagccccactggccccgagctgcttgactcaccggcttcctatttgatgcacccaggcccccttgtggccaactccctccccttctcactgaggcagaagcactgaggtgggctggacatgggtgccctccacgtccctcatatccccaggcacactctggcctcaggttttgccctggccatgtcatctacctggagtgggccctccccttcttcaggccttgaatcaaaagccactttgttaggcgaggatttcccagaccactcatcacattaaaaaatattttgaaaacatgcagtaaagt

SEQ ID NO: 16901 - protein, 238 aa, Homo sapiens
MCRLQDQGLILYHQHQHSCCESPTRLAQQSHMDAFERSFCIFRLPQPPGAAVGGSTRPCPSWKAVRVDLVVAPVSQFPFALLGWTGSKLFQRELRRFSRKEKGLWLNSHGLFDPEQGSSSGKTPRSRKSCFCCRRHFSKRLQRKTSSDTWALSTFLQSRETPEPACVPHFHSGNWAAPNLATECLQADMLPPDPHLHPSPPRPGSSGGQLCLQDQLSPCWCAAGCDEVGALSASLITV

SEQ ID NO: 16902 - DNA, 2507 bp, Homo sapiens
agcctcactggggcttccttccgtctcgctcggagtttccctctgcgttcgctccgcgctgctggaggctgtcgtcccaatgctccccaaacggcggcgagcgcgggtcgggtcccctagcggcgatgccgcttcctccacgccgccctcgacgcgcttcccgggagtcgccatctacctggtcgagcctcgcatgggtcgcagccgccgggccttcctcacaggcctggcgcgctccaaaggcttccgcgtccttgacgcctgcagctccgaagcgacacatgttgtgatggaagagacctcagcagaggaggccgtcagctggcaggagcgcaggatggcagctgctcccccgggttgcacccccccagctctgctggacataagctggttaacagagagcctgggagctgggcagcctgtacctgtggagtgccggcaccgcctggaggtggctgggccaaggaaggggcctctgagcccagcatggatgcctgcctatgcctgccagcgccctacgcccctcacacaccacaacactggcctctccgaggctctggagatactggccgaggcagcaggctttgaaggcagtgagggccgcctcctcaccttctgcagagcagcctcggtgctcaaggcccttcccagccctgtcacaaccctgagccagctgcaggggcttccccactttggagaacactcctctagggttgtccaggagctgctggagcatggagtgtgtgaggaggtggagagagttcggcgctcagagaggtaccagaccatgaagctcttcacccagatcttcggggtcggtgtgaagactgctgaccggtggtaccgggaaggactgcgaaccttagatgacctccgagagcagccccagaaactaacccaacagcagaaagcggggctccagcaccaccaggacctgagcaccccagtcctgcggtccgatgtagatgccctgcagcaggtggtggaggaagctgtggggcaggccctgcctggggccaccgtcacgctgaccggcggcttccgcagggcctcatcctgtaccaccagcaccagcacagctgctgtgagtcccctacccgcctggcccaacagagccacatggacgcttttgagagaagtttctgcattttccgcctaccacaacctccaggggctgctgtggggggatccacgaggccctgcccatcctggaaggccgtgagagtggacttggtagttgcacccgtcagccagttccctttcgccctgctcggttggactggctccaagcttttccagcgggagctgcgccgcttcagccggaaggagaagggcctgtggctgaacagccatgggctgtttgacccggagcagaagacatttttccaagcggcttcagaggaagacatcttcagacacctgggccttgagtaccttcctccagagcagagaaacgcctgagcctgcctgtgtcccccacttccactcaggaaattgggctgcccccaacctggccactgaatgtctccaggcagatatgctgccccctgacccccaccttcacccctccccgccaaggcctggctcttccggaggtcaattgtgcctgcaggatcagttgagcccctgctggtgtgctgcagggtgtgatgaggtgggagccctcagtgccagcctcatcactgtgtgaccctgggtctgctcttagcctccccatggctcacgttcctgccctggatgggatgtgagtggggcccacatcgtggagctgtggtggggcctgcagtcatgaatggcaagtggtccctgatgtgcagtgtctcattagttgcactgcagttaactgtggctcctgcagggcaccctgcccagaatgcccagaagagaaccatgcatacctgcactgcatttgagagccatgagctggaggctgtggttcgtgccagcaaggagcctactgtctggtgtgctgtaggcatctggagagggagagggcctgggtaggagctgggaggaagataattttcaactatggggcttcagtactgcagcgccccgagccaggctctgtgcttctgcctttaaggcctgttctcagcacaatgtctcaaaaataggtcatatcctgccactcccgtcgcagagccctttaatggttccaaaccctaagtccacacatagcccctggctctggcatctctccagccccactggccccgagctgcttgactcaccggcttcctatttgatgcacccaggcccccttgtggccaactccctccccttctcactgaggcagaagcactgaggtgggctggacatgggtgccctccacgtccctcatatccccaggcacactctggcctcaggttttgccctggccatgtcatctacctggagtgggccctccccttcttcaggccttgaatcaaaagccactttgttaggcgaggatttcccagaccactcatcacattaaaaaatattttgaaaacatgcagtaaagt

SEQ ID NO: 16903 - protein, 380 aa, Homo sapiens
MLPKRRRARVGSPSGDAASSTPPSTRFPGVAIYLVEPRMGRSRRAFLTGLARSKGFRVLDACSSEATHVVMEETSAEEAVSWQERRMAAAPPGCTPPALLDISWLTESLGAGQPVPVECRHRLEVAGPRKGPLSPAWMPAYACQRPTPLTHHNTGLSEALEILAEAAGFEGSEGRLLTFCRAASVLKALPSPVTTLSQLQGLPHFGEHSSRVVQELLEHGVCEEVERVRRSERYQTMKLFTQIFGVGVKTADRWYREGLRTLDDLREQPQKLTQQQKAGLQHHQDLSTPVLRSDVDALQQVVEEAVGQALPGATVTLTGGFRRASSCTTSTSTAAVSPLPAWPNRATWTLLREVSAFSAYHNLQGLLWGDPRGPAHPGRP

SEQ ID NO: 16904 - DNA, 2610 bp, Homo sapiens
agcctcactggggcttccttccgtctcgctcggagtttccctctgcgttcgctccgcgctgctggaggctgtcgtcccaatgctccccaaacggcggcgagcgcgggtcgggtcccctagcggcgatgccgcttcctccacgccgccctcgacgcgcttcccgggagtcgccatctacctggtcgagcctcgcatgggtcgcagccgccgggccttcctcacaggcctggcgcgctccaaaggcttccgcgtccttgacgcctgcagctccgaagcgacacatgttgtgatggaagagacctcagcagaggaggccgtcagctggcaggagcgcaggatggcagctgctcccccgggttgcacccccccagctctgctggacataagctggttaacagagagcctgggagctgggcagcctgtacctgtggagtgccggcaccgcctggaggtggctgggccaaggaaggggcctctgagcccagcatggatgcctgcctatgcctgccagcgccctacgcccctcacacaccacaacactggcctctccgaggctctggagatactggccgaggcagcaggctttgaaggcagtgagggccgcctcctcaccttctgcagagcagcctcggtgctcaaggcccttcccagccctgtcacaaccctgagccagctgcaggggcttccccactttggagaacactcctctagggttgtccaggagctgctggagcatggagtgtgtgaggaggtggagagagttcggcgctcagagaggtaccagaccatgaagctcttcacccagatcttcggggtcggtgtgaagactgctgaccggtggtaccgggaaggactgcgaaccttagatgacctccgagagcagccccagaaactaacccaacagcagaaagcggggctccagcaccaccaggacctgagcaccccagtcctgcggtccgatgtagatgccctgcagcaggtggtggaggaagctgtggggcaggccctgcctggggccaccgtcacgctgaccggcggcttccgcagggggaagttgcagggccatgacgtggacttcctcatcacccaccccaaggagggtcaggaggcggggctgctgcctagagtgatgtgccgcctgcaggaccagggcctcatcctgtaccaccagcaccagcacagctgctgtgagtcccctacccgcctggcccaacagagccacatggacgcttttgagagaagtttctgcattttccgcctaccacaacctccaggggctgctgtggggggatccacgaggccctgcccatcctggaaggccgtgagagtggacttggtagttgcacccgtcagccagttccctttcgccctgctcggttggactggctccaagcttttccagcgggagctgcgccgcttcagccggaaggagaagggcctgtggctgaacagccatgggctgtttgacccggagcagaagacatttttccaagcggcttcagaggaagacatcttcagacacctgggccttgagtaccttcctccagagcagagaaacgcctgagcctgcctgtgtcccccacttccactcaggaaattgggctgcccccaacctggccactgaatgtctccaggcagatatgctgccccctgacccccaccttcacccctccccgccaaggcctggctcttccggaggtcaattgtgcctgcaggatcagttgagcccctgctggtgtgctgcagggtgtgatgaggtgggagccctcagtgccagcctcatcactgtgtgaccctgggtctgctcttagcctccccatggctcacgttcctgccctggatgggatgtgagtggggcccacatcgtggagctgtggtggggcctgcagtcatgaatggcaagtggtccctgatgtgcagtgtctcattagttgcactgcagttaactgtggctcctgcagggcaccctgcccagaatgcccagaagagaaccatgcatacctgcactgcatttgagagccatgagctggaggctgtggttcgtgccagcaaggagcctactgtctggtgtgctgtaggcatctggagagggagagggcctgggtaggagctgggaggaagataattttcaactatggggcttcagtactgcagcgccccgagccaggctctgtgcttctgcctttaaggcctgttctcagcacaatgtctcaaaaataggtcatatcctgccactcccgtcgcagagccctttaatggttccaaaccctaagtccacacatagcccctggctctggcatctctccagccccactggccccgagctgcttgactcaccggcttcctatttgatgcacccaggcccccttgtggccaactccctccccttctcactgaggcagaagcactgaggtgggctggacatgggtgccctccacgtccctcatatccccaggcacactctggcctcaggttttgccctggccatgtcatctacctggagtgggccctccccttcttcaggccttgaatcaaaagccactttgttaggcgaggatttcccagaccactcatcacattaaaaaatattttgaaaacatgcagtaaagt

SEQ ID NO: 16905 - protein, 494 aa, Homo sapiens; identical to SEQ ID NO: 1982

SEQ ID NO: 16906 - DNA, 2423 bp, Homo sapiens
agcctcactggggcttccttccgtctcgctcggagtttccctctgcgttcgctccgcgctgctggaggctgtcgtcccaatgctccccaaacggcggcgagcgcgggtcgggtcccctagcggcgatgccgcttcctccacgccgccctcgacgcgcttcccgggagtcgccatctacctggtcgagcctcgcatgggtcgcagccgccgggccttcctcacaggcctggcgcgctccaaaggcttccgcgtccttgacgcctgcagctccgaagcgacacatgttgtgatggaagagacctcagcagaggaggccgtcagctggcaggagcgcaggatggcagctgctcccccgggttgcacccccccagctctgctggacataagctggttaacagagagcctgggagctgggcagcctgtacctgtggagtgccggcaccgcctggaggtggctgggccaaggaaggggcctctgagcccagcatggatgcctgcctatgcctgccagcgccctacgcccctcacacaccacaacactggcctctccgaggctctggagatactggccgaggcagcaggctttgaaggcagtgagggccgcctcctcaccttctgcagagcagcctcggtgctcaaggcccttcccagccctgtcacaaccctgagccagctgcaggggcttccccactttggagaacactcctctagggttgtccaggagctgctggagcatggagtgtgtgaggaggtggagagagttcggcgctcagagagggctccagcaccaccaggacctgagcaccccagtcctgcggtccgatgtagatgccctgcagcaggtggtggaggaagctgtggggcaggccctgcctggggccaccgtcacgctgaccggcggcttccgcagggcctcatcctgtaccaccagcaccagcacagctgctgtgagtcccctacccgcctggcccaacagagccacatggacgcttttgagagaagtttctgcattttccgcctaccacaacctccaggggctgctgtggggggatccacgaggccctgcccatcctggaaggccgtgagagtggacttggtagttgcacccgtcagccagttccctttcgccctgctcggttggactggctccaagcttttccagcgggagctgcgccgcttcagccggaaggagaagggcctgtggctgaacagccatgggctgtttgacccggagcagggaagcagcagtggcaagactcctaggtcacggaagtcctgcttctgttgcagaagacatttttccaagcggcttcagaggaagacatcttcagacacctgggccttgagtaccttcctccagagcagagaaacgcctgagcctgcctgtgtcccccacttccactcaggaaattgggctgcccccaacctggccactgaatgtctccaggcagatatgctgccccctgacccccaccttcacccctccccgccaaggcctggctcttccggaggtcaattgtgcctgcaggatcagttgagcccctgctggtgtgctgcagggtgtgatgaggtgggagccctcagtgccagcctcatcactgtgtgaccctgggtctgctcttagcctccccatggctcacgttcctgccctggatgggatgtgagtggggcccacatcgtggagctgtggtggggcctgcagtcatgaatggcaagtggtccctgatgtgcagtgtctcattagttgcactgcagttaactgtggctcctgcagggcaccctgcccagaatgcccagaagagaaccatgcatacctgcactgcatttgagagccatgagctggaggctgtggttcgtgccagcaaggagcctactgtctggtgtgctgtaggcatctggagagggagagggcctgggtaggagctgggaggaagataattttcaactatggggcttcagtactgcagcgccccgagccaggctctgtgcttctgcctttaaggcctgttctcagcacaatgtctcaaaaataggtcatatcctgccactcccgtcgcagagccctttaatggttccaaaccctaagtccacacatagcccctggctctggcatctctccagccccactggccccgagctgcttgactcaccggcttcctatttgatgcacccaggcccccttgtggccaactccctccccttctcactgaggcagaagcactgaggtgggctggacatgggtgccctccacgtccctcatatccccaggcacactctggcctcaggttttgccctggccatgtcatctacctggagtgggccctccccttcttcaggccttgaatcaaaagccactttgttaggcgaggatttcccagaccactcatcacattaaaaaatattttgaaaacatgcagtaaagt

SEQ ID NO: 16907 - protein, 508 aa, Homo sapiens
MLPKRRRARVGSPSGDAASSTPPSTRFPGVAIYLVEPRMGRSRRAFLTGLARSKGFRVLDACSSEATHVVMEETSAEEAVSWQERRMAAAPPGCTPPALLDISWLTESLGAGQPVPVECRHRLEVAGPRKGPLSPAWMPAYACQRPTPLTHHNTGLSEALEILAEAAGFEGSEGRLLTFCRAASVLKALPSPVTTLSQLQGLPHFGEHSSRVVQELLEHGVCEEVERVRRSERAPAPPGPEHPSPAVRCRCPAAGGGGSCGAGPAWGHRHADRRLPQGLILYHQHQHSCCESPTRLAQQSHMDAFERSFCIFRLPQPPGAAVGGSTRPCPSWKAVRVDLVVAPVSQFPFALLGWTGSKLFQRELRRFSRKEKGLWLNSHGLFDPEQGSSSGKTPRSRKSCFCCRRHFSKRLQRKTSSDTWALSTFLQSRETPEPACVPHFHSGNWAAPNLATECLQADMLPPDPHLHPSPPRPGSSGGQLCLQDQLSPCWCAAGCDEVGALSASLITV

SEQ ID NO: 16908 - DNA, 3235 bp, Homo sapiens
agcctcactggggcttccttccgtctcgctcggagtttccctctgcgttcgctccgcgctgctggaggctgtcgtcccaatgctccccaaacggcggcgagcgcgggtcgggtcccctagcggcgatgccgcttcctccacgccgccctcgacgcgcttcccgggagtcgccatctacctggtcgagcctcgcatgggtcgcagccgccgggccttcctcacaggcctggcgcgctccaaaggcttccgcgtccttgacgcctgcagctccgaagcgacacatgttgtgatggaagagacctcagcagaggaggccgtcagctggcaggagcgcaggatggcagctgctcccccgggttgcacccccccagctctgctggacataagctggttaacagagagcctgggagctgggcagcctgtacctgtggagtgccggcaccgcctggaggtggctgggccaaggaaggggcctctgagcccagcatggatgcctgcctatgcctgccagcgccctacgcccctcacacaccacaacactggcctctccgaggctctggagatactggccgaggcagcaggctttgaaggcagtgagggccgcctcctcaccttctgcagagcagcctcggtgctcaaggcccttcccagccctgtcacaaccctgagccagctgcaggggcttccccactttggagaacactcctctagggttgtccaggagctgctggagcatggagtgtgtgaggaggtggagagagttcggcgctcagagaggtaccagaccatgaaggtgcgcagggcagggctcggacctaccccaggaatgtcctgccctgggaatgacaacacagtccacaccatgcacggggaggcaaacaggggcagctgacccagcccaggggtcagagaaggtcttgccgaggaagtggcagctaagctgatacctgatatgcacaaggcagccaagtggagacaggctggagtacagtggtgcgatcacagctcacggcagccttgacttcctgggctcaaaccatcctcccacctcagtctctggagtagctgggactacaggcatgtgccaccacaccagctcttcacccagatcttcggggtcggtgtgaagactgctgaccggtggtaccgggaaggactgcgaaccttagatgacctccgagagcagccccagaaactaacccaacagcagaaagcggggctccagcaccaccaggacctgagcaccccagtcctgcggtccgatgtagatgccctgcagcaggtggtggaggaagctgtggggcaggccctgcctggggccaccgtcacgctgaccggcggcttccgcaggtaagaaggcccgacgtgcccctctggcttggcttcagacccctccccagtgaagggacctgagtcggggaccctgaagcgggcccactcgttggaagggatgtggcctggggctggagtgagcaggccgtgtccctgagtcagagtcagactgacgccctcagggggaagttgcagggccatgacgtggacttcctcatcacccaccccaaggagggtcaggaggcggggctgctgcctagagtgatgtgccgcctgcaggaccaggtgagggcctccctgctccccaagagccaccgctggccaatgccactgcctcctgctctctccacaccaccggatggtctcagccacgcccgcctctccccacagggcctcatcctgtaccaccagcaccagcacagctgctgtgagtcccctacccgcctggcccaacagagccacatggacgcttttgagagaagtttctgcattttccgcctaccacaacctccaggggctgctgtggggggatccacgaggccctgcccatcctggaaggccgtgagagtggacttggtagttgcacccgtcagccagttccctttcgccctgctcggttggactggctccaagcttttccagcgggagctgcgccgcttcagccggaaggagaagggcctgtggctgaacagccatgggctgtttgacccggagcagggaagcagcagtggcaagactcctaggtcacggaagtcctgcttctgttgcagaagacatttttccaagcggcttcagaggaagacatcttcagacacctgggccttgagtaccttcctccagagcagagaaacgcctgagcctgcctgtgtcccccacttccactcaggaaattgggctgcccccaacctggccactgaatgtctccaggcagatatgctgccccctgacccccaccttcacccctccccgccaaggcctggctcttccggaggtcaattgtgcctgcaggatcagttgagcccctgctggtgtgctgcagggtgtgatgaggtgggagccctcagtgccagcctcatcactgtgtgaccctgggtctgctcttagcctccccatggctcacgttcctgccctggatgggatgtgagtggggcccacatcgtggagctgtggtggggcctgcagtcatgaatggcaagtggtccctgatgtgcagtgtctcattagttgcactgcagttaactgtggctcctgcagggcaccctgcccagaatgcccagaagagaaccatgcatacctgcactgcatttgagagccatgagctggaggctgtggttcgtgccagcaaggagcctactgtctggtgtgctgtaggcatctggagagggagagggcctgggtaggagctgggaggaagataattttcaactatggggcttcagtactgcagcgccccgagccaggctctgtgcttctgcctttaaggcctgttctcagcacaatgtctcaaaaataggtcatatcctgccactcccgtcgcagagccctttaatggttccaaaccctaagtccacacatagcccctggctctggcatctctccagccccactggccccgagctgcttgactcaccggcttcctatttgatgcacccaggcccccttgtggccaactccctccccttctcactgaggcagaagcactgaggtgggctggacatgggtgccctccacgtccctcatatccccaggcacactctggcctcaggttttgccctggccatgtcatctacctggagtgggccctccccttcttcaggccttgaatcaaaagccactttgttaggcgaggatttcccagaccactcatcacattaaaaaatattttgaaaacatgcagtaaagt

SEQ ID NO: 16909 - protein, 273 aa, Homo sapiens
MCRLQDQVRASLLPKSHRWPMPLPPALSTPPDGLSHARLSPQGLILYHQHQHSCCESPTRLAQQSHMDAFERSFCIFRLPQPPGAAVGGSTRPCPSWKAVRVDLVVAPVSQFPFALLGWTGSKLFQRELRRFSRKEKGLWLNSHGLFDPEQGSSSGKTPRSRKSCFCCRRHFSKRLQRKTSSDTWALSTFLQSRETPEPACVPHFHSGNWAAPNLATECLQADMLPPDPHLHPSPPRPGSSGGQLCLQDQLSPCWCAAGCDEVGALSASLITV

SEQ ID NO: 16910 - DNA, 547 bp, Homo sapiens
gccactgcctcctgctctctccacaccaccggatggtctcagccacgcccgcctctccccacagggcctcatcctgtaccaccagcaccagcacagctgctgtgagtcccctacccgcctggcccaacagagccacatggacgcttttgagagaagtttctgcattttccgcctaccacaacctccaggggctgctgtggggggatccacgaggccctgcccatcctggaaggccgtgagagtggacttggtagttgcacccgtcagccagttccctttcgccctgctcggttggactggctccaagcttttccagcgggagctgcgccgcttcagccggaaggagaagggcctgtggctgaacagccatgggctgtttgacccggagcaggtacattgttggggactggggacagcaaacagcacccatagtccgctccctgacccacaatctgaaatggccccagacccctccagcctgaaacccataggacccgaatctgggtctccacacacagttcctggccctcaagagcacaccccacct

SEQ ID NO: 16911 - protein, 136 aa, Homo sapiens
MDAFERSFCIFRLPQPPGAAVGGSTRPCPSWKAVRVDLVVAPVSQFPFALLGWTGSKLFQRELRRFSRKEKGLWLNSHGLFDPEQVHCWGLGTANSTHSPLPDPQSEMAPDPSSLKPIGPESGSPHTVPGPQEHTP

SEQ ID NO: 16912 - DNA, 1685 bp, Homo sapiens
agcctcactggggcttccttccgtctcgctcggagtttccctctgcgttcgctccgcgctgctggaggctgtcgtcccaatgctccccaaacggcggcgagcgcgggtcgggtcccctagcggcgatgccgcttcctccacgccgccctcgacgcgcttcccgggagtcgccatctacctggtcgagcctcgcatgggtcgcagccgccgggccttcctcacaggcctggcgcgctccaaaggcttccgcgtccttgacgcctgcagctccgaagcgacacatgttgtgatggaagagacctcagcagaggaggccgtcagctggcaggagcgcaggatggcagctgctcccccgggttgcacccccccagctctgctggacataagctggttaacagagagcctgggagctgggcagcctgtacctgtggagtgccggcaccgcctggaggtggctgggccaaggaaggggcctctgagcccagcatggatgcctgcctatgcctgccagcgccctacgcccctcacacaccacaacactggcctctccgaggctctggagatactggccgaggcagcaggctttgaaggcagtgagggccgcctcctcaccttctgcagagcagcctcggtgctcaaggcccttcccagccctgtcacaaccctgagccagctgcaggggcttccccactttggagaacactcctctagggttgtccaggagctgctggagcatggagtgtgtgaggaggtggagagagttcggcgctcagagaggtaccagaccatgaagctcttcacccagatcttcggggtcggtgtgaagactgctgaccggtggtaccgggaaggactgcgaaccttagatgacctccgagagcagccccagaaactaacccaacagcagaaagcgggtgagccctccagagaggctgggccctgggcttccctaaactgcaccctggatccctcagcatcaactccctagagggaagggagcagtctggtgcagagggtttggtggcagctttgtgtggtgggcttcctggggtctccacccagtgcagtcaggatctatcaaagccttttctcagtggacgatgctgaccacagcaacttccatgatatgccaggggcttgtgtctgcctactggttagactttgaccagtgaccagggacagcctgggccttgggcacactgcccagtgtggtgcttggtacatggaggcctgcagaggtggcactgagcagcagaaagaacatcagctttcaagtttgttaggcctgggtttgagtcttatctaccatttgccaggtaggtgaccattgcccaagaaataacctctctgagtctgttacattttctgtaaaatggagaaggaaggctgggcatggtgactcacacctgtaatcccagcactttgggaggtcaaggtgggtagatcgcttgagctcagcagttcaagaccagtctgggcaacagggtgaaaccctgtctctacgagaaatacaagagttagccaggcgtgatggtggatgcccgtagtaccagctactcatgaggccgaggtacaaggatcgctcgagcccgggaggtcaagccttgaggccaaggtggaagttgcaatgagctgagattgagccactgcactccagcctgagtgacagagcaagaccctatctc

SEQ ID NO: 16913 - protein, 302 aa, Homo sapiens
MLPKRRRARVGSPSGDAASSTPPSTRFPGVAIYLVEPRMGRSRRAFLTGLARSKGFRVLDACSSEATHVVMEETSAEEAVSWQERRMAAAPPGCTPPALLDISWLTESLGAGQPVPVECRHRLEVAGPRKGPLSPAWMPAYACQRPTPLTHHNTGLSEALEILAEAAGFEGSEGRLLTFCRAASVLKALPSPVTTLSQLQGLPHFGEHSSRVVQELLEHGVCEEVERVRRSERYQTMKLFTQIFGVGVKTADRWYREGLRTLDDLREQPQKLTQQQKAGEPSREAGPWASLNCTLDPSASTP

SEQ ID NO: 16914 - DNA, 976 bp, Homo sapiens
agcctcactggggcttccttccgtctcgctcggagtttccctctgcgttcgctccgcgctgctggaggctgtcgtcccaatgctccccaaacggcggcgagcgcgggtcgggtcccctagcggcgatgccgcttcctccacgccgccctcgacgcgcttcccgggagtcgccatctacctggtcgagcctcgcatgggtcgcagccgccgggccttcctcacaggcctggcgcgctccaaaggcttccgcgtccttgacgcctgcagctccgaagcgacacatgttgtgatggaagagacctcagcagaggaggccgtcagctggcaggagcgcaggatggcagctgctcccccgggttgcacccccccagctctgctggacataagctggttaacagagagcctgggagctgggcagcctgtacctgtggagtgccggcaccgcctggaggtggctgggccaaggaaggggcctctgagcccagcatggatgcctgcctatgcctgccagcgccctacgcccctcacacaccacaacactggcctctccgaggctctggagatactggccgaggcagcaggctttgaaggcagtgagggccgcctcctcaccttctgcagagcagcctcggtgctcaaggcccttcccagccctgtcacaaccctgagccagctgcaggggcttccccactttggagaacactcctctagggttgtccaggagctgctggagcatggagtgtgtgaggaggtggagagagttcggcgctcagagaggtaccagaccatgaaggttgcgagtggggacggcgcctgcctggtgcatggtgctccatgggccacaccgtcccggagcgggtgatcatccgagtctagccatgagagctctgcccaaccgggctacgctccttccccacagctcttcacccagatcttcggggtcggtgtgaagactgctgaccggtggtaccgggaa

SEQ ID NO: 16915 - protein, 260 aa, Homo sapiens
MLPKRRRARVGSPSGDAASSTPPSTRFPGVAIYLVEPRMGRSRRAFLTGLARSKGFRVLDACSSEATHVVMEETSAEEAVSWQERRMAAAPPGCTPPALLDISWLTESLGAGQPVPVECRHRLEVAGPRKGPLSPAWMPAYACQRPTPLTHHNTGLSEALEILAEAAGFEGSEGRLLTFCRAASVLKALPSPVTTLSQLQGLPHFGEHSSRVVQELLEHGVCEEVERVRRSERYQTMKVASGDGACLVHGAPWATPSRSG

SEQ ID NO: 16916 - DNA, 4093 bp, Homo sapiens
ggagacggctatccgcgcgggagtgcgccacgcggggccggagcgcctattagccgccaggacctcggagcgccccgaccacccctgagcccctctggcttcggagccccccagcaccccttcccgggtcccctcgcccaccctaatccactctccctccctttcccggattccctcgctcaccccatcctctctcccgccccttcctggattccctcacccgtctcgatcccctctccgccctttcccagagacccagagcccctgaccccccgcgccctccccggagccccccgcgcgtgccgcggccatggcggccgtgcgcggggcgcccctgctcagctgcctcctggcgttgctggccctgtgccctggagggcgcccgcagacggtgctgaccgacgacgagatcgaggagttcctcgagggcttcctgtcagagctagaacctgagccccgggaggacgacgtggaggccccgccgcctcccgagcccaccccgcgggtccgaaaagcccaggcggggggcaagccagggaagcggccagggacggccgcagaagtgcctccggaaaagaccaaagacaaagggaagaaaggcaagaaagacaaaggccccaaggtgcccaaggagtccttggaggggtcccccaggccgcccaagaaggggaaggagaagccacccaaggccaccaagaagcccaaggagaagccacctaaggccaccaagaagcccaaggagaagccacccaaggccaccaagaagcccaaagagaagccacccaaggccaccaagaagcccccgtcagggaagaggccccccattctggctccctcagaaaccctggagtggccactgcccccaccccccagccctggccccgaggagctaccccaggagggaggggcgcccctctcaaataactggcagaatccaggagaggagacccatgtggaggcacgggagcaccagcctgagccggaggaggagaccgagcaacccacactggactacaatgaccagatcgagagggaggactatgaggactttgagtacattcggcgccagaagcaacccaggccacccccaagcagaaggaggaggcccgagcgggtctggccagagccccctgaggagaaggccccggccccagccccggaggagaggattgagcctcctgtgaagcctctgctgcccccgctgccccctgactatggtgatggttacgtgatccccaactacgatgacatggactattactttgggcctcctccgccccagaagcccgatgctgagcgccagacagacgaagagaaggaggagctgaagaaacccaaaaaggaggacagcagccccaaggaggagaccgacaagtgggcagtggagaagggcaaggaccacaaagagccccgaaagggcgaggagttggaggaggagtggacgcctacggagaaagtcaagtgtccccccattgggatggagtcacaccgtattgaggacaaccagatccgagcctcctccatgctgcgccacggcctgggggcacagcgcggccggctcaacatgcagaccggtgccactgaggacgactactatgatggtgcgtggtgtgccgaggacgatgccaggacccagtggatagaggtggacaccaggaggactacccggttcacaggcgtcatcacccagggcagagactccagcatccatgacgattttgtgaccaccttcttcgtgggcttcagcaatgacagccagacatgggtgatgtacaccaacggctatgaggaaatgacctttcatgggaacgtggacaaggacacacccgtgctgagtgagctcccagagccggtggtggctcgtttcatccgcatctacccactcacctggaatggcagcctgtgcatgcgcctggaggtgctggggtgctctgtggcccctgtctacagctactacgcacagaatgaggtggtggccaccgatgacctggatttccggcaccacagctacaaggacatgcgccagctcatgaaggtggtgaacgaggagtgccccaccatcacccgcacttacagcctgggcaagagctcacgaggcctcaagatctatgccatggagatctcagacaaccctggggagcatgaactgggggagcccgagttccgctacactgctgggatccatggcaacgaggtgctgggccgagagctgttgctgctgctcatgcagtacctgtgccgagagtaccgcgatgggaacccacgtgtgcgcagcctggtgcaggacacacgcatccacctggtgccctcactgaaccctgatggctacgaggtggcagcgcagatgggctcagagtttgggaactgggcgctgggactgtggactgaggagggctttgacatctttgaagatttcccggatctcaactctgtgctctggggagctgaggagaggaaatgggtcccctaccgggtccccaacaataacttgcccatccctgaacgctacctttcgccagatgccacggtatccacggaggtccgggccatcattgcctggatggagaagaaccccttcgtgctgggagcaaatctgaacggcggcgagcggctagtatcctacccctacgatatggcccgcacgcctacccaggagcagctgctggccgcagccatggcagcagcccggggggaggatgaggacgaggtctccgaggcccaggagactccagaccacgccatcttccggtggcttgccatctccttcgcctccgcacacctcaccttgaccgagccctaccgcggaggctgccaagcccaggactacaccggcggcatgggcatcgtcaacggggccaagtggaacccccggaccgggactatcaatgacttcagttacctgcataccaactgcctggagctctccttctacctgggctgtgacaagttccctcatgagagtgagctgccccgcgagtgggagaacaacaaggaggcgctgctcaccttcatggagcaggtgcaccgcggcattaagggggtggtgacggacgagcaaggcatccccattgccaacgccaccatctctgtgagtggcattaatcacggcgtgaagacagccagtggtggtgattactggcgaatcttgaacccgggtgagtaccgcgtgacagcccacgcggagggctacaccccgagcgccaagacctgcaatgttgactatgacatcggggccactcagtgcaacttcatcctggctcgctccaactggaagcgcatccgggagatcatggccatgaacgggaaccggcctatcccacacatagacccatcgcgccctatgaccccccaacagcgacgcctgcagcagcgacgcctacaacaccgcctgcggcttcgggcacagatgcggctgcggcgcctcaacgccaccaccaccctaggcccccacactgtgcctcccacgctgccccctgcccctgccaccaccctgagcactaccatagagccctggggcctcataccgccaaccaccgctggctgggaggagtcggagactgagacctacacagaggtggtgacagagtttgggaccgaggtggagcccgagtttgggaccaaggtggagcccgagtttgagacccagttggagcctgagtttgagacccagctggaacccgagtttgaggaagaggaggaggaggagaaagaggaggagatagccactggccaggcattccccttcacaacagtagagacctacacagtgaactttggggacttctgagatcagcgtcctaccaagaccccagcccaactcaagctacagcagcagcacttcccaagcctgctgaccacagtcacatcacccatcagcacatggaaggcccctggtatggacactgaaaggaagggctggtcctgcccctttgagggggtgcaaacatgactgggacctaagagccagaggctgtgtagaggctcctgctccacctgccagtctcgtaagagatggggttgctgcagtgttggagtaggggcagagggagggagccaaggtcactccaataaaacaagctcatggcacggactg

SEQ ID NO: 16917 - protein, 1158 aa, Homo sapiens; identical to SEQ ID NO: 1984

SEQ ID NO: 16918 - DNA, 540 bp, Homo sapiens
tcctttccccaggccagatgctcctggaaggccgggctggtgacttcagcagggtcttgctcagctgcccctgagctcgggctgctcctgactcctgcaagaccctctcccaactcagctgtcccccatctcccgtcctcctcccctctggcgcggtcctgtcctgctgagctcctgtggacccaggagctgaggccccgcagcagggtcagggcagcctcagctggctctccctccccatagtggactattactttgggcctcctccgccccagaagcccgatgctgagcgccagacagacgaagagaaggaggagctgagtgagtgggaccaaggacttcccacaccaggcctgccctgaaggccacctggggcctgcctgatccaccccacatggtcctcaaagcccagagccaggctgactggcccctcctaccttgcaccttccagagaaacccaaaaaggaggacagcagccccaaggaggagaccgacaagtgggcagtggagaagggcaaggaccacaaagagccccgaaag

SEQ ID NO: 16919 - protein, 47 aa, Homo sapiens [sequence omitted]

SEQ ID NO: 16920 - DNA, 2572 bp, Homo sapiens
gtgaccaccttcttcgtgggcttcagcaatgacagccagacatgggtgatgtacaccaacggctatgaggaaatggtgggcaccatgcccaggctcttggctctgctcccattgtctgggcgaggggtgggctctcagaggggctggcagtactgctctgaggcctgcctctccccagacctttcatgggaacgtggacaaggacacacccgtgctgagtgagctcccagagccggtggtggctcgtttcatccgcatctacccactcacctggaatggcagcctgtgcatgcgcctggaggtgctggggtgctctgtggcccgtgagtgtggagggctggcaggggctctgagtggaggtggggtgctagggtgggccagccggcacccagctaaagacaaccccgcctcccttgcagctgtctacagctactacgcacagaatgaggtggtggccaccgatgacctggatttccggcaccacagctacaaggacatgcgccagctcatgaaggtggtgaacgaggagtgccccaccatcacccgcacttacagcctgggcaagagctcacgaggcctcaagatctatgccatggagatctcagacaaccctggggagcatgaactgggggagcccgagttccgctacactgctgggatccatggcaacgaggtgctgggccgagagctgttgctgctgctcatgcagtacctgtgccgagagtaccgcgatgggaacccacgtgtgcgcagcctggtgcaggacacacgcatccacctggtgccctcactgaaccctgatggctacgaggtggcagcgcagatgggctcagagtttgggaactgggcgctgggactgtggactgaggagggctttgacatctttgaagatttcccggatctcaactctgtgctctggggagctgaggagaggaaatgggtcccctaccgggtccccaacaataacttgcccatccctgaacgctacctttcgccagatgccacggtatccacggaggtccgggccatcattgcctggatggagaagaaccccttcgtgctgggagcaaatctgaacggcggcgagcggctagtatcctacccctacgatatggcccgcacgcctacccaggagcagctgctggccgcagccatggcagcagcccggggggaggatgaggacgaggtctccgaggcccaggagactccagaccacgccatcttccggtggcttgccatctccttcgcctccgcacacctcaccttgaccgagccctaccgcggaggctgccaagcccaggactacaccggcggcatgggcatcgtcaacggggccaagtggaacccccggaccgggactatcaatgacttcagttacctgcataccaactgcctggagctctccttctacctgggctgtgacaagttccctcatgagagtgagctgccccgcgagtgggagaacaacaaggaggcgctgctcaccttcatggagcaggtgcaccgcggcattaagggggtggtgacggacgagcaaggcatccccattgccaacgccaccatctctgtgagtggcattaatcacggcgtgaagacagccagtggtggtgattactggcgaatcttgaacccgggtgagtaccgcgtgacagcccacgcggagggctacaccccgagcgccaagacctgcaatgttgactatgacatcggggccactcagtgcaacttcatcctggctcgctccaactggaagcgcatccgggagatcatggccatgaacgggaaccggcctatcccacacatagacccatcgcgccctatgaccccccaacagcgacgcctgcagcagcgacgcctacaacaccgcctgcggcttcgggcacagatgcggctgcggcgcctcaacgccaccaccaccctaggcccccacactgtgcctcccacgctgccccctgcccctgccaccaccctgagcactaccatagagccctggggcctcataccgccaaccaccgctggctgggaggagtcggagactgagacctacacagaggtggtgacagagtttgggaccgaggtggagcccgagtttgggaccaaggtggagcccgagtttgagacccagttggagcctgagtttgagacccagctggaacccgagtttgaggaagaggaggaggaggagaaagaggaggagatagccactggccaggcattccccttcacaacagtagagacctacacagtgaactttggggacttctgagatcagcgtcctaccaagaccccagcccaactcaagctacagcagcagcacttcccaagcctgctgaccacagtcacatcacccatcagcacatggaaggcccctggtatggacactgaaaggaagggctggtcctgcccctttgagggggtgcaaacatgactgggacctaagagccagaggctgtgtagaggctcctgctccacctgccagtctcgtaagagatggggttgctgcagtgttggagtaggggcagagggagggagccaaggtcactccaataaaacaagctcatggcacggactg

SEQ ID NO: 16921 - protein, 733 aa, Homo sapiens
MRKWWAPCPGSWLCSHCLGEGWALRGAGSTALRPASPQTFHGNVDKDTPVLSELPEPVVARFIRIYPLTWNGSLCMRLEVLGCSVARECGGLAGALSGGGVLGWASRHPAKDNPASLAAVYSYYAQNEVVATDDLDFRHHSYKDMRQLMKVVNEECPTITRTYSLGKSSRGLKIYAMEISDNPGEHELGEPEFRYTAGIHGNEVLGRELLLLLMQYLCREYRDGNPRVRSLVQDTRIHLVPSLNPDGYEVAAQMGSEFGNWALGLWTEEGFDIFEDFPDLNSVLWGAEERKWVPYRVPNNNLPIPERYLSPDATVSTEVRAIIAWMEKNPFVLGANLNGGERLVSYPYDMARTPTQEQLLAAAMAAARGEDEDEVSEAQETPDHAIFRWLAISFASAHLTLTEPYRGGCQAQDYTGGMGIVNGAKWNPRTGTINDFSYLHTNCLELSFYLGCDKFPHESELPREWENNKEALLTFMEQVHRGIKGVVTDEQGIPIANATISVSGINHGVKTASGGDYWRILNPGEYRVTAHAEGYTPSAKTCNVDYDIGATQCNFILARSNWKRIREIMAMNGNRPIPHIDPSRPMTPQQRRLQQRRLQHRLRLRAQMRLRRLNATTTLGPHTVPPTLPPAPATTLSTTIEPWGLIPPTTAGWEESETETYTEVVTEFGTEVEPEFGTKVEPEFETQLEPEFETQLEPEFEEEEEEEKEEEIATGQAFPFTTVETYTVNFGDF

SEQ ID NO: 16922 - DNA, 796 bp, Homo sapiens
ggctcagagtttgggaactgggcgctgggactgtggactgaggagggctttgacatctttgaagatttcccggatctcaactctgtgctctggggagctgaggagaggaaatgggtcccctaccgggtccccaacaataacttgcccatccctgaacgctacctttcgccagatgccacggtatccacggaggtccgggccatcattgcctggatggagaagaaccccttcgtgctgggagcaaatctgaacggcggcgagcggctagtatcctacccctacgatatggcccgcacgcctacccaggagcagctgctggccgcagccatggcagcagcccggggggaggatgaggacgaggtctccgaggcccaggagactccagaccacgccatcttccggtggcttgccatctccttcgcctccgcacacctcaccttgaccgagccctaccgcggaggctgccaagcccaggactacaccggcggcatgggcatcgtcaacggggccaagtggaacccccggaccgggactatcaatgacttcagttacctgcataccaactgcctggagctctccttctacctgggctgtgacaagttccctcatgagagtgagctgccccgcgagtgggagaacaacaaggaggcgctgctcaccttcatggagcaggtgcaccgcggcattaagggggtggtgacggacgagcaaggcatccccattgccaacgccaccatctctgtgataggggcagagggagggagccaaggtcactccaataaaacaagctcatggc

SEQ ID NO: 16923 - protein, 193 aa, Homo sapiens
MEKNPFVLGANLNGGERLVSYPYDMARTPTQEQLLAAAMAAARGEDEDEVSEAQETPDHAIFRWLAISFASAHLTLTEPYRGGCQAQDYTGGMGIVNGAKWNPRTGTINDFSYLHTNCLELSFYLGCDKFPHESELPREWENNKEALLTFMEQVHRGIKGVVTDEQGIPIANATISVIGAEGGSQGHSNKTSS

SEQ ID NO: 16924 - DNA, 1400 bp, Homo sapiens
acttttgtggcaacacccccagctttggctccaaaatcatccgaggtcctgaggaccagacagtgctgttggtgactgtccctgacttcagtgccacgcagaccgcctgccttgtgaacctgcgcagcctggcctgccagcccatcagcttctcgggcttcggggcagaggacgatgacctgggaggcctggggctgggcccctgactcaaaaaagtggttttgaccagagaggcccagatggaggctgttcattccctgcagtgtcggcattgtaaataaagcctgagcacttgctgatgcgagccttgagccctgggcactctggctatgggactcctgcaggggtgcccacagtgaccatagcccatgcacccaccagccggtctccctcctccccatccctgacacctcagaatgtgagcagtccgtgccatgagcttgttttattggagtgaccttggctccctccctctgcccctactccaacactgcagcaaccccatctcttacgagactggcaggtggagcaggagcctctacacagcctctggctcttaggtcccagtcatgtttgcaccccctcaaaggggcaggaccagcccttcctttcagtgtccataccaggggccttccatgtgctgatgggtgatgtgactgtggtcagcaggcttgggaagtgctgctgctgtagcttgagttgggctggggtcttggtaggacgctgatctcagaagtccccaaagttcactgtgtaggtctctactgttgtgaaggggaatgcctggccagtggctatctcctcctctttctcctcctcctcctcttcctcaaactcgggttccagctgggtctcaaactcaggctccaactgggtctcaaactcgggctccaccttggtcccaaactcgggctccacctcggtcccaaactctgtcaccacctctgtgtaggtctcagtctccgactcctcccagccagcggtggttggcggtatgaggccccagggctctatggtagtgctcagggtggtggcaggggcagggggcagcgtgggaggcacagtgtgggggcctagggtggtggtggcgttgaggcgccgcagccgcatctgtgcccgaagccgcaggcggtgttgtaggcgtcgctgctgcaggcgtcgctgttggggggtcatagggcgcgatgggtctatgtgtgggataggccggttcccgttcatggccatgatctcccggatgcgcttccagttggagcgagccaggatgaagttgcactgagtggccccgatgtcatagtcaacattgcaggtcttggcgctcggggtgtagccctccgcgtgggctgtcacgcggtactcacccgggttcaagattcgccagtaatcaccaccactggctg

SEQ ID NO: 16925 - protein, 94 aa, Homo sapiens
MRPQGSMVVLRVVAGAGGSVGGTVWGPRVVVALRRRSRICARSRRRCCRRRCCRRRCWGVIGRDGSMCGIGRFPFMAMISRMRFQLERARMKLH

SEQ ID NO: 16926 - DNA, 1633 bp, Homo sapiens
gctccagctggtcaccaacccctaccaggccaccattgatggagtcagatttttggggacatcaggacagaacgtgagtgacattttccgatacagcagcatggaggatcacttggagatcctggagtggaccctgcgggtccgtcacatcagccccacagcccctgacactctaggttgttaccccttctacaaaactgacccgttcatcttcccagagtgcccgcatgtctacttttgtggcaacacccccagctttggctccaaaatcatccgaggtcctgaggaccagacagtgctgttggtgactgtccctgacttcagtgccacgcagaccgcctgccttgtgaacctgcgcagcctggcctgccagcccatcagcttctcgggcttcggggcagaggacgatgacctgggaggcctggggctgggcccctgactcaaaaaagtggttttgaccagagaggcccagatggaggctgttcattccctgcagtgtcggcattgtaaataaagcctgagcacttgctgatgcgagccttgagccctgggcactctggctatgggactcctgcaggggtgcccacagtgaccatagcccatgcacccaccagccggtctccctcctccccatccctgacacctcagaatgtgagcagtccgtgccatgagcttgttttattggagtgaccttggctccctccctctgcccctactccaacactgcagcaaccccatctcttacgagactggcaggtggagcaggagcctctacacagcctctggctcttaggtcccagtcatgtttgcaccccctcaaaggggcaggaccagcccttcctttcagtgtccataccaggggccttccatgtgctgatgggtgatgtgactgtggtcagcaggcttgggaagtgctgctgctgtagcttgagttgggctggggtcttggtaggacgctgatctcagaagtccccaaagttcactgtgtaggtctctactgttgtgaaggggaatgcctggccagtggctatctcctcctctttctcctcctcctcctcttcctcaaactcgggttccagctgggtctcaaactcaggctccaactgggtctcaaactcgggctccaccttggtcccaaactcgggctccacctcggtcccaaactctgtcaccacctctgtgtaggtctcagtctccgactcctcccagccagcggtggttggcggtatgaggccccagggctctatggtagtgctcagggtggtggcaggggcagggggcagcgtgggaggcacagtgtgggggcctagggtggtggtggcgttgaggcgccgcagccgcatctgtgcccgaagccgcaggcggtgttgtaggcgtcgctgctgcaggcgtcgctgttggggggtcatagggcgcgatgggtctatgtgtgggataggccggttcccgttcatggccatgatctcccggatgcgcttccagttggagcgagccaggatgaagttgcactgagtggccccgatgtcatagtcaacattgcaggtcttggcgctcggggtgtagccctccgcgtgggctgtcacgcggtactcacccgggttcaagattcgccagtaatcaccaccactggctg

SEQ ID NO: 16927 - protein, 112 aa, Homo sapiens
MEDHLEILEWTLRVRHISPTAPDTLGCYPFYKTDPFIFPECPHVYFCGNTPSFGSKIIRGPEDQTVLLVTVPDFSATQTACLVNLRSLACQPISFSGFGAEDDDLGGLGLGP

SEQ ID NO: 16928 - DNA, 1770 bp, Homo sapiens
aacctccttggcctgggcgaagctgtgtggaccaagcaagtcaggagtgtggccatgttttctgagcaggctgcccagagggcccacactctactgtccccaccatcagccaacaatgccacctttgcccgggtgccagtggcaacctacaccaacccctaccaggccaccattgatggagtcagatttttggggacatcaggacagaacgtgagtgacattttccgatacagcagcatggaggatcacttggagatcctggagtggaccctgcgggtccgtcacatcagccccacagcccctgacactctaggttgttaccccttctacaaaactgacccgttcatcttcccagagtgcccgcatgtctacttttgtggcaacacccccagctttggctccaaaatcatccgaggtcctgaggaccagacagtgctgttggtgactgtccctgacttcagtgccacgcagaccgcctgccttgtgaacctgcgcagcctggcctgccagcccatcagcttctcgggcttcggggcagaggacgatgacctgggaggcctggggctgggcccctgactcaaaaaagtggttttgaccagagaggcccagatggaggctgttcattccctgcagtgtcggcattgtaaataaagcctgagcacttgctgatgcgagccttgagccctgggcactctggctatgggactcctgcaggggtgcccacagtgaccatagcccatgcacccaccagccggtctccctcctccccatccctgacacctcagaatgtgagcagtccgtgccatgagcttgttttattggagtgaccttggctccctccctctgcccctactccaacactgcagcaaccccatctcttacgagactggcaggtggagcaggagcctctacacagcctctggctcttaggtcccagtcatgtttgcaccccctcaaaggggcaggaccagcccttcctttcagtgtccataccaggggccttccatgtgctgatgggtgatgtgactgtggtcagcaggcttgggaagtgctgctgctgtagcttgagttgggctggggtcttggtaggacgctgatctcagaagtccccaaagttcactgtgtaggtctctactgttgtgaaggggaatgcctggccagtggctatctcctcctctttctcctcctcctcctcttcctcaaactcgggttccagctgggtctcaaactcaggctccaactgggtctcaaactcgggctccaccttggtcccaaactcgggctccacctcggtcccaaactctgtcaccacctctgtgtaggtctcagtctccgactcctcccagccagcggtggttggcggtatgaggccccagggctctatggtagtgctcagggtggtggcaggggcagggggcagcgtgggaggcacagtgtgggggcctagggtggtggtggcgttgaggcgccgcagccgcatctgtgcccgaagccgcaggcggtgttgtaggcgtcgctgctgcaggcgtcgctgttggggggtcatagggcgcgatgggtctatgtgtgggataggccggttcccgttcatggccatgatctcccggatgcgcttccagttggagcgagccaggatgaagttgcactgagtggccccgatgtcatagtcaacattgcaggtcttggcgctcggggtgtagccctccgcgtgggctgtcacgcggtactcacccgggttcaagattcgccagtaatcaccaccactggctg

SEQ ID NO: 16929 - protein, 173 aa, Homo sapiens
MFSEQAAQRAHTLLSPPSANNATFARVPVATYTNPYQATIDGVRFLGTSGQNVSDIFRYSSMEDHLEILEWTLRVRHISPTAPDTLGCYPFYKTDPFIFPECPHVYFCGNTPSFGSKIIRGPEDQTVLLVTVPDFSATQTACLVNLRSLACQPISFSGFGAEDDDLGGLGLGP

SEQ ID NO: 16930 - DNA, 2925 bp, Homo sapiens
ggtgccggagagctggatggaggcagatcgggaattccatttggggcaaactgaacttgattgagaccctggtagttgtccagatggaacaggacacctgagtctagggttcgggaagaactccagatgggacaaacactcctagctttccttttctctttttggatgaccgctacaggtatcctttgggtgcagtgagacaccaggagagctgctgctttgggggatggacaggggcagcaggaatgcctttgtgttttcgcagtgaacctccttggcctgggcgaagctgtgtggaccaagcaagtcaggagtgtggccatgttttctgagcaggctgcccagagggcccacactctactgtccccaccatcagccaacaatgccacctttgcccgggtgccagtggcaacctacaccaactcctcacaacccttccggctaggagagcgcagctttagccggcagtatgcccacatttatgccacccgcctcatccaaatgagacccttcctggagaaccgggcccagcagcactggggcagtggagtgggagtgaagaagctgtgtgaactgcagcctgaggagaagtgctgtgtggtgggcactctgttcaaggccatgccgctgcagccctccatcctgcgggaggtcagcgaggagcacaacctgctcccccagcctcctcggagtaaatacatacacccagatgacgagctggtcttggaagatgaactgcagcgtatcaaactaaaaggcaccattgacgtgtcaaagctggttacggggactgtcctggctgtgtttggctccgtgagagacgacgggaagtttctggtggaggactattgctttgctgaccttgctccccagaagcccgcacccccacttgacacagataggtttgtgctactggtgtccggcctgggcctgggtggcggtggaggcgagagcctgctgggcacccagctgctggtggatgtggtgacggggcagcttggggacgaaggggagcagtgcagcgccgcccacgtctcccgggttatcctcgctggcaacctcctcagccacagcacccagagcagggattctatcaataaggccaaatacctcaccaagaaaacccaggcagccagcgtggaggctgttaagatgctggatgagatcctcctgcagctgagcgcctcagtgcccgtggacgtgatgccaggcgagtttgatcccaccaattacacgctcccccagcagcccctccacccctgcatgttcccgctggccactgcctactccacgctccagctggtcaccaacccctaccaggccaccattgatggagtcagatttttggggacatcaggacagaacgtgagtgacattttccgatacagcagcatggaggatcacttggagatcctggagtggaccctgcgggtccgtcacatcagccccacagcccctgacactctaggttgttaccccttctacaaaactgacccgttcatcttcccagagtgcccgcatgtctacttttgtggcaacacccccagctttggctccaaaatcatccgaggtcctgaggaccagacagtgctgttggtgactgtccctgacttcagtgccacgcagaccgcctgccttgtgaacctgcgcagcctggcctgccagcccatcagcttctcgggcttcggggcagaggacgatgacctgggaggcctggggctgggcccctgactcaaaaaagtggttttgaccagagaggcccagatggaggctgttcattccctgcagtgtcggcattgtaaataaagcctgagcacttgctgatgcgagccttgagccctgggcactctggctatgggactcctgcaggggtgcccacagtgaccatagcccatgcacccaccagccggtctccctcctccccatccctgacacctcagaatgtgagcagtccgtgccatgagcttgttttattggagtgaccttggctccctccctctgcccctactccaacactgcagcaaccccatctcttacgagactggcaggtggagcaggagcctctacacagcctctggctcttaggtcccagtcatgtttgcaccccctcaaaggggcaggaccagcccttcctttcagtgtccataccaggggccttccatgtgctgatgggtgatgtgactgtggtcagcaggcttgggaagtgctgctgctgtagcttgagttgggctggggtcttggtaggacgctgatctcagaagtccccaaagttcactgtgtaggtctctactgttgtgaaggggaatgcctggccagtggctatctcctcctctttctcctcctcctcctcttcctcaaactcgggttccagctgggtctcaaactcaggctccaactgggtctcaaactcgggctccaccttggtcccaaactcgggctccacctcggtcccaaactctgtcaccacctctgtgtaggtctcagtctccgactcctcccagccagcggtggttggcggtatgaggccccagggctctatggtagtgctcagggtggtggcaggggcagggggcagcgtgggaggcacagtgtgggggcctagggtggtggtggcgttgaggcgccgcagccgcatctgtgcccgaagccgcaggcggtgttgtaggcgtcgctgctgcaggcgtcgctgttggggggtcatagggcgcgatgggtctatgtgtgggataggccggttcccgttcatggccatgatctcccggatgcgcttccagttggagcgagccaggatgaagttgcactgagtggccccgatgtcatagtcaacattgcaggtcttggcgctcggggtgtagccctccgcgtgggctgtcacgcggtactcacccgggttcaagattcgccagtaatcaccaccactggctg

SEQ ID NO: 16931 - protein, 469 aa, Homo sapiens; identical to SEQ ID NO: 1986

SEQ ID NO: 16932 - DNA, 2778 bp, Homo sapiens
gcggggattggcgggatgcggcgcgccgcgcgtatcctttgggtgcagtgagacaccaggagagctgctgctttgggggatggacaggggcagcaggaatgcctttgtgttttcgcagtgaacctccttggcctgggcgaagctgtgtggaccaagcaagtcaggagtgtggccatgttttctgagcaggctgcccagagggcccacactctactgtccccaccatcagccaacaatgccacctttgcccgggtgccagtggcaacctacaccaactcctcacaacccttccggctaggagagcgcagctttagccggcagtatgcccacatttatgccacccgcctcatccaaatgagacccttcctggagaaccgggcccagcagcactggggcagtggagtgggagtgaagaagctgtgtgaactgcagcctgaggagaagtgctgtgtggtgggcactctgttcaaggccatgccgctgcagccctccatcctgcgggaggtcagcgaggagcacaacctgctcccccagcctcctcggagtaaatacatacacccagatgacgagctggtcttggaagatgaactgcagcgtatcaaactaaaaggcaccattgacgtgtcaaagctggttacggggactgtcctggctgtgtttggctccgtgagagacgacgggaagtttctggtggaggactattgctttgctgaccttgctccccagaagcccgcacccccacttgacacagataggtttgtgctactggtgtccggcctgggcctgggtggcggtggaggcgagagcctgctgggcacccagctgctggtggatgtggtgacggggcagcttggggacgaaggggagcagtgcagcgccgcccacgtctcccgggttatcctcgctggcaacctcctcagccacagcacccagagcagggattctatcaataaggccaaatacctcaccaagaaaacccaggcagccagcgtggaggctgttaagatgctggatgagatcctcctgcagctgagcgcctcagtgcccgtggacgtgatgccaggcgagtttgatcccaccaattacacgctcccccagcagcccctccacccctgcatgttcccgctggccactgcctactccacgctccagctggtcaccaacccctaccaggccaccattgatggagtcagatttttggggacatcaggacagaacgtgagtgacattttccgatacagcagcatggaggatcacttggagatcctggagtggaccctgcgggtccgtcacatcagccccacagcccctgacactctaggttgttaccccttctacaaaactgacccgttcatcttcccagagtgcccgcatgtctacttttgtggcaacacccccagctttggctccaaaatcatccgaggtcctgaggaccagacagtgctgttggtgactgtccctgacttcagtgccacgcagaccgcctgccttgtgaacctgcgcagcctggcctgccagcccatcagcttctcgggcttcggggcagaggacgatgacctgggaggcctggggctgggcccctgactcaaaaaagtggttttgaccagagaggcccagatggaggctgttcattccctgcagtgtcggcattgtaaataaagcctgagcacttgctgatgcgagccttgagccctgggcactctggctatgggactcctgcaggggtgcccacagtgaccatagcccatgcacccaccagccggtctccctcctccccatccctgacacctcagaatgtgagcagtccgtgccatgagcttgttttattggagtgaccttggctccctccctctgcccctactccaacactgcagcaaccccatctcttacgagactggcaggtggagcaggagcctctacacagcctctggctcttaggtcccagtcatgtttgcaccccctcaaaggggcaggaccagcccttcctttcagtgtccataccaggggccttccatgtgctgatgggtgatgtgactgtggtcagcaggcttgggaagtgctgctgctgtagcttgagttgggctggggtcttggtaggacgctgatctcagaagtccccaaagttcactgtgtaggtctctactgttgtgaaggggaatgcctggccagtggctatctcctcctctttctcctcctcctcctcttcctcaaactcgggttccagctgggtctcaaactcaggctccaactgggtctcaaactcgggctccaccttggtcccaaactcgggctccacctcggtcccaaactctgtcaccacctctgtgtaggtctcagtctccgactcctcccagccagcggtggttggcggtatgaggccccagggctctatggtagtgctcagggtggtggcaggggcagggggcagcgtgggaggcacagtgtgggggcctagggtggtggtggcgttgaggcgccgcagccgcatctgtgcccgaagccgcaggcggtgttgtaggcgtcgctgctgcaggcgtcgctgttggggggtcatagggcgcgatgggtctatgtgtgggataggccggttcccgttcatggccatgatctcccggatgcgcttccagttggagcgagccaggatgaagttgcactgagtggccccgatgtcatagtcaacattgcaggtcttggcgctcggggtgtagccctccgcgtgggctgtcacgcggtactcacccgggttcaagattcgccagtaatcaccaccactggctg

SEQ ID NO: 16933 - protein, 469 aa, Homo sapiens; identical to SEQ ID NO: 1986

SEQ ID NO: 16934 - DNA, 680 bp, Homo sapiens
aacctccttggcctgggcgaagctgtgtggaccaagcaagtcaggagtgtggccatgttttctgagcaggctgcccagagggcccacactctactgtccccaccatcagccaacaatgccacctttgcccgggtgccagtggcaacctacaccaacccctaccaggccaccattgatggagtcagatttttggggacatcaggacagaacgtgagtgacattttccgatacagcagcatggaggatcacttggagatcctggagtggaccctgcgggtccgtcacatcagccccacagcccctgacactctaggttgttaccccttctacaaaactgacccgttcatcttcccagagtgcccgcatgtctacttttgtggcaacacccccagctttggctccaaaatcatccgaggtcctgaggaccagacagtgctgttggtgactgtccctgacttcagtgccacgcagaccgcctgccttgtgaacctgcgcagcctggcctgccagcccatcagcttctcgggcttcggggcagaggacgatgacctgggaggcctggggctgggcccctgactcaaaaaagtggttttgaccagagaggcccagatggaggctgttcattccctgcagtgtcggcattgtaaataaagcctgagcacttgctgatgcgagccttg

SEQ ID NO: 16935 - protein, 173 aa, Homo sapiens; identical to SEQ ID NO: 16929

SEQ ID NO: 16936 - DNA, 1835 bp, Homo sapiens
ggtgccggagagctggatggaggcagatcgggaattccatttggggcaaactgaacttgattgagaccctggtagttgtccagatggaacaggacacctgagtctagggttcgggaagaactccagatgggacaaacactcctagctttccttttctctttttggatgaccgctacaggtatcctttgggtgcagtgagacaccaggagagctgctgctttgggggatggacaggggcagcaggaatgcctttgtgttttcgcagtgaacctccttggcctgggcgaagctgtgtggaccaagcaagtcaggagtgtggccatgttttctgagcaggctgcccagagggcccacactctactgtccccaccatcagccaacaatgccacctttgcccgggtgccagtggcaacctacaccaactcctcacaacccttccggctaggagagcgcagctttagccggcagtatgcccacatttatgccacccgcctcatccaaatgagacccttcctggagaaccgggcccagcagcactggggcagtggagtgggagtgaagaagctgtgtgaactgcagcctgaggagaagtgctgtgtggtgggcactctgttcaaggccatgccgctgcagccctccatcctgcgggaggtcagcgaggagcacaacctgctcccccagcctcctcggagtaaatacatacacccagatgacgagctggtcttggaagatgaactgcagcgtatcaaactaaaaggcaccattgacgtgtcaaagctggttacggggactgtcctggctgtgtttggctccgtgagagacgacgggaagtttctggtggaggactattgctttgctgaccttgctccccagaagcccgcacccccacttgacacagataggtttgtgctactggtgtccggcctgggcctgggtggcggtggaggcgagagcctgctgggcacccagctgctggtggatgtggtgacggggcagcttggggacgaaggggagcagtgcagcgccgcccacgtctcccgggttatcctcgctggcaacctcctcagccacagcacccagagcagggattctatcaataaggccaaatacctcaccaagaaaacccaggcagccagcgtggaggctgttaagatgctggatgagatcctcctgcagctgagcgcctcagtgcccgtggacgtgatgccaggcgagtttgatcccaccaattacacgctcccccagcagcccctccacccctgcatgttcccgctggccactgcctactccacgctccagctggtcaccaacccctaccaggccaccattgatggagtcagatttttggggacatcaggacagaacgtgagtgacattttccgatacagcagcatggaggatcacttggagatcctggagtggaccctgcgggtccgtcacatcagccccacagcccctgacactctaggttgttaccccttctacaaaactgacccgttcatcttcccagagtgcccgcatgtctacttttgtggcaacacccccagctttggctccaaaatcatccgaggtcctgaggaccagacagtgctgttggtgactgtccctgacttcagtgccacgcagaccgcctgccttgtgaacctgcgcagcctggcctgccagcccatcagcttctcgggcttcggggcagaggacgatgacctgggaggcctggggctgggcccctgactcaaaaaagtggttttgaccagagaggcccagatggaggctgttcattccctgcagtgtcggcattgtaaataaagcctgagcacttgctgatgcgagccttg

SEQ ID NO: 16937 - protein, 469 aa, Homo sapiens; identical to SEQ ID NO: 1986

SEQ ID NO: 16938 - DNA, 1688 bp, Homo sapiens
gcggggattggcgggatgcggcgcgccgcgcgtatcctttgggtgcagtgagacaccaggagagctgctgctttgggggatggacaggggcagcaggaatgcctttgtgttttcgcagtgaacctccttggcctgggcgaagctgtgtggaccaagcaagtcaggagtgtggccatgttttctgagcaggctgcccagagggcccacactctactgtccccaccatcagccaacaatgccacctttgcccgggtgccagtggcaacctacaccaactcctcacaacccttccggctaggagagcgcagctttagccggcagtatgcccacatttatgccacccgcctcatccaaatgagacccttcctggagaaccgggcccagcagcactggggcagtggagtgggagtgaagaagctgtgtgaactgcagcctgaggagaagtgctgtgtggtgggcactctgttcaaggccatgccgctgcagccctccatcctgcgggaggtcagcgaggagcacaacctgctcccccagcctcctcggagtaaatacatacacccagatgacgagctggtcttggaagatgaactgcagcgtatcaaactaaaaggcaccattgacgtgtcaaagctggttacggggactgtcctggctgtgtttggctccgtgagagacgacgggaagtttctggtggaggactattgctttgctgaccttgctccccagaagcccgcacccccacttgacacagataggtttgtgctactggtgtccggcctgggcctgggtggcggtggaggcgagagcctgctgggcacccagctgctggtggatgtggtgacggggcagcttggggacgaaggggagcagtgcagcgccgcccacgtctcccgggttatcctcgctggcaacctcctcagccacagcacccagagcagggattctatcaataaggccaaatacctcaccaagaaaacccaggcagccagcgtggaggctgttaagatgctggatgagatcctcctgcagctgagcgcctcagtgcccgtggacgtgatgccaggcgagtttgatcccaccaattacacgctcccccagcagcccctccacccctgcatgttcccgctggccactgcctactccacgctccagctggtcaccaacccctaccaggccaccattgatggagtcagatttttggggacatcaggacagaacgtgagtgacattttccgatacagcagcatggaggatcacttggagatcctggagtggaccctgcgggtccgtcacatcagccccacagcccctgacactctaggttgttaccccttctacaaaactgacccgttcatcttcccagagtgcccgcatgtctacttttgtggcaacacccccagctttggctccaaaatcatccgaggtcctgaggaccagacagtgctgttggtgactgtccctgacttcagtgccacgcagaccgcctgccttgtgaacctgcgcagcctggcctgccagcccatcagcttctcgggcttcggggcagaggacgatgacctgggaggcctggggctgggcccctgactcaaaaaagtggttttgaccagagaggcccagatggaggctgttcattccctgcagtgtcggcattgtaaataaagcctgagcacttgctgatgcgagccttg

SEQ ID NO: 16939 - protein, 469 aa, Homo sapiens; identical to SEQ ID NO: 1986

SEQ ID NO: 16940 - DNA, 659 bp, Homo sapiens
tccccctgtgggtttgcacttgccagcattgctgagaactgtctgaggagaagttcagaggcttggcacctgctctggaagctactctggaatcttaattctaaggccaatggctgcccaccccaacgggcagcaacagcagggccaaggtcttgtgacaatgtctggaggtgcccctattgtcacactgggggtctcctactggcctgcaatgggaggaggggctgcagccccacatcctgtgcagagtgctagtgctgaggcggaaccctcctcagagctgccccttctcctccaggttgttaccccttctacaaaactgacccgttcatcttcccagagtgcccgcatgtctacttttgtggcaacacccccagctttggctccaaaatcatccgaggtcctgaggaccagacagtgctgttggtgactgtccctgacttcagtgccacgcagaccgcctgccttgtgaacctgcgcagcctggcctgccagcccatcagcttctcgggcttcggggcagaggacgatgacctgggaggcctggggctgggcccctgactcaaaaaagtggttttgaccagagaggcccagatggaggctgttcattccctgcagtgtcggcattgtaaataaagcctgagcacttgctgatgcga

SEQ ID NO: 16941 - protein, 106 aa, Homo sapiens
MAAHPNGQQQQGQGLVTMSGGAPIVTLGVSYWPAMGGGAAAPHPVQSASAEAEPSSELPLLLQVVTPSTKLTRSSSQSARMSTFVATPPALAPKSSEVLRTRQCCW

SEQ ID NO: 16942 - DNA, 288 bp, Homo sapiens
gctgttaagatgctggatgagatcctcctgcagctgagcgcctcagtgcccgtggacgtgatgccaggcgagtttgatcccaccaattacacgctcccccagcagcccctccacccctgcatgttcccgctggccactgcctactccacgctccagctggtcaccaacccctaccaggccaccattgatggagtcagatttttggggacatcaggacagaacgtgagtgacattttccgatacagcagcatggaggatcacttggagatcctggagtggaccctgcgg

SEQ ID NO: 16943 - protein, 92 aa, Homo sapiens
MLDEILLQLSASVPVDVMPGEFDPTNYTLPQQPLHPCMFPLATAYSTLQLVTNPYQATIDGVRFLGTSGQNVSDIFRYSSMEDHLEILEWTL

SEQ ID NO: 16944 - DNA, 757 bp, Homo sapiens
gggtgagacatcggtatccaggcacgataaatttccaagtggacacaatgtctggtgtcaactacagctgttctccttcttttcccagtatcctttgggtgcagtgagacaccaggagagctgctgctttgggggatggacaggggcagcaggaatgcctttgtgttttcgcagtgaacctccttggcctgggcgaagctgtgtggaccaagcaagtcaggagtgtggccatgttttctgagcaggctgcccagagggcccacactctactgtccccaccatcagccaacaatgccacctttgcccgggtgccagtggcaacctacaccaactcctcacaacccttccggctaggagagcgcagctttagccggcagtatgcccacatttatgccacccgcctcatccaaatgagacccttcctggagaaccgggcccagcagcactggggcagtggagtgggagtgaagaagctgtgtgaactgcagcctgaggagaagtgctgtgtggtgggcactctgttcaaggccatgccgctgcagccctccatcctgcgggaggtcagcgaggagcacaacctgctcccccagcctcctcggagtaaatacatacacccagatgacgagctggtcttggaagatgaactgcagcgtatcaaactaaaaggcaccattgacgtgtcaaagctggttacggggactgtcctggctgtgtttggctccgtgagagacgacgggaagtttctggtggaggacta

SEQ ID NO: 16945 - protein, 174 aa, Homo sapiens
MFSEQAAQRAHTLLSPPSANNATFARVPVATYTNSSQPFRLGERSFSRQYAHIYATRLIQMRPFLENRAQQHWGSGVGVKKLCELQPEEKCCVVGTLFKAMPLQPSILREVSEEHNLLPQPPRSKYIHPDDELVLEDELQRIKLKGTIDVSKLVTGTVLAVFGSVRDDGKFLVE

SEQ ID NO: 16946 - DNA, 797 bp, Homo sapiens
gccactgcactccagcctggatgacagcgagactccgcctcaaaacaaaaacaaaaacagaaacaacaataacagaaaaacacagacatttactctctggcagttctggaggccagaagttgaaatccagatgtcagcaggattggctccttctgaaggcccgaggggagggtccttcctggcctcctccctggtgttcctgggcttgtggccgcatcactccgctctgcccgtcttcacactccctcttgtctgtgtgtctgtctctctgttctcatgaggacacttggcatccagggcccaaccacacccagagtccctggtctcctgtggctgactcactttttactgtcaccgtgaagtccagggggtccttgtacttgatgttctctcctggcaaggccagggccctgtgattggcctctcatggagtgctgggcagggcctccatggcctctgtcgggcgggggggctacttcatctctgagtctgtacccctcgtgtcccaggcagtggagtgggagtgaagaagctgtgtgaactgcagcctgaggagaagtgctgtgtggtgggcactctgttcaaggccatgccgctgcagccctccatcctgcgggaggtcagcgaggagcacaacctgctcccccagcctcctcggagtaaatacatacacccagatgacgagctggtcttggaagatgaactgcagcgtatcaaactaaaaggcaccattgacgtgtcaaagctggttacgggtagggagcccaatgagaggatgtgggtgatgcaggtgaaga

SEQ ID NO: 16947 - protein, 68 aa, Homo sapiens
MPLQPSILREVSEEHNLLPQPPRSKYIHPDDELVLEDELQRIKLKGTIDVSKLVTGREPNERMWVMQV

SEQ ID NO: 16948 - DNA, 732 bp, Homo sapiens
gggtgagacatcggtatccaggcacgataaatttccaagtggacacaatgtctggtgtcaactacagctgttctccttcttttcccagtatcctttgggtgcagtgagacaccaggagagctgctgctttgggggatggacaggggcagcaggaatgcctttgtgttttcgcagtgaacctccttggcctgggcgaagctgtgtggaccaagcaagtcaggagtgtggccatgttttctgagcaggctgcccagagggcccacactctactgtccccaccatcagccaacaatgccacctttgcccgggtgccagtggcaacctacaccaactcctcacaacccttccggctaggagagcgcagctttagccggcagtatgcccacatttatgccacccgcctcatccaaatgagacccttcctggagaaccgggcccagcagcactggggcagtggagtgggagtgaagaagctgtgtgaactgcagcctgaggagaagtgctgtgtggtgggcactctgttcaaggccatgccgctgcagccctccatcctgcgggaggtcagcgaggagcacaacctgctcccccagcctcctcggagtaaatacatacacccagatgacgagctggtcttggaagatgaactgcagcgtatcaaactaaaaggcaccattgacgtgtcaaagctggttacgggtagggagcccaatgagaggatgtgggtgatgcagg

SEQ ID NO: 16949 - protein, 166 aa, Homo sapiens
MFSEQAAQRAHTLLSPPSANNATFARVPVATYTNSSQPFRLGERSFSRQYAHIYATRLIQMRPFLENRAQQHWGSGVGVKKLCELQPEEKCCVVGTLFKAMPLQPSILREVSEEHNLLPQPPRSKYIHPDDELVLEDELQRIKLKGTIDVSKLVTGREPNERMWVM

SEQ ID NO: 16950 - DNA, 666 bp, Homo sapiens
cacagttggactcaccacatctcctgtacttcgtagccctaggtggctagtggcataagacacaaaaatctcagctctcctggagcttatggtctagttggagcaggcagacaatacatttaaaatatacagtttgttagaagtgaacctccttggcctgggcgaagctgtgtggaccaagcaagtcaggagtgtggccatgttttctgagcaggctgcccagagggcccacactctactgtccccaccatcagccaacaatgccacctttgcccgggtgccagtggcaacctacaccaactcctcacaacccttccggctaggagagcgcagctttagccggcagtatgcccacatttatgccacccgcctcatccaaatgagacccttcctggagaaccgggcccagcagcactggggcagtggagtgggagtgaagaagctgtgtgaactgcagcctgaggagaagtgctgtgtggtgggcactctgttcaaggccatgccgctgcagccctccatcctgcgggaggtcagcgaggagcacaacctgctcccccagcctcctcggagtaaatacatacacccagatgacgagctggtcttggaagatgaactgcagcgtatcaaactaaaaggcaccattgacgtgtcaaagctggttacggg

SEQ ID NO: 16951 - protein, 154 aa, Homo sapiens
MFSEQAAQRAHTLLSPPSANNATFARVPVATYTNSSQPFRLGERSFSRQYAHIYATRLIQMRPFLENRAQQHWGSGVGVKKLCELQPEEKCCVVGTLFKAMPLQPSILREVSEEHNLLPQPPRSKYIHPDDELVLEDELQRIKLKGTIDVSKLV

SEQ ID NO: 16952 - DNA, 555 bp, Homo sapiens
gggtgagacatcggtatccaggcacgataaatttccaagtggacacaatgtctggtgtcaactacagctgttctccttcttttcccagtatcctttgggtgcagtgagacaccaggagagctgctgctttgggggatggacaggggcagcaggaatgcctttgtgttttcgcagtgaacctccttggcctgggcgaagctgtgtggaccaagcaagtcaggagtgtggccatgttttctgagcaggctgcccagagggcccacactctactgtccccaccatcagccaacaatgccacctttgcccgggtgccagtggcaacctacaccaactcctcacaacccttccggctaggagagcgcagctttagccggcagtatgcccacatttatgccacccgcctcatccaaatgagacccttcctggagaaccgggcccagcagcactggggcagtggagtgggagtgaagaagctgtgtgaactgcagcctgaggagaagtgctgtgtggtgggcactctgttcaaggccatgccgctgcagccctccatcctgc

SEQ ID NO: 16953 - protein, 107 aa, Homo sapiens
MFSEQAAQRAHTLLSPPSANNATFARVPVATYTNSSQPFRLGERSFSRQYAHIYATRLIQMRPFLENRAQQHWGSGVGVKKLCELQPEEKCCVVGTLFKAMPLQPSI

SEQ ID NO: 16954 - DNA, 500 bp, Homo sapiens
aggcgcgcggggattggcgggatgcggcgcgccgcgcgggtgagacatcggtatccaggcacgataaatttccaagtggacacaatgtctggtgtcaactacagctgttctccttcttttcccagtatcctttgggtgcagtgagacaccaggagagctgctgctttgggggatggacaggggcagcaggaatgcctttgtgttttcgcagtgaacctccttggcctgggcgaagctgtgtggaccaagcaagtcaggagtgtggccatgttttctgagcaggctgcccagagggcccacactctactgtccccaccatcagccaacaatgccacctttgcccgggtgccagtggcaacctacaccaactcctcacaacccttccggctaggagagcgcagctttagccggcagtatgcccacatttatgccacccgcctcatccaaatgagacccttcctggagaaccgggcccagcagcactggggtaagtgagagtt

SEQ ID NO: 16955 - protein, 40 aa, Homo sapiens
MRRAARVRHRYPGTINFQVDTMSGVNYSCSPSFPSILWVQ

SEQ ID NO: 16956 - DNA, 1065 bp, Homo sapiens
gggaaacggggtcagctgggggtggcagttccaggccgcgaggccgggctcctgggtcggtgggctggtgtcttggcggacgtcccgcagctgccgcgtggatccgagccggggcacccgccgtgactgggacagcccccagggcgctctcggccccatcccgagtagcgcggcctggctgctgccgccatcaagcacgttcgagccaaaagctcctaacgagtcactcgttagacacgtgtgcggagcctgtgtcccaggccagtgctgtcccgtggagatagattgcaagccgctagggaattttttaactttctagtaggtgtacgaaaaaagtaaaacgaaacaaatcaattggagtaaatccataaatatattcaaactattatttcaattgtatgtgaaaaaattattgggatattctttgtactattcttagaaatccattgtgtgtccaacccaaacatcacagttggactcaccacatctcctgtacttcgtagccctaggtggctagtggcataagacacaaaaatctcagctctcctggagcttatggtctagttggagcaggcagacaatacatttaaaatatacagtttgttagaaggtgccggagagctggatggaggcagatcgggaattccatttggggcaaactgaacttgattgagaccctggtagttgtccagatggaacaggacacctgagtctagggttcgggaagaactccagatgggacaaacactcctagctttccttttctctttttggatgaccgctacaggtgaacctccttggcctgggcgaagctgtgtggaccaagcaagtcaggagtgtggccatgttttctgagcaggctgcccagagggcccacactctactgtccccaccatcagccaacaatgccacctttgcccgggtgccagtggcaacctacaccaactcctcacaacccttccggctaggagagcgcagctttagccggcagtatgcccacatttatgccacccgcctcatccaaatgagacccttcctggagaaccgggcccagcagcactgggg

SEQ ID NO: 16957 - protein, 39 aa, Homo sapiens
MGQTLLAFLFSFWMTATGEPPWPGRSCVDQASQECGHVF

SEQ ID NO: 16958 - DNA, 347 bp, Homo sapiens
agggactgggcgcacagtggtcggcgggatgaggcgcctggtgacggacggggcgaggaggttttcgcagtgaacctccttggcctgggcgaagctgtgtggaccaagcaagtcaggagtgtggccatgttttctgagcaggctgcccagagggcccacactctactgtccccaccatcagccaacaatgccacctttgcccgggtgccagtggcaacctacaccaactcctcacaacccttccggctaggagagcgcagctttagccggcagtatgcccacatttatgccacccgcctcatccaaatgagacccttcctggagaaccgggcccagcagcactgggg

SEQ ID NO: 16959 - protein, 72 aa, Homo sapiens
MFSEQAAQRAHTLLSPPSANNATFARVPVATYTNSSQPFRLGERSFSRQYAHIYATRLIQMRPFLENRAQQH

SEQ ID NO: 16960 - DNA, 341 bp, Homo sapiens
gtgagacatcggtatccaggcacgataaatttccaagtggacacaatgtctggtgtcaactacagctgttctccttcttttcccagtatcctgggcgaagctgtgtggaccaagcaagtcaggagtgtggccatgttttctgagcaggctgcccagagggcccacactctactgtccccaccatcagccaacaatgccacctttgcccgggtgccagtggcaacctacaccaactcctcacaacccttccggctaggagagcgcagctttagccggcagtatgcccacatttatgccacccgcctcatccaaatgagacccttcctggagaaccgggccca

SEQ ID NO: 16961 - protein, 97 aa, Homo sapiens
MSGVNYSCSPSFPSILGEAVWTKQVRSVAMFSEQAAQRAHTLLSPPSANNATFARVPVATYTNSSQPFRLGERSFSRQYAHIYATRLIQMRPFLENR

SEQ ID NO: 16962 - DNA, 793 bp, Homo sapiens
aagaaaggctagcggtctcccaggtgctggcctttgggctgggggagcagagttttctgtgcttgtgttgggttgagggtggtccccagggagaggaagaggatcctggccctggctctcctgggaatgctctgggactgtgcatgatgggtggggtggggagactctgaggagttggggagaggacccctccctactcacagtgttgcaggccagcaggaaggcggggacccggggcaaggtggcagccaccaagcaggcccaacgtggttcttccaacgtcttttccatgtttgaacaagcccagatacaggagttcaaagaagccttcagctgtatcgaccagaatcgtgatggcatcatctgcaaggcagacctgagggagacctactcccagctggggaaggtgagtgtcccagaggaggagctggacgccatgctgcaagagggcaagggccccatcaacttcaccgtcttcctcacgctctttggggagaagctcaatgggacagaccccgaggaagccatcctgagtgccttccgcatgtttgaccccagcggcaaaggggtggtgaacaaggatgagttcaagcagcttctcctgacccaggcagacaagttctctccagctgaggtggagcagatgttcgccctgacacccatggacctggcggggaacatcgactacaagtcactgtgctacatcatcacccatggagacgagaaagaggaatgaggggcagggccaggcccacgggggggcacctcaataaactctgttgcaaaattggaa

SEQ ID NO: 16963 - protein, 148 aa, Homo sapiens
MFEQAQIQEFKEAFSCIDQNRDGIICKADLRETYSQLGKVSVPEEELDAMLQEGKGPINFTVFLTLFGEKLNGTDPEEAILSAFRMFDPSGKGVVNKDEFKQLLLTQADKFSPAEVEQMFALTPMDLAGNIDYKSLCYIITHGDEKEE

SEQ ID NO: 16964 - DNA, 510 bp, Homo sapiens
cacctctgcagagagaatgcccagatacaggagttcaaagaagccttcagctgtatcgaccagaatcgtgatggcatcatctgcaaggcagacctgagggagacctactcccagctggggaaggtgagtgtcccagaggaggagctggacgccatgctgcaagagggcaagggccccatcaacttcaccgtcttcctcacgctctttggggagaagctcaatgggacagaccccgaggaagccatcctgagtgccttccgcatgtttgaccccagcggcaaaggggtggtgaacaaggatgagttcaagcagcttctcctgacccaggcagacaagttctctccagctgaggtggagcagatgttcgccctgacacccatggacctggcggggaacatcgactacaagtcactgtgctacatcatcacccatggagacgagaaagaggaatgaggggcagggccaggcccacgggggggcacctcaataaactctgttgcaaaattggaa

SEQ ID NO: 16965 - protein, 99 aa, Homo sapiens
MLQEGKGPINFTVFLTLFGEKLNGTDPEEAILSAFRMFDPSGKGVVNKDEFKQLLLTQADKFSPAEVEQMFALTPMDLAGNIDYKSLCYIITHGDEKEE

SEQ ID NO: 16966 - DNA, 604 bp, Homo sapiens
ccacacctctgcagagagaatggccagcaggaaggcggggacccggggcaaggtggcagccaccaagcaggcccaacgtggttcttccaacgtcttttccatgtttgaacaagcccagatacaggagttcaaagaagccttcagctgtatcgaccagaatcgtgatggcatcatctgcaaggcagacctgagggagacctactcccagctggggaaggtgagtgtcccagaggaggagctggacgccatgctgcaagagggcaagggccccatcaacttcaccgtcttcctcacgctctttggggagaagctcaatgggacagaccccgaggaagccatcctgagtgccttccgcatgtttgaccccagcggcaaaggggtggtgaacaaggatgagttcaagcagcttctcctgacccaggcagacaagttctctccagctgaggtggagcagatgttcgccctgacacccatggacctggcggggaacatcgactacaagtcactgtgctacatcatcacccatggagacgagaaagaggaatgaggggcagggccaggcccacgggggggcacctcaataaactctgttgcaaaattggaa

SEQ ID NO: 16967 - protein, 175 aa, Homo sapiens; identical to SEQ ID NO: 1988

SEQ ID NO: 16968 - DNA, 712 bp, Homo sapiens
agacataaaggaggctgggccctgccaccacgacagcagccacacctctgcagagagaatggccagcaggaaggcggggacccggggcaaggtggcagccaccaagcaggcccaacgtggttcttccaacgtcttttccatgtttgaacaagcccagatacaggagttcaaagaagtctctcccccacctcccaccttccctagagctgggggctgctcccacctgaaggcccccatcccacaggccttcagctgtatcgaccagaatcgtgatggcatcatctgcaaggcagacctgagggagacctactcccagctggggaaggtgagtgtcccagaggaggagctggacgccatgctgcaagagggcaagggccccatcaacttcaccgtcttcctcacgctctttggggagaagctcaatgggacagaccccgaggaagccatcctgagtgccttccgcatgtttgaccccagcggcaaaggggtggtgaacaaggatgagttcaagcagcttctcctgacccaggcagacaagttctctccagctgaggtggagcagatgttcgccctgacacccatggacctggcggggaacatcgactacaagtcactgtgctacatcatcacccatggagacgagaaagaggaatgaggggcagggccaggcccacgggggggcacctcaataaactctgttgcaaaattggaa

SEQ ID NO: 16969 - protein, 198 aa, Homo sapiens
MASRKAGTRGKVAATKQAQRGSSNVFSMFEQAQIQEFKEVSPPPPTFPRAGGCSHLKAPIPQAFSCIDQNRDGIICKADLRETYSQLGKVSVPEEELDAMLQEGKGPINFTVFLTLFGEKLNGTDPEEAILSAFRMFDPSGKGVVNKDEFKQLLLTQADKFSPAEVEQMFALTPMDLAGNIDYKSLCYIITHGDEKEE

SEQ ID NO: 16970 - DNA, 507 bp, Homo sapiens
gacagcagccacacctctgcagagagaatggtgagtgcctgctggggaagaaaggctagcggtctcccaggtgctggcctttgggctgggggagcagagttttctgtgcttgtgttgggttgagggtggtccccagggagaggaagaggatcctggccctggctctcctgggaatgctctgggactgtgcatgatgggtggggtggggagactctgaggagttggggagaggacccctccctactcacagtgttgcaggccagcaggaaggcggggacccggggcaaggtggcagccaccaagcaggcccaacgtggttcttccaacgtcttttccatgtttgaacaagcccagatacaggagttcaaagaagccttcagctgtatcgaccagaatcgtgatggcatcatctgcaaggcagacctgagggagacctactcccagctgggtgcgtgcacccacctcccaccctgcgcactggggtccctactctgagctgctgggcgg

SEQ ID NO: 16971 - protein, 52 aa, Homo sapiens
MFEQAQIQEFKEAFSCIDQNRDGIICKADLRETYSQLGACTHLPPCALGSLL

SEQ ID NO: 16972 - DNA, 1437 bp, Homo sapiens
gcctgcgtccgggcactggtccccatccgtgagtcccctcggtgctccctgcccgccgtggccatcctctcacatcactcacaaccccaaggcgcggcatggttgacacccccacgttaggacggagaccctgggcttagttagagggggcagtactaaccagtccctggcggaaacgctttggctgggtgagcgacacgggcgaccgcaagcagatctacaacatcctgagcacgctggggctgcgaccctcgaccaccgactgcgacatcgtgcgccgcgcctgcgagagcgtgtctacgcgcgctgcgcacatgtgctcggcggggctggcgggcgtcatcaaccgcatgcgcgagagccgcagcgaggacgtaatgcgcatcactgtgggcgtggatggctccgtgtacaagctgcaccccagcttcaaggagcggttccatgccagcgtgcgcaggctgacgcccagctgcgagatcaccttcatcgagtcggaggagggcagtggccggggcgcggccctggtctcggcggtggcctgtaagaaggcctgtatgctgggccagtgagagcagtggccgcaagcgcagggaggatgccacagccccacagcacccaggctccatggggaagtgctccccacacgtgctcgcagcctggcggggcaggaggcctggccttgtcaggacccaggccgcctgccataccgctggggaacagagcgggcctcttccctcagtttttcggtgggacagccccagggccctaacgggggtgcggcaggagcaggaacagagactctggaagccccccacctttctcgctggaatcaatttcccagaagggagttgctcactcaggactttgatgcatttccacactgtcagagctgttggcctcgcctgggcccaggctctgggaaggggtgccctctggatcctgctgtggcctcacttccctgggaactcatcctgtgtggggaggcagctccaacagcttgaccagacctagacctgggccaaaagggcagccaggggctgctcatcacccagtcctggccattttcttgcctgaggctcaagaggcccagggagcaatgggagggggctccatggaggaggtgtcccaagctttgaatacccccagagaccttttctctcccataccatcactgagtggcttgtgattctgggatggaccctcgcagcaggtgcaagagacagagcccccaagcctctgccccaaggggcccacaaaggggagaagggccagccctacatcttcagctcccatagcgctggctcaggaagaaaccccaagcagcattcagcacaccccaagggacaaccccatcatatgacatgccaccctctccatgcccaacctaagattgtgtgggttttttaattaaaaatgttaaaagttttaaacatg

SEQ ID NO: 16973 - protein, 85 aa, Homo sapiens
MCSAGLAGVINRMRESRSEDVMRITVGVDGSVYKLHPSFKERFHASVRRLTPSCEITFIESEEGSGRGAALVSAVACKKACMLGQ

SEQ ID NO: 16974 - DNA, 1653 bp, Homo sapiens
ggtccggacggggatgccaagagcagggatgggagcgagcctgcgtccgggcactggtccccatccgtgagtcccctcggtgctccctgcccgccgtggccatcctctcacatcactcacaaccccaaggcgcggcatggttgacacccccacgttaggacggagaccctgggcttagttagagggggcagtactaaccagtccctggcggaaacgctttggctgggtgaggtgagcgggatcgcccccatttctccagagaggggtcccggctcagcgagggaaagaggccgccgctggggggacggctggccggggcccctccctggagaacgagaggccgccgctggagggggatggactgtcggagcgacactcagcgaccgccctacctcctcccgccccgcagcgacacgggcgaccgcaagcagatctacaacatcctgagcacgctggggctgcgaccctcgaccaccgactgcgacatcgtgcgccgcgcctgcgagagcgtgtctacgcgcgctgcgcacatgtgctcggcggggctggcgggcgtcatcaaccgcatgcgcgagagccgcagcgaggacgtaatgcgcatcactgtgggcgtggatggctccgtgtacaagctgcaccccagcttcaaggagcggttccatgccagcgtgcgcaggctgacgcccagctgcgagatcaccttcatcgagtcggaggagggcagtggccggggcgcggccctggtctcggcggtggcctgtaagaaggcctgtatgctgggccagtgagagcagtggccgcaagcgcagggaggatgccacagccccacagcacccaggctccatggggaagtgctccccacacgtgctcgcagcctggcggggcaggaggcctggccttgtcaggacccaggccgcctgccataccgctggggaacagagcgggcctcttccctcagtttttcggtgggacagccccagggccctaacgggggtgcggcaggagcaggaacagagactctggaagccccccacctttctcgctggaatcaatttcccagaagggagttgctcactcaggactttgatgcatttccacactgtcagagctgttggcctcgcctgggcccaggctctgggaaggggtgccctctggatcctgctgtggcctcacttccctgggaactcatcctgtgtggggaggcagctccaacagcttgaccagacctagacctgggccaaaagggcagccaggggctgctcatcacccagtcctggccattttcttgcctgaggctcaagaggcccagggagcaatgggagggggctccatggaggaggtgtcccaagctttgaatacccccagagaccttttctctcccataccatcactgagtggcttgtgattctgggatggaccctcgcagcaggtgcaagagacagagcccccaagcctctgccccaaggggcccacaaaggggagaagggccagccctacatcttcagctcccatagcgctggctcaggaagaaaccccaagcagcattcagcacaccccaagggacaaccccatcatatgacatgccaccctctccatgcccaacctaagattgtgtgggttttttaattaaaaatgttaaaagttttaaacatg

SEQ ID NO: 16975 - protein, 143 aa, Homo sapiens [sequence omitted]

SEQ ID NO: 16976 - DNA, 1315 bp, Homo sapiens
ggcggggtccggacggggatgccaagagcagggatgggagcgagcctgcgtccgggcactggtccccatcccgacacgggcgaccgcaagcagatctacaacatcctgagcacgctggggctgcgaccctcgaccaccgactgcgacatcgtgcgccgcgcctgcgagagcgtgtctacgcgcgctgcgcacatgtgctcggcggggctggcgggcgtcatcaaccgcatgcgcgagagccgcagcgaggacgtaatgcgcatcactgtgggcgtggatggctccgtgtacaagctgcaccccagcttcaaggagcggttccatgccagcgtgcgcaggctgacgcccagctgcgagatcaccttcatcgagtcggaggagggcagtggccggggcgcggccctggtctcggcggtggcctgtaagaaggcctgtatgctgggccagtgagagcagtggccgcaagcgcagggaggatgccacagccccacagcacccaggctccatggggaagtgctccccacacgtgctcgcagcctggcggggcaggaggcctggccttgtcaggacccaggccgcctgccataccgctggggaacagagcgggcctcttccctcagtttttcggtgggacagccccagggccctaacgggggtgcggcaggagcaggaacagagactctggaagccccccacctttctcgctggaatcaatttcccagaagggagttgctcactcaggactttgatgcatttccacactgtcagagctgttggcctcgcctgggcccaggctctgggaaggggtgccctctggatcctgctgtggcctcacttccctgggaactcatcctgtgtggggaggcagctccaacagcttgaccagacctagacctgggccaaaagggcagccaggggctgctcatcacccagtcctggccattttcttgcctgaggctcaagaggcccagggagcaatgggagggggctccatggaggaggtgtcccaagctttgaatacccccagagaccttttctctcccataccatcactgagtggcttgtgattctgggatggaccctcgcagcaggtgcaagagacagagcccccaagcctctgccccaaggggcccacaaaggggagaagggccagccctacatcttcagctcccatagcgctggctcaggaagaaaccccaagcagcattcagcacaccccaagggacaaccccatcatatgacatgccaccctctccatgcccaacctaagattgtgtgggttttttaattaaaaatgttaaaagttttaaacatg

SEQ ID NO: 16977 - protein, 143 aa, Homo sapiens
MPRAGMGASLRPGTGPHPDTGDRKQIYNILSTLGLRPSTTDCDIVRRACESVSTRAAHMCSAGLAGVINRMRESRSEDVMRITVGVDGSVYKLHPSFKERFHASVRRLTPSCEITFIESEEGSGRGAALVSAVACKKACMLGQ

SEQ ID NO: 16978 - DNA, 2434 bp, Homo sapiens
cctttcagtgcagaagccctgggctgccagcctcaggcagctctccatccaagcagccgttgctgccacaggcgggccttacgctccaaggctacagcatgtgctaggcctcagcaggcaggagcatctctgcctcccaaagcatctacctcttagcccctcggagagatggcgatggatgtcacaaggagccaggcccagacagccttgactctggtagagcagatcctggcagagttccagctgcaggaggaggacctgaagaaggtgatgagacggatgcagaaggagatggaccgcggcctgaggctggagacccatgaagaggccagtgtgaagatgctgcccacctacgtgcgctccaccccagaaggctcagaagtcggggacttcctctccctggacctgggtggcactaacttcagggtgatgctggtgaaggtgggagaaggtgaggaggggcagtggagcgtgaagaccaaacaccagatgtactccatccccgaggacgccatgaccggcactgctgagatgctcttcgactacatctctgagtgcatctccgacttcctggacaagcatcagatgaaacacaagaagctgcccctgggcttcaccttctcctttcctgtgaggcacgaagacatcgataagggcatccttctcaactggaccaagggcttcaaggcctcaggagcagaagggaacaatgtcgtggggcttctgcgagacgctatcaaacggagaggggactttgaaatggatgtggtggcaatggtgaatgacacggtggccacgatgatctcctgctactacgaagaccatcagtgcgaggtcggcatgatcgtgggcacgggctgcaatgcctgctacatggaggagatgcagaatgtggagctggtggagggggacgagggccgcatgtgcgtcaataccgagtggggcgccttcggggactccggcgagctggacgagttcctgctggagtatgaccgcctggtggacgagagctctgcaaaccccggtcagcagctgtatgagaagctcataggtggcaagtacatgggcgagctggtgcggcttgtgctgctcaggctcgtggacgaaaacctgctcttccacggggaggcctccgagcagctgcgcacacgcggagccttcgagacgcgcttcgtgtcgcaggtggagagcgacacgggcgaccgcaagcagatctacaacatcctgagcacgctggggctgcgaccctcgaccaccgactgcgacatcgtgcgccgcgcctgcgagagcgtgtctacgcgcgctgcgcacatgtgctcggcggggctggcgggcgtcatcaaccgcatgcgcgagagccgcagcgaggacgtaatgcgcatcactgtgggcgtggatggctccgtgtacaagctgcaccccagcttcaaggagcggttccatgccagcgtgcgcaggctgacgcccagctgcgagatcaccttcatcgagtcggaggagggcagtggccggggcgcggccctggtctcggcggtggcctgtaagaaggcctgtatgctgggccagtgagagcagtggccgcaagcgcagggaggatgccacagccccacagcacccaggctccatggggaagtgctccccacacgtgctcgcagcctggcggggcaggaggcctggccttgtcaggacccaggccgcctgccataccgctggggaacagagcgggcctcttccctcagtttttcggtgggacagccccagggccctaacgggggtgcggcaggagcaggaacagagactctggaagccccccacctttctcgctggaatcaatttcccagaagggagttgctcactcaggactttgatgcatttccacactgtcagagctgttggcctcgcctgggcccaggctctgggaaggggtgccctctggatcctgctgtggcctcacttccctgggaactcatcctgtgtggggaggcagctccaacagcttgaccagacctagacctgggccaaaagggcagccaggggctgctcatcacccagtcctggccattttcttgcctgaggctcaagaggcccagggagcaatgggagggggctccatggaggaggtgtcccaagctttgaatacccccagagaccttttctctcccataccatcactgagtggcttgtgattctgggatggaccctcgcagcaggtgcaagagacagagcccccaagcctctgccccaaggggcccacaaaggggagaagggccagccctacatcttcagctcccatagcgctggctcaggaagaaaccccaagcagcattcagcacaccccaagggacaaccccatcatatgacatgccaccctctccatgcccaacctaagattgtgtgggttttttaattaaaaatgttaaaagttttaaacatg

SEQ ID NO: 16979 - protein, 466 aa, Homo sapiens; identical to SEQ ID NO: 1992

SEQ ID NO: 16980 - DNA, 2558 bp, Homo sapiens
cctttcagtgcagaagccctgggctgccagcctcaggcagctctccatccaagcagccgttgctgccacaggcgggccttacgctccaaggctacagcatgtgctaggcctcagcaggcaggagcatctctgcctcccaaagcatctacctcttagcccctcggagagatggcgatggatgtcacaaggagccaggcccagacagccttgactctgccagactctcctctgaactcgggcctcacatggccaactgctacttggaacaaatcgccccttggctggcagatgtgttaacatgcccagaccaagatcccaactcccacaacccaactcccaggtagagcagatcctggcagagttccagctgcaggaggaggacctgaagaaggtgatgagacggatgcagaaggagatggaccgcggcctgaggctggagacccatgaagaggccagtgtgaagatgctgcccacctacgtgcgctccaccccagaaggctcagaagtcggggacttcctctccctggacctgggtggcactaacttcagggtgatgctggtgaaggtgggagaaggtgaggaggggcagtggagcgtgaagaccaaacaccagatgtactccatccccgaggacgccatgaccggcactgctgagatgctcttcgactacatctctgagtgcatctccgacttcctggacaagcatcagatgaaacacaagaagctgcccctgggcttcaccttctcctttcctgtgaggcacgaagacatcgataagggcatccttctcaactggaccaagggcttcaaggcctcaggagcagaagggaacaatgtcgtggggcttctgcgagacgctatcaaacggagaggggactttgaaatggatgtggtggcaatggtgaatgacacggtggccacgatgatctcctgctactacgaagaccatcagtgcgaggtcggcatgatcgtgggcacgggctgcaatgcctgctacatggaggagatgcagaatgtggagctggtggagggggacgagggccgcatgtgcgtcaataccgagtggggcgccttcggggactccggcgagctggacgagttcctgctggagtatgaccgcctggtggacgagagctctgcaaaccccggtcagcagctgtatgagaagctcataggtggcaagtacatgggcgagctggtgcggcttgtgctgctcaggctcgtggacgaaaacctgctcttccacggggaggcctccgagcagctgcgcacacgcggagccttcgagacgcgcttcgtgtcgcaggtggagagcgacacgggcgaccgcaagcagatctacaacatcctgagcacgctggggctgcgaccctcgaccaccgactgcgacatcgtgcgccgcgcctgcgagagcgtgtctacgcgcgctgcgcacatgtgctcggcggggctggcgggcgtcatcaaccgcatgcgcgagagccgcagcgaggacgtaatgcgcatcactgtgggcgtggatggctccgtgtacaagctgcaccccagcttcaaggagcggttccatgccagcgtgcgcaggctgacgcccagctgcgagatcaccttcatcgagtcggaggagggcagtggccggggcgcggccctggtctcggcggtggcctgtaagaaggcctgtatgctgggccagtgagagcagtggccgcaagcgcagggaggatgccacagccccacagcacccaggctccatggggaagtgctccccacacgtgctcgcagcctggcggggcaggaggcctggccttgtcaggacccaggccgcctgccataccgctggggaacagagcgggcctcttccctcagtttttcggtgggacagccccagggccctaacgggggtgcggcaggagcaggaacagagactctggaagccccccacctttctcgctggaatcaatttcccagaagggagttgctcactcaggactttgatgcatttccacactgtcagagctgttggcctcgcctgggcccaggctctgggaaggggtgccctctggatcctgctgtggcctcacttccctgggaactcatcctgtgtggggaggcagctccaacagcttgaccagacctagacctgggccaaaagggcagccaggggctgctcatcacccagtcctggccattttcttgcctgaggctcaagaggcccagggagcaatgggagggggctccatggaggaggtgtcccaagctttgaatacccccagagaccttttctctcccataccatcactgagtggcttgtgattctgggatggaccctcgcagcaggtgcaagagacagagcccccaagcctctgccccaaggggcccacaaaggggagaagggccagccctacatcttcagctcccatagcgctggctcaggaagaaaccccaagcagcattcagcacaccccaagggacaaccccatcatatgacatgccaccctctccatgcccaacctaagattgtgtgggttttttaattaaaaatgttaaaagttttaaacatg

SEQ ID NO: 16981 - protein, 464 aa, Homo sapiens; identical to SEQ ID NO: 1994

SEQ ID NO: 16982 - DNA, 2749 bp, Homo sapiens
actccacacctggctggagcaggaaatgccgagcggcgcctgagccccagggaagcaggctaggatgtgagagacacagtcacctgcagcctaattactcaaaagctgtccccaggtcacagaagggagaggacatttcccactgaatctgtctgaaggacactaagccccacagctcaacacaaccaggagagaaagcgctgaggacgccacccaagcgcccagcaatggccctgcctggagaacatccaggctcagtgaggaagggtccagaagggaatgcttgccgactcgttggagaacaatgaaaaggaggaaactgtgactgaacctcaaaccccaaaccagcccgaggagaaccacattctcccagggacccagggcgggccgtgacccctgcggcggagaagccttggatatttccacttcagaagcctactggggaaggctgaggggtcccagctccccacgctggctgctgtgcagatgctggacgacagagccaggatggaggccgccaagaaggagaaggtagagcagatcctggcagagttccagctgcaggaggaggacctgaagaaggtgatgagacggatgcagaaggagatggaccgcggcctgaggctggagacccatgaagaggccagtgtgaagatgctgcccacctacgtgcgctccaccccagaaggctcagaagtcggggacttcctctccctggacctgggtggcactaacttcagggtgatgctggtgaaggtgggagaaggtgaggaggggcagtggagcgtgaagaccaaacaccagatgtactccatccccgaggacgccatgaccggcactgctgagatgctcttcgactacatctctgagtgcatctccgacttcctggacaagcatcagatgaaacacaagaagctgcccctgggcttcaccttctcctttcctgtgaggcacgaagacatcgataagggcatccttctcaactggaccaagggcttcaaggcctcaggagcagaagggaacaatgtcgtggggcttctgcgagacgctatcaaacggagaggggactttgaaatggatgtggtggcaatggtgaatgacacggtggccacgatgatctcctgctactacgaagaccatcagtgcgaggtcggcatgatcgtgggcacgggctgcaatgcctgctacatggaggagatgcagaatgtggagctggtggagggggacgagggccgcatgtgcgtcaataccgagtggggcgccttcggggactccggcgagctggacgagttcctgctggagtatgaccgcctggtggacgagagctctgcaaaccccggtcagcagctgtatgagaagctcataggtggcaagtacatgggcgagctggtgcggcttgtgctgctcaggctcgtggacgaaaacctgctcttccacggggaggcctccgagcagctgcgcacacgcggagccttcgagacgcgcttcgtgtcgcaggtggagagcgacacgggcgaccgcaagcagatctacaacatcctgagcacgctggggctgcgaccctcgaccaccgactgcgacatcgtgcgccgcgcctgcgagagcgtgtctacgcgcgctgcgcacatgtgctcggcggggctggcgggcgtcatcaaccgcatgcgcgagagccgcagcgaggacgtaatgcgcatcactgtgggcgtggatggctccgtgtacaagctgcaccccagcttcaaggagcggttccatgccagcgtgcgcaggctgacgcccagctgcgagatcaccttcatcgagtcggaggagggcagtggccggggcgcggccctggtctcggcggtggcctgtaagaaggcctgtatgctgggccagtgagagcagtggccgcaagcgcagggaggatgccacagccccacagcacccaggctccatggggaagtgctccccacacgtgctcgcagcctggcggggcaggaggcctggccttgtcaggacccaggccgcctgccataccgctggggaacagagcgggcctcttccctcagtttttcggtgggacagccccagggccctaacgggggtgcggcaggagcaggaacagagactctggaagccccccacctttctcgctggaatcaatttcccagaagggagttgctcactcaggactttgatgcatttccacactgtcagagctgttggcctcgcctgggcccaggctctgggaaggggtgccctctggatcctgctgtggcctcacttccctgggaactcatcctgtgtggggaggcagctccaacagcttgaccagacctagacctgggccaaaagggcagccaggggctgctcatcacccagtcctggccattttcttgcctgaggctcaagaggcccagggagcaatgggagggggctccatggaggaggtgtcccaagctttgaatacccccagagaccttttctctcccataccatcactgagtggcttgtgattctgggatggaccctcgcagcaggtgcaagagacagagcccccaagcctctgccccaaggggcccacaaaggggagaagggccagccctacatcttcagctcccatagcgctggctcaggaagaaaccccaagcagcattcagcacaccccaagggacaaccccatcatatgacatgccaccctctccatgcccaacctaagattgtgtgggttttttaattaaaaatgttaaaagttttaaacatg

SEQ ID NO: 16983 - protein, 465 aa, Homo sapiens [sequence omitted]

SEQ ID NO: 16984 - DNA, 930 bp, Homo sapiens
atccggaagtggattgcgagccaggaggaggaagccggcggtggccccgtcagcagccggctgctgagaggccggtaggcggcggcggtcccgaggggcggcggccgcgctgctccctgagaacgggtcccgcagctgggcaggcgggcggcctgagggcgcggagccatgaagctgtacagcctcagcgtcctctacaaaggcgaggccaaggtggtgctgctcaaagccgcatacgatgtgtcttccttcagctttttccagagatccagcgttcaggaattcatgaccttcacgagtcaactgattgtggagcgctcatcgaaaggcactagagcttctgtcaaagaacaagactatctgtgccacgtctacgtccggaatgatagtcttgcaggtgtggtcattgctgacaatgaatacccatcccgggtggcctttaccttgctggagaaggtactagatgaattctccaagcaagtcgacaggatagactggccagtaggatcccctgctacaatccattacccagccctggatggtcacctcagtagataccagaacccacgagaagctgatcccatgactaaagtgcaggccgaactagatgagaccaaaatcattctggcccggaaacaaaactcatgctgtgccatcatgtgatgcagcctgccagaggcccaatgctggaatggcaccatcattcacatcagaactgcagcccctggaaaagaagagacagccatagacgaggagccagagtgggggcagactggccatttttattttgaagttcctgcgagaaatggatggtggaagggtggcgaatgttcaaattcatatgtgtggtagtgattcttggaaagaatttgaggtccccaaaggtgtatttttgggcaaatgaaaccataaactccgactggcttctgt

SEQ ID NO: 16985 - protein, 164 aa, Homo sapiens
MKLYSLSVLYKGEAKVVLLKAAYDVSSFSFFQRSSVQEFMTFTSQLIVERSSKGTRASVKEQDYLCHVYVRNDSLAGVVIADNEYPSRVAFTLLEKVLDEFSKQVDRIDWPVGSPATIHYPALDGHLSRYQNPREADPMTKVQAELDETKIILARKQNSCCAIM

SEQ ID NO: 16986 - DNA, 2677 bp, Homo sapiens
atccggaagtggattgcgagccaggaggaggaagccggcggtggccccgtcagcagccggctgctgagaggccggtaggcggcggcggtcccgaggggcggcggccgcgctgctccctgagaacgggtcccgcagctgggcaggcgggcggcctgagggcgcggagccatgaagctgtacagcctcagcgtcctctacaaaggcgaggccaaggtggtgctgctcaaagccgcatacgatgtgtcttccttcagctttttccagagatccagcgttcaggaattcatgaccttcacgagtcaactgattgtggagcgctcatcgaaaggcactagagcttctgtcaaagaacaagactatctgtgccacgtctacgtccggaatgatagtcttgcaggtgtggtcattgctgacaatgaatacccatcccgggtggcctttaccttgctggagaaggtactagatgaattctccaagcaagtcgacaggatagactggccagtaggatcccctgctacaatccattacccagccctggatggtcacctcagtagataccagaacccacgagaagctgatcccatgactaaagtgcaggccgaactagatgagaccaaaatcattctggcccggaaacaaaactcatgctgtgccatcatgtgatgcagcctgccagaggcccaatgctggaatggcaccatcattcacatcagaactgcagcccctggaaaagaagagacagccatagacgaggagccagagtgggggcagactggccatttttattttgaagttcctgcgagaaatggatggtggaagggtggcgaatgttcaaattcatatgtgtggtagtgattcttggaaagaatttgaggtccccaaaggtgtatttttgggcaaatgaaaccataaactccgactggcttctgtagatgccaaagggctctttttcagctaaccctgggaaggctctgtgggagggaggtcggagccagctgtttctcgatctttggtatatctttggatcttatttgtacattaatgatattaacactccagtggggggtggggagtccctgatgctagggctggggtgggtggagtttgaagactcttgggaaagcctctcctggggccactgttgggggtgggagtgagcccaccacagaggccacaggcaggcccccacttcaggcccaaggcctggggcggggggaacagtcactgggtctcagattctgagactgttgtttagcttacctttctgctaggattggcttcccgcagagggcagggcccatcctaagcagcttccaagtcccacaaaggtggcttgtgggaggatttggaaggagctgcattgtgggcggggagtgtgtgggttgggttcgtaccagcaagtagactaggaactgagcccaggaaagggggatgttttcctggtgtttggatggtcagctgggagtgtccatcatcaggggaagatcaaacacaggtgcactcagctgcccagggcctctgggacacttgccttgacttgcaacttgccttgaacatcacgatcaaagcagcaggtgctgtggtctctcaaaattgatttttatttgactctgtggctctaagactgccttgaaccgcctgaggcctatgcatctgaacaagtgggtctctcccttgagcaccaggagtgggtgccagccggccccgaggattcccagcaccccacctatggtcttgccagcataggcttgctagttccttcttggtcagaggtagctgcagaggggggaggccaagggtttggtctaagctgtgccctgccacctggcaggaggcccactcactgcccaagtcatggcaacaggctggagcagcccaggagatgggcctaaaatgttctggatcccttgggtcctagtgttatgttccagtctgcccacctgtgctcaggatgcagccctgggatccagcacccatggaagcttctgctgggatggtgtcacctatgggttttgaaccagtgtggtatggtccttgggagctctgctctgagcttgccacactgctgagagcacccactgtcctgaccagagtctcagtggtcctgacccccaatgtgggcaggggctgggcaggagggtggggtctgctgtgggttcagaggactccacctcctggctggtttacctgctgctgcccattttctctgggtactgctggccagaggactttagcctacccctgaagagcctgtccatgtcattttcctactgccatagataccctaagcccagggccccttgaggcccagactcagcctgcccactggtgccggagacggagtggagtgggcctggatccgagggatgctacctctccctttcccacttgaggaccctggggagagatgggggcggggaaaatggaggtatgaatttggggtaagaggaagtgagatctccgcttgcaggtcagcccctgccttgcagggcgggctggcttgactcaggccctgtgagatagagggcccagcccagccccacccacagatcccctgctcctgttgtgttctgttgtaaatcatttggcgagactgtattttagtaactgctgcctaacttccctgtgttctatttgagaggcgcctgtctggataaagttgtcttgaaatttcaca

SEQ ID NO: 16987 - protein, 164 aa, Homo sapiens; identical to SEQ ID NO: 16985

SEQ ID NO: 16988 - DNA, 1072 bp, Homo sapiens
gattgcgagccaggaggaggaagccggcggtggccccgtcagcagccggctgctgagaggccggtaggcggcggcggtcccgaggggcggcggccgcgctgctccctgagaacgggtcccgcagctgggcaggcgggcggcctgagggcgcggagccatgaagctgtacagcctcagcgtcctctacaaaggcgaggccaaggtggtgctgctcaaagccgcatacgatgtgtcttccttcagctttttccagagatccagcgttcaggaattcatgaccttcacgagtcaactgattgtggagcgctcatcgaaaggcactagagcttctgtcaaagaacaagactatctgtgccacgtctacgtccggaatgatagtcttgcaggtgtggtcattgctgacaatgaatacccatcccgggtggcctttaccttgctggagaaggtactagatgaattctccaagcaagtcgacaggatagactggccagtaggatcccctgctacaatccattacccagccctggatggtcacctcagtagataccagaacccacgagaagctgatcccatgactaaagtgcaggccgaactagatgagaccaaaatcattctgcacaacaccatggagtctctgttagagcgaggtgagaagctagatgacttggtgtccaaatccgaggtgctgggaacacagtctaaagccttctataaaactaaaatatttaattgacaaggatgggtgctgctgactgccgctttctctcaggcccggaaacaaaactcatgctgtgccatcatgtgatgcagcctgccagaggcccaatgctggaatggcaccatcattcacatcagaactgcagcccctggaaaagaagagacagccatagacgaggagccagagtgggggcagactggccatttttattttgaagttcctgcgagaaatggatggtggaagggtggcgaatgttcaaattcatatgtgtggtagtgattcttggaaagaatttgaggtccccaaaggtgtatttttgggcaaatgaaaccataaactccgactggcttctgt

SEQ ID NO: 16989 - protein, 191 aa, Homo sapiens
MKLYSLSVLYKGEAKVVLLKAAYDVSSFSFFQRSSVQEFMTFTSQLIVERSSKGTRASVKEQDYLCHVYVRNDSLAGVVIADNEYPSRVAFTLLEKVLDEFSKQVDRIDWPVGSPATIHYPALDGHLSRYQNPREADPMTKVQAELDETKIILHNTMESLLERGEKLDDLVSKSEVLGTQSKAFYKTKIFN

SEQ ID NO: 16990 - DNA, 1021 bp, Homo sapiens
gattgcgagccaggaggaggaagccggcggtggccccgtcagcagccggctgctgagaggccggtaggcggcggcggtcccgaggggcggcggccgcgctgctccctgagaacgggtcccgcagctgggcaggcgggcggcctgagggcgcggagccatgaagctgtacagcctcagcgtcctctacaaaggcgaggccaaggtggtgctgctcaaagccgcatacgatgtgtcttccttcagctttttccagagatccagcgttcaggaattcatgaccttcacgagtcaactgattgtggagcgctcatcgaaaggcactagagcttctgtcaaagaacaagactatctgtgccacgtctacgtccggaatgatagtcttgcaggtgtggtcattgctgacaatgaatacccatcccgggtggcctttaccttgctggagaaggtactagatgaattctccaagcaagtcgacaggatagactggccagtaggatcccctgctacaatccattacccagccctggatggtcacctcagtagataccagaacccacgagaagctgatcccatgactaaagtgcaggccgaactagatgagaccaaaatcattctgcacaacaccatggagtctctgttagagcgaggtgagaagctagatgacttggtgtccaaatccgaggtgctgggaacacagtctaaagccttctataaaactgcccggaaacaaaactcatgctgtgccatcatgtgatgcagcctgccagaggcccaatgctggaatggcaccatcattcacatcagaactgcagcccctggaaaagaagagacagccatagacgaggagccagagtgggggcagactggccatttttattttgaagttcctgcgagaaatggatggtggaagggtggcgaatgttcaaattcatatgtgtggtagtgattcttggaaagaatttgaggtccccaaaggtgtatttttgggcaaatgaaaccataaactccgactggcttctgt

SEQ ID NO: 16991 - protein, 198 aa, Homo sapiens; identical to SEQ ID NO: 1996

SEQ ID NO: 16992 - DNA, 566 bp, Homo sapiens
gattgcgagccaggaggaggaagccggcggtggccccgtcagcagccggctgctgagaggccggtaggcggcggcggtcccgaggggcggcggccgcgctgctccctgagaacgggtcccgcagctgggcaggcgggcggcctgagggcgcggagccatgaagctgtacagcctcagcgtcctctacaaaggcgaggccaaggtggtgctgctcaaagccgcatacgatgtgtcttccttcagctttttccagagatccagcgttcaggaattcatgaccttcacgagtcaactgattgtggagcgctcatcgaaaggcactagagcttctgtcaaagaacaagactatctgtgccacgtctacgtccggaatgatagtcttgcaggtgtggtcattgctgacaatgaatacccatcccgggtggcctttaccttgctggagaaggtactagatgaattctccaagcaagtcgacaggatagactggccagtaggatcccctgctcctgttgtgttctgttgtaaatcatttggcgagactgtattttagtaactgctgcctaact

SEQ ID NO: 16993 - protein, 130 aa, Homo sapiens
MKLYSLSVLYKGEAKVVLLKAAYDVSSFSFFQRSSVQEFMTFTSQLIVERSSKGTRASVKEQDYLCHVYVRNDSLAGVVIADNEYPSRVAFTLLEKVLDEFSKQVDRIDWPVGSPAPVVFCCKSFGETVF

SEQ ID NO: 16994 - DNA, 2819 bp, Homo sapiens
gattgcgagccaggaggaggaagccggcggtggccccgtcagcagccggctgctgagaggccggtaggcggcggcggtcccgaggggcggcggccgcgctgctccctgagaacgggtcccgcagctgggcaggcgggcggcctgagggcgcggagccatgaagctgtacagcctcagcgtcctctacaaaggcgaggccaaggtggtgctgctcaaagccgcatacgatgtgtcttccttcagctttttccagagatccagcgttcaggaattcatgaccttcacgagtcaactgattgtggagcgctcatcgaaaggcactagagcttctgtcaaagaacaagactatctgtgccacgtctacgtccggaatgatagtcttgcaggtgtggtcattgctgacaatgaatacccatcccgggtggcctttaccttgctggagaaggtactagatgaattctccaagcaagtcgacaggatagactggccagtaggatcccctgctacaatccattacccagccctggatggtcacctcagtagataccagaacccacgagaagctgatcccatgactaaagtgcaggccgaactagatgagaccaaaatcattctgcacaacaccatggagtctctgttagagcgaggtgagaagctagatgacttggtgtccaaatccgaggtgctgggaacacagtctaaagccttctataaaactaaaatatttaattgacaaggatgggtgctgctgactgccgctttctctcaggcccggaaacaaaactcatgctgtgccatcatgtgatgcagcctgccagaggcccaatgctggaatggcaccatcattcacatcagaactgcagcccctggaaaagaagagacagccatagacgaggagccagagtgggggcagactggccatttttattttgaagttcctgcgagaaatggatggtggaagggtggcgaatgttcaaattcatatgtgtggtagtgattcttggaaagaatttgaggtccccaaaggtgtatttttgggcaaatgaaaccataaactccgactggcttctgtagatgccaaagggctctttttcagctaaccctgggaaggctctgtgggagggaggtcggagccagctgtttctcgatctttggtatatctttggatcttatttgtacattaatgatattaacactccagtggggggtggggagtccctgatgctagggctggggtgggtggagtttgaagactcttgggaaagcctctcctggggccactgttgggggtgggagtgagcccaccacagaggccacaggcaggcccccacttcaggcccaaggcctggggcggggggaacagtcactgggtctcagattctgagactgttgtttagcttacctttctgctaggattggcttcccgcagagggcagggcccatcctaagcagcttccaagtcccacaaaggtggcttgtgggaggatttggaaggagctgcattgtgggcggggagtgtgtgggttgggttcgtaccagcaagtagactaggaactgagcccaggaaagggggatgttttcctggtgtttggatggtcagctgggagtgtccatcatcaggggaagatcaaacacaggtgcactcagctgcccagggcctctgggacacttgccttgacttgcaacttgccttgaacatcacgatcaaagcagcaggtgctgtggtctctcaaaattgatttttatttgactctgtggctctaagactgccttgaaccgcctgaggcctatgcatctgaacaagtgggtctctcccttgagcaccaggagtgggtgccagccggccccgaggattcccagcaccccacctatggtcttgccagcataggcttgctagttccttcttggtcagaggtagctgcagaggggggaggccaagggtttggtctaagctgtgccctgccacctggcaggaggcccactcactgcccaagtcatggcaacaggctggagcagcccaggagatgggcctaaaatgttctggatcccttgggtcctagtgttatgttccagtctgcccacctgtgctcaggatgcagccctgggatccagcacccatggaagcttctgctgggatggtgtcacctatgggttttgaaccagtgtggtatggtccttgggagctctgctctgagcttgccacactgctgagagcacccactgtcctgaccagagtctcagtggtcctgacccccaatgtgggcaggggctgggcaggagggtggggtctgctgtgggttcagaggactccacctcctggctggtttacctgctgctgcccattttctctgggtactgctggccagaggactttagcctacccctgaagagcctgtccatgtcattttcctactgccatagataccctaagcccagggccccttgaggcccagactcagcctgcccactggtgccggagacggagtggagtgggcctggatccgagggatgctacctctccctttcccacttgaggaccctggggagagatgggggcggggaaaatggaggtatgaatttggggtaagaggaagtgagatctccgcttgcaggtcagcccctgccttgcagggcgggctggcttgactcaggccctgtgagatagagggcccagcccagccccacccacagatcccctgctcctgttgtgttctgttgtaaatcatttggcgagactgtattttagtaactgctgcctaacttccctgtgttctatttgagaggcgcctgtctggataaagttgtcttgaaatttcaca

SEQ ID NO: 16995 - protein, 191 aa, Homo sapiens; identical to SEQ ID NO: 16989

SEQ ID NO: 16996 - DNA, 2768 bp, Homo sapiens
gattgcgagccaggaggaggaagccggcggtggccccgtcagcagccggctgctgagaggccggtaggcggcggcggtcccgaggggcggcggccgcgctgctccctgagaacgggtcccgcagctgggcaggcgggcggcctgagggcgcggagccatgaagctgtacagcctcagcgtcctctacaaaggcgaggccaaggtggtgctgctcaaagccgcatacgatgtgtcttccttcagctttttccagagatccagcgttcaggaattcatgaccttcacgagtcaactgattgtggagcgctcatcgaaaggcactagagcttctgtcaaagaacaagactatctgtgccacgtctacgtccggaatgatagtcttgcaggtgtggtcattgctgacaatgaatacccatcccgggtggcctttaccttgctggagaaggtactagatgaattctccaagcaagtcgacaggatagactggccagtaggatcccctgctacaatccattacccagccctggatggtcacctcagtagataccagaacccacgagaagctgatcccatgactaaagtgcaggccgaactagatgagaccaaaatcattctgcacaacaccatggagtctctgttagagcgaggtgagaagctagatgacttggtgtccaaatccgaggtgctgggaacacagtctaaagccttctataaaactgcccggaaacaaaactcatgctgtgccatcatgtgatgcagcctgccagaggcccaatgctggaatggcaccatcattcacatcagaactgcagcccctggaaaagaagagacagccatagacgaggagccagagtgggggcagactggccatttttattttgaagttcctgcgagaaatggatggtggaagggtggcgaatgttcaaattcatatgtgtggtagtgattcttggaaagaatttgaggtccccaaaggtgtatttttgggcaaatgaaaccataaactccgactggcttctgtagatgccaaagggctctttttcagctaaccctgggaaggctctgtgggagggaggtcggagccagctgtttctcgatctttggtatatctttggatcttatttgtacattaatgatattaacactccagtggggggtggggagtccctgatgctagggctggggtgggtggagtttgaagactcttgggaaagcctctcctggggccactgttgggggtgggagtgagcccaccacagaggccacaggcaggcccccacttcaggcccaaggcctggggcggggggaacagtcactgggtctcagattctgagactgttgtttagcttacctttctgctaggattggcttcccgcagagggcagggcccatcctaagcagcttccaagtcccacaaaggtggcttgtgggaggatttggaaggagctgcattgtgggcggggagtgtgtgggttgggttcgtaccagcaagtagactaggaactgagcccaggaaagggggatgttttcctggtgtttggatggtcagctgggagtgtccatcatcaggggaagatcaaacacaggtgcactcagctgcccagggcctctgggacacttgccttgacttgcaacttgccttgaacatcacgatcaaagcagcaggtgctgtggtctctcaaaattgatttttatttgactctgtggctctaagactgccttgaaccgcctgaggcctatgcatctgaacaagtgggtctctcccttgagcaccaggagtgggtgccagccggccccgaggattcccagcaccccacctatggtcttgccagcataggcttgctagttccttcttggtcagaggtagctgcagaggggggaggccaagggtttggtctaagctgtgccctgccacctggcaggaggcccactcactgcccaagtcatggcaacaggctggagcagcccaggagatgggcctaaaatgttctggatcccttgggtcctagtgttatgttccagtctgcccacctgtgctcaggatgcagccctgggatccagcacccatggaagcttctgctgggatggtgtcacctatgggttttgaaccagtgtggtatggtccttgggagctctgctctgagcttgccacactgctgagagcacccactgtcctgaccagagtctcagtggtcctgacccccaatgtgggcaggggctgggcaggagggtggggtctgctgtgggttcagaggactccacctcctggctggtttacctgctgctgcccattttctctgggtactgctggccagaggactttagcctacccctgaagagcctgtccatgtcattttcctactgccatagataccctaagcccagggccccttgaggcccagactcagcctgcccactggtgccggagacggagtggagtgggcctggatccgagggatgctacctctccctttcccacttgaggaccctggggagagatgggggcggggaaaatggaggtatgaatttggggtaagaggaagtgagatctccgcttgcaggtcagcccctgccttgcagggcgggctggcttgactcaggccctgtgagatagagggcccagcccagccccacccacagatcccctgctcctgttgtgttctgttgtaaatcatttggcgagactgtattttagtaactgctgcctaacttccctgtgttctatttgagaggcgcctgtctggataaagttgtcttgaaatttcaca

SEQ ID NO: 16997 - protein, 198 aa, Homo sapiens; identical to SEQ ID NO: 1996

SEQ ID NO: 16998 - DNA, 1653 bp, Homo sapiens
gactgttgaatcatggtggatgattccttgtgcggcaagagcctaaggtgagcgcctcaggcccaggtggttggaggcagttcacttgggcgccgttggagtcgatgcgggccgaggccttgttccactcctgcctctgctctgccctctgctgctctggctgatttctgaactcctactcccagtccaggaaggctggttcaagttctgatcaccagagatttactgttgaatcttattcctctttctgctgagtagacataagtctttaagatgcaagcaattcagccttcctgaagaggttcttaagcttttaatttccctttgacagaaaatatttaattgacaaggatgggtgctgctgactgccgctttctctcaggtcagtgctcatgtcttcctatgtggagatggcactgttggcccatggttggatagtcatagggacaaatttacttggtctgtccacacacatttgctttcatgtgcacattggagggagatggctaggtgggattaggaagatagtctgtgaccagaaagcaagagagaaggtggcaacagtggtccccacaaaccacatcccaagtgggaaccacatctgttgtcctcaggaccatcttctaggaagaaacaccaccgtggtggtcagatagcattgtgtgaagacaggagtggggcaaagttaagatattctgccaatcccatttgtattattggtcctttgtttgtacctggcctaactgtaggaattttactcactttttgatagcattaatggggtgtgagaaaagaaaggaaaaaggatcccagactagttttggaagccggggcccgccttgtgcttggtgatgggaattgcttgtggacagcttccctcaaggcctccacccccaccctgttctagtgctagtttctctgcctggctgtgtcctgtggagctccctctgccacgcctgccaggattggggcttcccttacttcgtcagtcctccttctcagctcctctttgtttttttccaaggcccggaaacaaaactcatgctgtgccatcatgtgatgcagcctgccagaggcccaatgctggaatggcaccatcattcacatcagaactgcagcccctggaaaagaagagacagccatagacgaggagccagagtgggggcagactggccatttttattttgaagttcctgcgagaaatggatggtggaagggtggcgaatgttcaaattcatatgtgtggtagtgattcttggaaagaatttgagggccccttgaggcccagactcagcctgcccactggtgccggagacggagtggagtgggcctggatccgagggatgctacctctccctttcccacttgaggaccctggggagagatgggggcggggaaaatggaggtatgaatttggggtaagaggaagtgagatctccgcttgcaggtcagcccctgccttgcagggcgggctggcttgactcaggccctgtgagatagagggcccagcccagccccacccacagatcccctgctcctgttgtgttctgttgtaaatcatttggcgagactgtattttagtaactgctgcctaacttccctgtgttctatttgagaggcgcctgtctggataaagttgtcttgaaatttcac

SEQ ID NO: 16999 - protein, 92 aa, Homo sapiens
MDGGRVANVQIHMCGSDSWKEFEGPLRPRLSLPTGAGDGVEWAWIRGMLPLPFPLEDPGERWGRGKWRYEFGVRGSEISACRSAPALQGGLA

SEQ ID NO: 17000 - DNA, 824 bp, Homo sapiens
gcccggaaacaaaactcatgctgtgccatcatgtgatgcagcctgccagaggcccaatgctggaatggcaccatcattcacatcagaactgcagcccctggaaaagaagagacagccatagacgaggagccagagtgggggcagactggccatttttattttgaagttcctgcgagaaatggatggtggaagggtggcgaatgttcaaattcatatgtgtggtagtgattcttggaaagaatttgaggtccccaaaggtgtatttttgggcaaatgaaaccataaactccgactggcttctgtagatgccaaagggctctttttcagctaaccctgggaaggctctgtgggagggaggtcggagccagctgtttctcgatctttggtatatctttggatcttatttgtcattttcctactgccatagataccctaagcccagggccccttgaggcccagactcagcctgcccactggtgccggagacggagtggagtgggcctggatccgagggatgctacctctccctttcccacttgaggaccctggggagagatgggggcggggaaaatggaggtatgaatttggggtaagaggaagtgagatctccgcttgcaggtcagcccctgccttgcagggcgggctggcttgactcaggccctgtgagatagagggcccagcccagccccacccacagatcccctgctcctgttgtgttctgttgtaaatcatttggcgagactgtattttagtaactgctgcctaacttccctgtgttctatttgagaggcgcctgtctggataaagttgtcttgaaatttcac

SEQ ID NO: 17001 - protein, 48 aa, Homo sapiens
MPKGSFSANPGKALWEGGRSQLFLDLWYIFGSYLSFSYCHRYPKPRAP

SEQ ID NO: 17002 - DNA, 1043 bp, Homo sapiens
gccagaggcccaatgctggaatggcaccatcattcacatcagaactgcagcccctggaaaagaagagacagccatagacgaggagccagagtgggggcagactggccatttttattttgaagttcctgcgagaaatggatggtggaagggtggcgaatgttcaaattcatatgtgtggtagtgattcttggaaagaatttgaggtccccaaaggtgtatttttgggcaaatgaaaccataaactccgactggcttctgtagatgccaaagggctctttttcagctaaccctgggaaggctctgtgggagggaggtcggagccagctgtttctcgatctttggtatatctttggatcttatttgtacattaatgatattaacactccagtggggggtggggagtccctgatgctagggctggggtgggtggagtttgaagactcttgggaaagcctctcctggggccactgttgggggtgggagtgagcccaccacagaggccacaggcaggcccccacttcaggcccaaggcctggggcggggggaacagtcactgggtctcagattctgagactgttgtttagcttacctttctgctaggattggcttcccgcagagggcagggcccatcctaagcagcttccaagtcccacaaaggtggcttgtgggaggatttggaaggagctgcattgtgggcggggagtgtgtgggttgggttcgtaccagcaagtagactaggaactctccctttcccacttgaggaccctggggagagatgggggcggggaaaatggaggtatgaatttggggtaagaggaagtgagatctccgcttgcaggtcagcccctgccttgcagggcgggctggcttgactcaggccctgtgagatagagggcccagcccagccccacccacagatcccctgctcctgttgtgttctgttgtaaatcatttggcgagactgtattttagtaactgctgcctaacttccctgtgttctatttgagaggcgcctgtctggataaagttgtcttgaaatttca

SEQ ID NO: 17003 - protein, 74 aa, Homo sapiens [sequence omitted]

SEQ ID NO: 17004 - DNA, 1809 bp, Homo sapiens
gaagttcctgcgagaaatggatggtggaagggtggcgaatgttcaaattcatatgtgtggtagtgattcttggaaagaatttgaggtccccaaaggtgtatttttgggcaaatgaaaccataaactccgactggcttctgtagatgccaaagggctctttttcagctaaccctgggaaggctctgtgggagggaggtcggagccagctgtttctcgatctttggtatatctttggatcttatttgtacattaatgatattaacactccagtggggggtggggagtccctgatgctagggctggggtgggtggagtttgaagactcttgggaaagcctctcctggggccactgttgggggtgggagtgagcccaccacagaggccacaggcaggcccccacttcaggcccaaggcctggggcggggggaacagtcactgggtctcagattctgagactgttgtttagcttacctttctgctaggattggcttcccgcagagggcagggcccatcctaagcagcttccaagtcccacaaaggtggcttgtgggaggatttggaaggagctgcattgtgggcggggagtgtgtgggttgggttcgtaccagcaagtagactaggaactgagcccaggaaagggggatgttttcctggtgtttggatggtcagctgggagtgtccatcatcaggggaagatcaaacacaggtgctgtggtctctcaaaattgatttttatttgactctgtggctctaagactgccttgaaccgcctgaggcctatgcatctgaacaagtgggtctctcccttgagcaccaggagtgggtgccagccggccccgaggattcccagcaccccacctatggtcttgccagcataggcttgctagttccttcttggtcagaggtagctgcagaggggggaggccaagggtttggtctaagctgtgccctgccacctggcaggaggcccactcactgcccaagtcatggcaacaggctggagcagcccaggagatgggcctaaaatgttctggatcccttgggtcctagtgttatgttccagtctgcccacctgtgctcaggatgcagccctgggatccagcacccatggaagcttctgctgggatggtgtcacctatgggttttgaaccagtgtggtatggtccttgggagctctgctctgagcttgccacactgctgagagcacccactgtcctgaccagagtctcagtggtcctgacccccaatgtgggcaggggctgggcaggagggtggggtctgctgtgggttcagaggactccacctcctggctggtttacctgctgctgcccattttctctgggtactgctggccagaggactttagcctacccctgaagagcctgtccatgtcattttcctactgccatagataccctaagcccagggccccttgaggcccagactcagcctgcccactggtgccggagacggagtggagtgggcctggatccgagggatgctacctctccctttcccacttgaggaccctggggagagatgggggcggggaaaatggaggtatgaatttggggtaagaggaagtgagatctccgcttgcaggtcagcccctgccttgcagggcgggctggcttgactcaggccctgtgagatagagggcccagcccagccccacccacagatcccctgctcctgttgtgttctgttgtaaatcatttggcgagactgtattttagtaactgctgcctaacttccctgtgttctatttgagaggcgcctgtctggataaagttgtcttgaaatttcaca

SEQ ID NO: 17005 - protein, 30 aa, Homo sapiens
MVSWECPSSGEDQTQVLWSLKIDFYLTLWL

SEQ ID NO: 17006 - DNA, 1751 bp, Homo sapiens
gtgattcttggaaagaatttgaggtccccaaaggtgtatttttgggcaaatgaaaccataaactccgactggcttctgtagatgccaaagggctctttttcagctaaccctgggaaggctctgtgggagggaggtcggagccagctgtttctcgatctttggtatatctttggatcttatttgtacattaatgatattaacactccagtggggggtggggagtccctgatgctagggctggggtgggtggagtttgaagactcttgggaaagcctctcctggggccactgttgggggtgggagtgagcccaccacagaggccacaggcaggcccccacttcaggcccaaggcctggggcggggggaacagtcactgggtctcagattctgagactgttgtttagcttacctttctgctaggattggcttcccgcagagggcagggcccatcctaagcagcttccaagtcccacaaaggtggcttgtgggaggatttggaaggagctgcattgtgggcggggagtgtgtgggttgggttcgtaccagcaagtagactaggaactgagcccaggaaagggggatgttttcctggtgtttggatggtcagctgggagtgtccatcatcaggggaagatcaaacacaggtgcactcagctgcccagggcctctgggacacttgccttgacttgcaacttgccttgaacatcacgatcaaagcagcaggtgctgtggtctctcaaaattgatttttatttgactctgtggctctaagactgccttgaaccgcctgaggcctatgcatctgaacaagtgggtctctcccttgagcaccaggagtgggtgccagccggccccgaggattcccagcaccccacctatggtcttgccagcataggcttgctagttccttcttggtcagaggtagctgcagaggggggaggccaagggtttggtctaagctgtgccctgccacctggcaggaggcccactcactgcccaagtcatggcaacaggctggagcagcccaggagatgggcctaaaatgttccatggaagcttctgctgggatggtgtcacctatgggttttgaaccagtgtggtatggtccttgggagctctgctctgagcttgccacactgctgagagcacccactgtcctgaccagagtctcagtggtcctgacccccaatgtgggcaggggctgggcaggagggtggggtctgctgtgggttcagaggactccacctcctggctggtttacctgctgctgcccattttctctgggtactgctggccagaggactttagcctacccctgaagagcctgtccatgtcattttcctactgccatagataccctaagcccagggccccttgaggcccagactcagcctgcccactggtgccggagacggagtggagtgggcctggatccgagggatgctacctctccctttcccacttgaggaccctggggagagatgggggcggggaaaatggaggtatgaatttggggtaagaggaagtgagatctccgcttgcaggtcagcccctgccttgcagggcgggctggcttgactcaggccctgtgagatagagggcccagcccagccccacccacagatcccctgctcctgttgtgttctgttgtaaatcatttggcgagactgtattttagtaactgctgcctaacttccctgtgttctatttgagaggcgcctgtctggataaagttgtcttgaaatttcaca

SEQ ID NO: 17007 - protein, 95 aa, Homo sapiens
MGLKCSMEASAGMVSPMGFEPVWYGPWELCSELATLLRAPTVLTRVSVVLTPNVGRGWAGGWGLLWVQRTPPPGWFTCCCPFSLGTAGQRTLAYP

SEQ ID NO: 17008 - DNA, 1338 bp, Homo sapiens
cataaactccgactggcttctgtagatgccaaagggctctttttcagctaaccctgggaaggctctgtgggagggaggtcggagccagctgtttctcgatctttggtatatctttggatcttatttgtacattaatgatattaacactccagtggggggtggggagtccctgatgctagggctggggtgggtggagtttgaagactcttgggaaagcctctcctggggccactgttgggggtgggagtgagcccaccacagaggccacaggcaggcccccacttcaggcccaaggcctggggcggggggaacagtcactgggtctcagattctgagactgttgtttagcttacctttctgctaggattggcttcccgcagagggcagggcccatcctaagcagcttccaagtcccacaaaggtggcttgtgggaggatttggaaggagctgcattgtgggcggggagtgtgtgggttgggttcgtaccagcaagtagactaggaactgagcccaggaaagggggatgttttcctggtgtttggatggtcagctgggagtgtccatcatcaggggaagatcaaacacaggtgcactcagctgcccagggcctctgggacacttgccttgacttgcaacttgccttgaacatcacgatcaaagcagcaggtgctgtggtctctcaaaattgatttttatttgactctgtggctctaagactgccttgaaccgcctgaggcctatgcatctgaacaagtgggtctctcccttgagcaccaggagtgggtgccagccggccccgaggattcccagcaccccacctatggtcttgccagcataggcttgctagttccttcttggtcagaggtagctgcagaggggggaggccaagggtttggtctaagctgtgccctgccacctggcaggaggcccactcactgcccaagtcatggcaacaggctggagcagcccaggagatgggcctaaaatgttctggatcccttgggtcctagtgttatgttccagtctgcccacctgtgctcaggatgcagccctgggatccagcacccatggaagcttctgctgggatggtgtcacctatgggttttgaaccagtgtggtatggtccttgggagctctgctctgagcttgccacactgctgagagcacccactgtcctgaccagagtctcagtggtcctgacccccaccacagatcccctgctcctgttgtgttctgttgtaaatcatttggcgagactgtattttagtaactgctgcctaacttccctgtgttctatttgagaggcgcctgtctggataaagttgtcttgaaatttc

SEQ ID NO: 17009 - protein, 85 aa, Homo sapiens
MQPWDPAPMEASAGMVSPMGFEPVWYGPWELCSELATLLRAPTVLTRVSVVLTPTTDPLLLLCSVVNHLARLYFSNCCLTSLCSI

SEQ ID NO: 17010 - DNA, 944 bp, Homo sapiens
ctcgggcacacggcctgcctgtcgcatgtttgtgtctgcctcgttccctcccctggtgcctgtgtctgcagaaaaacaagaccagatgtgatttgttaaaaaaaaacaaaaaaaaaaaaaaaaaaaacaagatgacgacgacaaccacaaaaaaaattgacatcagatgaaatgaaaaaaaaaaaaaacaaaaaaaactaaaggaaggaaaaagctgtaaaaatcactggcattcgtggggccactccccacccaagctccacgtgtgtccgtctgtgctcctggcctctgggggaccagctgggacatgaacttgtctgccaggcccccgtcgcgtgctgaacggtgttagtttgtagccaagggaggggcacagaatggggaacaggacacaggatcctaaactccaaggggactgtccaccgatgaacactcagagtggacaccatcttccgtccacgctgtgcccaggacagctgtccccatccatgaacacagggtaaacatctgccgggctccgcaccagtggctccctgggccatgggacagcggcagggctcaccacggacagcacgtggcccagcagccggccaccctggcgtcctggggcctcctcccctcctctccctctcaccttgtcacctccacggagctgcctgtctgggataatttggggattttttttctgggggataattcttttgcatgacccctaaagagcaagccacaccggtctgctagctaggtgtccgcggtgtggtggtggcggccgctggccagcgctgcaaggggtcggctgcccacggtgctggctggcctcccctcctctctctttttgctgagtttcattgtcttttctttctgagccttgtaagtgtacaaaaattattcttattttgttctgtctcgggaaactgcaaataaaagaaaaacaggacaaactg

SEQ ID NO: 17011 - protein, 42 aa, Homo sapiens
MGQRQGSPRTARGPAAGHPGVLGPPPLLSLSPCHLHGAACLG

SEQ ID NO: 17012 - DNA, 2830 bp, Homo sapiens
ccggggggaatgggccagcgcccagtggtcacctggccatgtctccccacagcccggaagcaggagatcattaagaccacggagcagctcatcgaggccgtcaacaacggtgactttgaggcctacgcgaaaatctgtgacccagggctgacctcgtttgagcctgaagcactgggcaacctggttgaagggatggacttccacagattctacttcgagaacctgctggccaagaacagcaagccgatccacacgaccatcctgaacccacacgtgcacgtcattggagaggatgccgcctgcatcgcttacatccggctcacgcagtacattgacgggcagggccggccccgcaccagccagtctgaggagacccgcgtgtggcaccgccgcgacggcaagtggcagaacgtgcacttccactgctcgggcgcgcctgtggccccgctgcagtgaagagctgcgccctggtttcgccggacagagttggtgtttggagcccgactgccctcgggcacacggcctgcctgtcgcatgtttgtgtctgcctcgttccctcccctggtgcctgtgtctgcagaaaaacaagaccagatgtgatttgttaaaaaaaaacaaaaaaaaaaaaaaaaaaaacaagatgacgacgacaaccacaaaaaaaattgacatcagatgaaatgaaaaaaaaaaaaaacaaaaaaaactaaaggaaggaaaaagctgtaaaaatcactggcattcgtggggccactccccacccaagctccacgtgtgtccgtctgtgctcctggcctctgggggaccagctgggacatgaacttgtctgccaggcccccgtcgcgtgctgaacggtgttagtttgtaggtaacgcacacaccccacacctaaggtgtctgcatcctcctgccaacgcatgggctccacgtggtgtgctcgctggctgtcgtgactgtcagctgtctcttgggaggggctgtgggggcccgctgggctgcctcctttcccgctagttgtgcctgagagttgctgttgttcctgctttcccttcccttcctttcatcccctgaagggctaggtgtgggttttccgtgcccggtatccccacacacccagcacggacaacccttcggcagagcccaggccggcccctcaccccctggagtattgaaactggagtcccgtccccaaggccttcagagatgcccctacacacccagggctccagctctggtccttctgggggagtaaagtgcaaagaggggcacagcttagttttgggcctctcgccgagcaagagacagcactgctggctacagctccaacacagccagctgtggcaagaggactctgcctgggctggcccccctcctgtgtgaggtgtctgtcccttctctgctggccagcagcagatgcactggcagctcccaaccctgtttccgcccctcggccctcccccagcctgttcggcttctctgcagcccgcaagggggagcagacttttgacaaaggactgcgggcctcgctcaagtccctgagcccccagctgaagctgggaggggaggccaggctttgtgtctgggcatattcgtctgctgatggggtttggggaagcctggggcttggggtttggtcgggtggtgcagctagtggcagagcgggatcagaggtggtggctgcccagcttctgggctgagacaagggtctgtgcaggggtttactgaagtgggagtgcctttggaatctgggccgggagcagaagggagcaaaagctacagtgggagccagcctagggcacatgggaggcgtgagggcagtgctgcccgtgcagtgtcaggtgtgccagtgccttggcgggctgcagtgcgtgtgagggcaccttctaggtgggccagggatgcagctatggagataaggcgggctggggacagaaacaggtgggcacagggcccaggacaccagcggatggagggcagggtctagccctgtgctcctgagcgtcggctgcctgggttcgaggcggtgggtccccggccccttgtgatggtgtgtaccatgggggagctcggggacagggcaagcccgagcatggtggggctgcagggtgggtctgaagccaggttgggtgggggtggtcacaagccctgactgcagagggtcaggggctcctgccccagtgcctgcccactttcaattcacattgttttcaacaaggattttctttatcttcccctacaaatcaagccaagggaggggcacagaatggggaacaggacacaggatcctaaactccaaggggactgtccaccgatgaacactcagagtggacaccatcttccgtccacgctgtgcccaggacagctgtccccatccatgaacacagggtaaacatctgccgggctccgcaccagtggctccctgggccatgggacagcggcagggctcaccacggacagcacgtggcccagcagccggccaccctggcgtcctggggcctcctcccctcctctccctctcaccttgtcacctccacggagctgcctgtctgggataatttggggattttttttctgggggataattcttttgcatgacccctaaagagcaagccacaccggtctgctagctaggtgtccgcggtgtggtggtggcggccgctggccagcgctgcaaggggtcggctgcccacggtgctggctggcctcccctcctctctctttttgctgagtttcattgtcttttctttctgagccttgtaagtgtacaaaaattattcttattttgttctgtctcgggaaactgcaaataaaagaaaaacaggacaaactg

SEQ ID NO: 17013 - protein, 148 aa, Homo sapiens
MGQRPVVTWPCLPTARKQEIIKTTEQLIEAVNNGDFEAYAKICDPGLTSFEPEALGNLVEGMDFHRFYFENLLAKNSKPIHTTILNPHVHVIGEDAACIAYIRLTQYIDGQGRPRTSQSEETRVWHRRDGKWQNVHFHCSGAPVAPLQ

SEQ ID NO: 17014 - DNA, 2929 bp, Homo sapiens
ctacccgcagtatcacttacagggatggatgacatcccagggctgctgccacccccacctgtggggagacaccagactgggggtggtgtggagatactcttagagaagaggctgctgggccacgggctcggcatggcagggcagtggctagcccggaagcaggagatcattaagaccacggagcagctcatcgaggccgtcaacaacggtgactttgaggcctacgcgaaaatctgtgacccagggctgacctcgtttgagcctgaagcactgggcaacctggttgaagggatggacttccacagattctacttcgagaacctgctggccaagaacagcaagccgatccacacgaccatcctgaacccacacgtgcacgtcattggagaggatgccgcctgcatcgcttacatccggctcacgcagtacattgacgggcagggccggccccgcaccagccagtctgaggagacccgcgtgtggcaccgccgcgacggcaagtggcagaacgtgcacttccactgctcgggcgcgcctgtggccccgctgcagtgaagagctgcgccctggtttcgccggacagagttggtgtttggagcccgactgccctcgggcacacggcctgcctgtcgcatgtttgtgtctgcctcgttccctcccctggtgcctgtgtctgcagaaaaacaagaccagatgtgatttgttaaaaaaaaacaaaaaaaaaaaaaaaaaaaacaagatgacgacgacaaccacaaaaaaaattgacatcagatgaaatgaaaaaaaaaaaaaacaaaaaaaactaaaggaaggaaaaagctgtaaaaatcactggcattcgtggggccactccccacccaagctccacgtgtgtccgtctgtgctcctggcctctgggggaccagctgggacatgaacttgtctgccaggcccccgtcgcgtgctgaacggtgttagtttgtaggtaacgcacacaccccacacctaaggtgtctgcatcctcctgccaacgcatgggctccacgtggtgtgctcgctggctgtcgtgactgtcagctgtctcttgggaggggctgtgggggcccgctgggctgcctcctttcccgctagttgtgcctgagagttgctgttgttcctgctttcccttcccttcctttcatcccctgaagggctaggtgtgggttttccgtgcccggtatccccacacacccagcacggacaacccttcggcagagcccaggccggcccctcaccccctggagtattgaaactggagtcccgtccccaaggccttcagagatgcccctacacacccagggctccagctctggtccttctgggggagtaaagtgcaaagaggggcacagcttagttttgggcctctcgccgagcaagagacagcactgctggctacagctccaacacagccagctgtggcaagaggactctgcctgggctggcccccctcctgtgtgaggtgtctgtcccttctctgctggccagcagcagatgcactggcagctcccaaccctgtttccgcccctcggccctcccccagcctgttcggcttctctgcagcccgcaagggggagcagacttttgacaaaggactgcgggcctcgctcaagtccctgagcccccagctgaagctgggaggggaggccaggctttgtgtctgggcatattcgtctgctgatggggtttggggaagcctggggcttggggtttggtcgggtggtgcagctagtggcagagcgggatcagaggtggtggctgcccagcttctgggctgagacaagggtctgtgcaggggtttactgaagtgggagtgcctttggaatctgggccgggagcagaagggagcaaaagctacagtgggagccagcctagggcacatgggaggcgtgagggcagtgctgcccgtgcagtgtcaggtgtgccagtgccttggcgggctgcagtgcgtgtgagggcaccttctaggtgggccagggatgcagctatggagataaggcgggctggggacagaaacaggtgggcacagggcccaggacaccagcggatggagggcagggtctagccctgtgctcctgagcgtcggctgcctgggttcgaggcggtgggtccccggccccttgtgatggtgtgtaccatgggggagctcggggacagggcaagcccgagcatggtggggctgcagggtgggtctgaagccaggttgggtgggggtggtcacaagccctgactgcagagggtcaggggctcctgccccagtgcctgcccactttcaattcacattgttttcaacaaggattttctttatcttcccctacaaatcaagccaagggaggggcacagaatggggaacaggacacaggatcctaaactccaaggggactgtccaccgatgaacactcagagtggacaccatcttccgtccacgctgtgcccaggacagctgtccccatccatgaacacagggtaaacatctgccgggctccgcaccagtggctccctgggccatgggacagcggcagggctcaccacggacagcacgtggcccagcagccggccaccctggcgtcctggggcctcctcccctcctctccctctcaccttgtcacctccacggagctgcctgtctgggataatttggggattttttttctgggggataattcttttgcatgacccctaaagagcaagccacaccggtctgctagctaggtgtccgcggtgtggtggtggcggccgctggccagcgctgcaaggggtcggctgcccacggtgctggctggcctcccctcctctctctttttgctgagtttcattgtcttttctttctgagccttgtaagtgtacaaaaattattcttattttgttctgtctcgggaaactgcaaataaaagaaaaacaggacaaactg

SEQ ID NO: 17015 - protein, 176 aa, Homo sapiens
MDDIPGLLPPPPVGRHQTGGGVEILLEKRLLGHGLGMAGQWLARKQEIIKTTEQLIEAVNNGDFEAYAKICDPGLTSFEPEALGNLVEGMDFHRFYFENLLAKNSKPIHTTILNPHVHVIGEDAACIAYIRLTQYIDGQGRPRTSQSEETRVWHRRDGKWQNVHFHCSGAPVAPLQ

SEQ ID NO: 17016 - DNA, 4239 bp, Homo sapiens
agcggcgcccgcgcctccccgcgcgtaggtgtgcggcgcgctcctggcgaggacggagcgagcagatctcgcgtgcgctcgccgcccggcgcagcccagcccggcccccgcctggcgccgcgagccgaggtgtctcccgcgcccgcgcccgtgtcgccgccgtgcccgcgagcgggagccggagtcgccgccgcccgagcgcagccgagcgcacgccgagcccgtccgccgccgccatggccaccacggtgacctgcacccgcttcaccgacgagtaccagctctacgaggatattggcaagggggctttctctgtggtccgacgctgtgtcaagctctgcaccggccatgagtatgcagccaagatcatcaacaccaagaagctgtcagccagagatcaccagaagctggagagagaggctcggatctgccgccttctgaagcattccaacatcgtgcgtctccacgacagcatctccgaggagggcttccactacctggtcttcgatctggtcactggtggggagctctttgaagacattgtggcgagagagtactacagcgaggctgatgccagtcactgtatccagcagatcctggaggccgttctccattgtcaccaaatgggggtcgtccacagagacctcaagccggagaacctgcttctggccagcaagtgcaaaggggctgcagtgaagctggcagacttcggcctagctatcgaggtgcagggggaccagcaggcatggtttggtttcgctggcacaccaggctacctgtcccctgaggtccttcgcaaagaggcgtatggcaagcctgtggacatctgggcatgtggggtgatcctgtacatcctgctcgtgggctacccacccttctgggacgaggaccagcacaagctgtaccagcagatcaaggctggtgcctatgacttcccgtcccctgagtgggacaccgtcactcctgaagccaaaaacctcatcaaccagatgctgaccatcaaccctgccaagcgcatcacagcccatgaggccctgaagcacccgtgggtctgccaacgctccacggtagcatccatgatgcacagacaggagactgtggagtgtctgaaaaagttcaatgccaggagaaagctcaagggagccatcctcaccaccatgctggccacacggaatttctcagtgggcagacagaccaccgctccggccacaatgtccaccgcggcctccggcaccaccatggggctggtggaacaagccaagagtttactcaacaagaaagcagatggagtcaagccccagacgaatagcaccaaaaacagtgcagccgccaccagccccaaagggacgcttcctcctgccgccctggagcctcaaaccaccgtcatccataacccagtggacgggattaaggagtcttctgacagtgccaataccaccatagaggatgaagacgctaaagcccggaagcaggagatcattaagaccacggagcagctcatcgaggccgtcaacaacggtgactttgaggcctacgcgaaaatctgtgacccagggctgacctcgtttgagcctgaagcactgggcaacctggttgaagggatggacttccacagattctacttcgagaacctgctggccaagaacagcaagccgatccacacgaccatcctgaacccacacgtgcacgtcattggagaggatgccgcctgcatcgcttacatccggctcacgcagtacattgacgggcagggccggccccgcaccagccagtctgaggagacccgcgtgtggcaccgccgcgacggcaagtggcagaacgtgcacttccactgctcgggcgcgcctgtggccccgctgcagtgaagagctgcgccctggtttcgccggacagagttggtgtttggagcccgactgccctcgggcacacggcctgcctgtcgcatgtttgtgtctgcctcgttccctcccctggtgcctgtgtctgcagaaaaacaagaccagatgtgatttgttaaaaaaaaacaaaaaaaaaaaaaaaaaaaacaagatgacgacgacaaccacaaaaaaaattgacatcagatgaaatgaaaaaaaaaaaaaacaaaaaaaactaaaggaaggaaaaagctgtaaaaatcactggcattcgtggggccactccccacccaagctccacgtgtgtccgtctgtgctcctggcctctgggggaccagctgggacatgaacttgtctgccaggcccccgtcgcgtgctgaacggtgttagtttgtaggtaacgcacacaccccacacctaaggtgtctgcatcctcctgccaacgcatgggctccacgtggtgtgctcgctggctgtcgtgactgtcagctgtctcttgggaggggctgtgggggcccgctgggctgcctcctttcccgctagttgtgcctgagagttgctgttgttcctgctttcccttcccttcctttcatcccctgaagggctaggtgtgggttttccgtgcccggtatccccacacacccagcacggacaacccttcggcagagcccaggccggcccctcaccccctggagtattgaaactggagtcccgtccccaaggccttcagagatgcccctacacacccagggctccagctctggtccttctgggggagtaaagtgcaaagaggggcacagcttagttttgggcctctcgccgagcaagagacagcactgctggctacagctccaacacagccagctgtggcaagaggactctgcctgggctggcccccctcctgtgtgaggtgtctgtcccttctctgctggccagcagcagatgcactggcagctcccaaccctgtttccgcccctcggccctcccccagcctgttcggcttctctgcagcccgcaagggggagcagacttttgacaaaggactgcgggcctcgctcaagtccctgagcccccagctgaagctgggaggggaggccaggctttgtgtctgggcatattcgtctgctgatggggtttggggaagcctggggcttggggtttggtcgggtggtgcagctagtggcagagcgggatcagaggtggtggctgcccagcttctgggctgagacaagggtctgtgcaggggtttactgaagtgggagtgcctttggaatctgggccgggagcagaagggagcaaaagctacagtgggagccagcctagggcacatgggaggcgtgagggcagtgctgcccgtgcagtgtcaggtgtgccagtgccttggcgggctgcagtgcgtgtgagggcaccttctaggtgggccagggatgcagctatggagataaggcgggctggggacagaaacaggtgggcacagggcccaggacaccagcggatggagggcagggtctagccctgtgctcctgagcgtcggctgcctgggttcgaggcggtgggtccccggccccttgtgatggtgtgtaccatgggggagctcggggacagggcaagcccgagcatggtggggctgcagggtgggtctgaagccaggttgggtgggggtggtcacaagccctgactgcagagggtcaggggctcctgccccagtgcctgcccactttcaattcacattgttttcaacaaggattttctttatcttcccctacaaatcaagccaagggaggggcacagaatggggaacaggacacaggatcctaaactccaaggggactgtccaccgatgaacactcagagtggacaccatcttccgtccacgctgtgcccaggacagctgtccccatccatgaacacagggtaaacatctgccgggctccgcaccagtggctccctgggccatgggacagcggcagggctcaccacggacagcacgtggcccagcagccggccaccctggcgtcctggggcctcctcccctcctctccctctcaccttgtcacctccacggagctgcctgtctgggataatttggggattttttttctgggggataattcttttgcatgacccctaaagagcaagccacaccggtctgctagctaggtgtccgcggtgtggtggtggcggccgctggccagcgctgcaaggggtcggctgcccacggtgctggctggcctcccctcctctctctttttgctgagtttcattgtcttttctttctgagccttgtaagtgtacaaaaattattcttattttgttctgtctcgggaaactgcaaataaaagaaaaacaggacaaactg

SEQ ID NO: 17017 - protein, 542 aa, Homo sapiens; identical to SEQ ID NO: 2000

SEQ ID NO: 17018 - DNA, 4122 bp, Homo sapiens
agcggcgcccgcgcctccccgcgcgtaggtgtgcggcgcgctcctggcgaggacggagcgagcagatctcgcgtgcgctcgccgcccggcgcagcccagcccggcccccgcctggcgccgcgagccgaggtgtctcccgcgcccgcgcccgtgtcgccgccgtgcccgcgagcgggagccggagtcgccgccgcccgagcgcagccgagcgcacgccgagcccgtccgccgccgccatggccaccacggtgacctgcacccgcttcaccgacgagtaccagctctacgaggatattggcaagggggctttctctgtggtccgacgctgtgtcaagctctgcaccggccatgagtatgcagccaagatcatcaacaccaagaagctgtcagccagagatcaccagaagctggagagagaggctcggatctgccgccttctgaagcattccaacatcgtgcgtctccacgacagcatctccgaggagggcttccactacctggtcttcgatctggtcactggtggggagctctttgaagacattgtggcgagagagtactacagcgaggctgatgccagtcactgtatccagcagatcctggaggccgttctccattgtcaccaaatgggggtcgtccacagagacctcaagccggagaacctgcttctggccagcaagtgcaaaggggctgcagtgaagctggcagacttcggcctagctatcgaggtgcagggggaccagcaggcatggtttggtttcgctggcacaccaggctacctgtcccctgaggtccttcgcaaagaggcgtatggcaagcctgtggacatctgggcatgtggggtgatcctgtacatcctgctcgtgggctacccacccttctgggacgaggaccagcacaagctgtaccagcagatcaaggctggtgcctatgacttcccgtcccctgagtgggacaccgtcactcctgaagccaaaaacctcatcaaccagatgctgaccatcaaccctgccaagcgcatcacagcccatgaggccctgaagcacccgtgggtctgccaacgctccacggtagcatccatgatgcacagacaggagactgtggagtgtctgaaaaagttcaatgccaggagaaagctcaagggagccatcctcaccaccatgctggccacacggaatttctcagcagccaagagtttactcaacaagaaagcagatggagtcaagccccagacgaatagcaccaaaaacagtgcagccgccaccagccccaaagggacgcttcctcctgccgccctggagtcttctgacagtgccaataccaccatagaggatgaagacgctaaagcccggaagcaggagatcattaagaccacggagcagctcatcgaggccgtcaacaacggtgactttgaggcctacgcgaaaatctgtgacccagggctgacctcgtttgagcctgaagcactgggcaacctggttgaagggatggacttccacagattctacttcgagaacctgctggccaagaacagcaagccgatccacacgaccatcctgaacccacacgtgcacgtcattggagaggatgccgcctgcatcgcttacatccggctcacgcagtacattgacgggcagggccggccccgcaccagccagtctgaggagacccgcgtgtggcaccgccgcgacggcaagtggcagaacgtgcacttccactgctcgggcgcgcctgtggccccgctgcagtgaagagctgcgccctggtttcgccggacagagttggtgtttggagcccgactgccctcgggcacacggcctgcctgtcgcatgtttgtgtctgcctcgttccctcccctggtgcctgtgtctgcagaaaaacaagaccagatgtgatttgttaaaaaaaaacaaaaaaaaaaaaaaaaaaaacaagatgacgacgacaaccacaaaaaaaattgacatcagatgaaatgaaaaaaaaaaaaaacaaaaaaaactaaaggaaggaaaaagctgtaaaaatcactggcattcgtggggccactccccacccaagctccacgtgtgtccgtctgtgctcctggcctctgggggaccagctgggacatgaacttgtctgccaggcccccgtcgcgtgctgaacggtgttagtttgtaggtaacgcacacaccccacacctaaggtgtctgcatcctcctgccaacgcatgggctccacgtggtgtgctcgctggctgtcgtgactgtcagctgtctcttgggaggggctgtgggggcccgctgggctgcctcctttcccgctagttgtgcctgagagttgctgttgttcctgctttcccttcccttcctttcatcccctgaagggctaggtgtgggttttccgtgcccggtatccccacacacccagcacggacaacccttcggcagagcccaggccggcccctcaccccctggagtattgaaactggagtcccgtccccaaggccttcagagatgcccctacacacccagggctccagctctggtccttctgggggagtaaagtgcaaagaggggcacagcttagttttgggcctctcgccgagcaagagacagcactgctggctacagctccaacacagccagctgtggcaagaggactctgcctgggctggcccccctcctgtgtgaggtgtctgtcccttctctgctggccagcagcagatgcactggcagctcccaaccctgtttccgcccctcggccctcccccagcctgttcggcttctctgcagcccgcaagggggagcagacttttgacaaaggactgcgggcctcgctcaagtccctgagcccccagctgaagctgggaggggaggccaggctttgtgtctgggcatattcgtctgctgatggggtttggggaagcctggggcttggggtttggtcgggtggtgcagctagtggcagagcgggatcagaggtggtggctgcccagcttctgggctgagacaagggtctgtgcaggggtttactgaagtgggagtgcctttggaatctgggccgggagcagaagggagcaaaagctacagtgggagccagcctagggcacatgggaggcgtgagggcagtgctgcccgtgcagtgtcaggtgtgccagtgccttggcgggctgcagtgcgtgtgagggcaccttctaggtgggccagggatgcagctatggagataaggcgggctggggacagaaacaggtgggcacagggcccaggacaccagcggatggagggcagggtctagccctgtgctcctgagcgtcggctgcctgggttcgaggcggtgggtccccggccccttgtgatggtgtgtaccatgggggagctcggggacagggcaagcccgagcatggtggggctgcagggtgggtctgaagccaggttgggtgggggtggtcacaagccctgactgcagagggtcaggggctcctgccccagtgcctgcccactttcaattcacattgttttcaacaaggattttctttatcttcccctacaaatcaagccaagggaggggcacagaatggggaacaggacacaggatcctaaactccaaggggactgtccaccgatgaacactcagagtggacaccatcttccgtccacgctgtgcccaggacagctgtccccatccatgaacacagggtaaacatctgccgggctccgcaccagtggctccctgggccatgggacagcggcagggctcaccacggacagcacgtggcccagcagccggccaccctggcgtcctggggcctcctcccctcctctccctctcaccttgtcacctccacggagctgcctgtctgggataatttggggattttttttctgggggataattcttttgcatgacccctaaagagcaagccacaccggtctgctagctaggtgtccgcggtgtggtggtggcggccgctggccagcgctgcaaggggtcggctgcccacggtgctggctggcctcccctcctctctctttttgctgagtttcattgtcttttctttctgagccttgtaagtgtacaaaaattattcttattttgttctgtctcgggaaactgcaaataaaagaaaaacaggacaaactg

SEQ ID NO: 17019 - protein, 503 aa, Homo sapiens; identical to SEQ ID NO: 2006

SEQ ID NO: 17020 - DNA, 4050 bp, Homo sapiens
agcggcgcccgcgcctccccgcgcgtaggtgtgcggcgcgctcctggcgaggacggagcgagcagatctcgcgtgcgctcgccgcccggcgcagcccagcccggcccccgcctggcgccgcgagccgaggtgtctcccgcgcccgcgcccgtgtcgccgccgtgcccgcgagcgggagccggagtcgccgccgcccgagcgcagccgagcgcacgccgagcccgtccgccgccgccatggccaccacggtgacctgcacccgcttcaccgacgagtaccagctctacgaggatattggcaagggggctttctctgtggtccgacgctgtgtcaagctctgcaccggccatgagtatgcagccaagatcatcaacaccaagaagctgtcagccagagatcaccagaagctggagagagaggctcggatctgccgccttctgaagcattccaacatcgtgcgtctccacgacagcatctccgaggagggcttccactacctggtcttcgatctggtcactggtggggagctctttgaagacattgtggcgagagagtactacagcgaggctgatgccagtcactgtatccagcagatcctggaggccgttctccattgtcaccaaatgggggtcgtccacagagacctcaagccggagaacctgcttctggccagcaagtgcaaaggggctgcagtgaagctggcagacttcggcctagctatcgaggtgcagggggaccagcaggcatggtttggtttcgctggcacaccaggctacctgtcccctgaggtccttcgcaaagaggcgtatggcaagcctgtggacatctgggcatgtggggtgatcctgtacatcctgctcgtgggctacccacccttctgggacgaggaccagcacaagctgtaccagcagatcaaggctggtgcctatgacttcccgtcccctgagtgggacaccgtcactcctgaagccaaaaacctcatcaaccagatgctgaccatcaaccctgccaagcgcatcacagcccatgaggccctgaagcacccgtgggtctgccaacgctccacggtagcatccatgatgcacagacaggagactgtggagtgtctgaaaaagttcaatgccaggagaaagctcaagggagccatcctcaccaccatgctggccacacggaatttctcagcagccaagagtttactcaacaagaaagcagatggagtcaaggagtcttctgacagtgccaataccaccatagaggatgaagacgctaaagcccggaagcaggagatcattaagaccacggagcagctcatcgaggccgtcaacaacggtgactttgaggcctacgcgaaaatctgtgacccagggctgacctcgtttgagcctgaagcactgggcaacctggttgaagggatggacttccacagattctacttcgagaacctgctggccaagaacagcaagccgatccacacgaccatcctgaacccacacgtgcacgtcattggagaggatgccgcctgcatcgcttacatccggctcacgcagtacattgacgggcagggccggccccgcaccagccagtctgaggagacccgcgtgtggcaccgccgcgacggcaagtggcagaacgtgcacttccactgctcgggcgcgcctgtggccccgctgcagtgaagagctgcgccctggtttcgccggacagagttggtgtttggagcccgactgccctcgggcacacggcctgcctgtcgcatgtttgtgtctgcctcgttccctcccctggtgcctgtgtctgcagaaaaacaagaccagatgtgatttgttaaaaaaaaacaaaaaaaaaaaaaaaaaaaacaagatgacgacgacaaccacaaaaaaaattgacatcagatgaaatgaaaaaaaaaaaaaacaaaaaaaactaaaggaaggaaaaagctgtaaaaatcactggcattcgtggggccactccccacccaagctccacgtgtgtccgtctgtgctcctggcctctgggggaccagctgggacatgaacttgtctgccaggcccccgtcgcgtgctgaacggtgttagtttgtaggtaacgcacacaccccacacctaaggtgtctgcatcctcctgccaacgcatgggctccacgtggtgtgctcgctggctgtcgtgactgtcagctgtctcttgggaggggctgtgggggcccgctgggctgcctcctttcccgctagttgtgcctgagagttgctgttgttcctgctttcccttcccttcctttcatcccctgaagggctaggtgtgggttttccgtgcccggtatccccacacacccagcacggacaacccttcggcagagcccaggccggcccctcaccccctggagtattgaaactggagtcccgtccccaaggccttcagagatgcccctacacacccagggctccagctctggtccttctgggggagtaaagtgcaaagaggggcacagcttagttttgggcctctcgccgagcaagagacagcactgctggctacagctccaacacagccagctgtggcaagaggactctgcctgggctggcccccctcctgtgtgaggtgtctgtcccttctctgctggccagcagcagatgcactggcagctcccaaccctgtttccgcccctcggccctcccccagcctgttcggcttctctgcagcccgcaagggggagcagacttttgacaaaggactgcgggcctcgctcaagtccctgagcccccagctgaagctgggaggggaggccaggctttgtgtctgggcatattcgtctgctgatggggtttggggaagcctggggcttggggtttggtcgggtggtgcagctagtggcagagcgggatcagaggtggtggctgcccagcttctgggctgagacaagggtctgtgcaggggtttactgaagtgggagtgcctttggaatctgggccgggagcagaagggagcaaaagctacagtgggagccagcctagggcacatgggaggcgtgagggcagtgctgcccgtgcagtgtcaggtgtgccagtgccttggcgggctgcagtgcgtgtgagggcaccttctaggtgggccagggatgcagctatggagataaggcgggctggggacagaaacaggtgggcacagggcccaggacaccagcggatggagggcagggtctagccctgtgctcctgagcgtcggctgcctgggttcgaggcggtgggtccccggccccttgtgatggtgtgtaccatgggggagctcggggacagggcaagcccgagcatggtggggctgcagggtgggtctgaagccaggttgggtgggggtggtcacaagccctgactgcagagggtcaggggctcctgccccagtgcctgcccactttcaattcacattgttttcaacaaggattttctttatcttcccctacaaatcaagccaagggaggggcacagaatggggaacaggacacaggatcctaaactccaaggggactgtccaccgatgaacactcagagtggacaccatcttccgtccacgctgtgcccaggacagctgtccccatccatgaacacagggtaaacatctgccgggctccgcaccagtggctccctgggccatgggacagcggcagggctcaccacggacagcacgtggcccagcagccggccaccctggcgtcctggggcctcctcccctcctctccctctcaccttgtcacctccacggagctgcctgtctgggataatttggggattttttttctgggggataattcttttgcatgacccctaaagagcaagccacaccggtctgctagctaggtgtccgcggtgtggtggtggcggccgctggccagcgctgcaaggggtcggctgcccacggtgctggctggcctcccctcctctctctttttgctgagtttcattgtcttttctttctgagccttgtaagtgtacaaaaattattcttattttgttctgtctcgggaaactgcaaataaaagaaaaacaggacaaactg

SEQ ID NO: 17021 - protein, 479 aa, Homo sapiens; identical to SEQ ID NO: 2010

SEQ ID NO: 17022 - DNA, 4167 bp, Homo sapiens
agcggcgcccgcgcctccccgcgcgtaggtgtgcggcgcgctcctggcgaggacggagcgagcagatctcgcgtgcgctcgccgcccggcgcagcccagcccggcccccgcctggcgccgcgagccgaggtgtctcccgcgcccgcgcccgtgtcgccgccgtgcccgcgagcgggagccggagtcgccgccgcccgagcgcagccgagcgcacgccgagcccgtccgccgccgccatggccaccacggtgacctgcacccgcttcaccgacgagtaccagctctacgaggatattggcaagggggctttctctgtggtccgacgctgtgtcaagctctgcaccggccatgagtatgcagccaagatcatcaacaccaagaagctgtcagccagagatcaccagaagctggagagagaggctcggatctgccgccttctgaagcattccaacatcgtgcgtctccacgacagcatctccgaggagggcttccactacctggtcttcgatctggtcactggtggggagctctttgaagacattgtggcgagagagtactacagcgaggctgatgccagtcactgtatccagcagatcctggaggccgttctccattgtcaccaaatgggggtcgtccacagagacctcaagccggagaacctgcttctggccagcaagtgcaaaggggctgcagtgaagctggcagacttcggcctagctatcgaggtgcagggggaccagcaggcatggtttggtttcgctggcacaccaggctacctgtcccctgaggtccttcgcaaagaggcgtatggcaagcctgtggacatctgggcatgtggggtgatcctgtacatcctgctcgtgggctacccacccttctgggacgaggaccagcacaagctgtaccagcagatcaaggctggtgcctatgacttcccgtcccctgagtgggacaccgtcactcctgaagccaaaaacctcatcaaccagatgctgaccatcaaccctgccaagcgcatcacagcccatgaggccctgaagcacccgtgggtctgccaacgctccacggtagcatccatgatgcacagacaggagactgtggagtgtctgaaaaagttcaatgccaggagaaagctcaagggagccatcctcaccaccatgctggccacacggaatttctcagcagccaagagtttactcaacaagaaagcagatggagtcaagccccagacgaatagcaccaaaaacagtgcagccgccaccagccccaaagggacgcttcctcctgccgccctggagcctcaaaccaccgtcatccataacccagtggacgggattaaggagtcttctgacagtgccaataccaccatagaggatgaagacgctaaagcccggaagcaggagatcattaagaccacggagcagctcatcgaggccgtcaacaacggtgactttgaggcctacgcgaaaatctgtgacccagggctgacctcgtttgagcctgaagcactgggcaacctggttgaagggatggacttccacagattctacttcgagaacctgctggccaagaacagcaagccgatccacacgaccatcctgaacccacacgtgcacgtcattggagaggatgccgcctgcatcgcttacatccggctcacgcagtacattgacgggcagggccggccccgcaccagccagtctgaggagacccgcgtgtggcaccgccgcgacggcaagtggcagaacgtgcacttccactgctcgggcgcgcctgtggccccgctgcagtgaagagctgcgccctggtttcgccggacagagttggtgtttggagcccgactgccctcgggcacacggcctgcctgtcgcatgtttgtgtctgcctcgttccctcccctggtgcctgtgtctgcagaaaaacaagaccagatgtgatttgttaaaaaaaaacaaaaaaaaaaaaaaaaaaaacaagatgacgacgacaaccacaaaaaaaattgacatcagatgaaatgaaaaaaaaaaaaaacaaaaaaaactaaaggaaggaaaaagctgtaaaaatcactggcattcgtggggccactccccacccaagctccacgtgtgtccgtctgtgctcctggcctctgggggaccagctgggacatgaacttgtctgccaggcccccgtcgcgtgctgaacggtgttagtttgtaggtaacgcacacaccccacacctaaggtgtctgcatcctcctgccaacgcatgggctccacgtggtgtgctcgctggctgtcgtgactgtcagctgtctcttgggaggggctgtgggggcccgctgggctgcctcctttcccgctagttgtgcctgagagttgctgttgttcctgctttcccttcccttcctttcatcccctgaagggctaggtgtgggttttccgtgcccggtatccccacacacccagcacggacaacccttcggcagagcccaggccggcccctcaccccctggagtattgaaactggagtcccgtccccaaggccttcagagatgcccctacacacccagggctccagctctggtccttctgggggagtaaagtgcaaagaggggcacagcttagttttgggcctctcgccgagcaagagacagcactgctggctacagctccaacacagccagctgtggcaagaggactctgcctgggctggcccccctcctgtgtgaggtgtctgtcccttctctgctggccagcagcagatgcactggcagctcccaaccctgtttccgcccctcggccctcccccagcctgttcggcttctctgcagcccgcaagggggagcagacttttgacaaaggactgcgggcctcgctcaagtccctgagcccccagctgaagctgggaggggaggccaggctttgtgtctgggcatattcgtctgctgatggggtttggggaagcctggggcttggggtttggtcgggtggtgcagctagtggcagagcgggatcagaggtggtggctgcccagcttctgggctgagacaagggtctgtgcaggggtttactgaagtgggagtgcctttggaatctgggccgggagcagaagggagcaaaagctacagtgggagccagcctagggcacatgggaggcgtgagggcagtgctgcccgtgcagtgtcaggtgtgccagtgccttggcgggctgcagtgcgtgtgagggcaccttctaggtgggccagggatgcagctatggagataaggcgggctggggacagaaacaggtgggcacagggcccaggacaccagcggatggagggcagggtctagccctgtgctcctgagcgtcggctgcctgggttcgaggcggtgggtccccggccccttgtgatggtgtgtaccatgggggagctcggggacagggcaagcccgagcatggtggggctgcagggtgggtctgaagccaggttgggtgggggtggtcacaagccctgactgcagagggtcaggggctcctgccccagtgcctgcccactttcaattcacattgttttcaacaaggattttctttatcttcccctacaaatcaagccaagggaggggcacagaatggggaacaggacacaggatcctaaactccaaggggactgtccaccgatgaacactcagagtggacaccatcttccgtccacgctgtgcccaggacagctgtccccatccatgaacacagggtaaacatctgccgggctccgcaccagtggctccctgggccatgggacagcggcagggctcaccacggacagcacgtggcccagcagccggccaccctggcgtcctggggcctcctcccctcctctccctctcaccttgtcacctccacggagctgcctgtctgggataatttggggattttttttctgggggataattcttttgcatgacccctaaagagcaagccacaccggtctgctagctaggtgtccgcggtgtggtggtggcggccgctggccagcgctgcaaggggtcggctgcccacggtgctggctggcctcccctcctctctctttttgctgagtttcattgtcttttctttctgagccttgtaagtgtacaaaaattattcttattttgttctgtctcgggaaactgcaaataaaagaaaaacaggacaaactg

SEQ ID NO: 17023 - protein, 518 aa, Homo sapiens; identical to SEQ ID NO: 2002

SEQ ID NO: 17024 - DNA, 3960 bp, Homo sapiens
agcggcgcccgcgcctccccgcgcgtaggtgtgcggcgcgctcctggcgaggacggagcgagcagatctcgcgtgcgctcgccgcccggcgcagcccagcccggcccccgcctggcgccgcgagccgaggtgtctcccgcgcccgcgcccgtgtcgccgccgtgcccgcgagcgggagccggagtcgccgccgcccgagcgcagccgagcgcacgccgagcccgtccgccgccgccatggccaccacggtgacctgcacccgcttcaccgacgagtaccagctctacgaggatattggcaagggggctttctctgtggtccgacgctgtgtcaagctctgcaccggccatgagtatgcagccaagatcatcaacaccaagaagctgtcagccagagatcaccagaagctggagagagaggctcggatctgccgccttctgaagcattccaacatcgtgcgtctccacgacagcatctccgaggagggcttccactacctggtcttcgatctggtcactggtggggagctctttgaagacattgtggcgagagagtactacagcgaggctgatgccagtcactgtatccagcagatcctggaggccgttctccattgtcaccaaatgggggtcgtccacagagacctcaagccggagaacctgcttctggccagcaagtgcaaaggggctgcagtgaagctggcagacttcggcctagctatcgaggtgcagggggaccagcaggcatggtttggtttcgctggcacaccaggctacctgtcccctgaggtccttcgcaaagaggcgtatggcaagcctgtggacatctgggcatgtggggtgatcctgtacatcctgctcgtgggctacccacccttctgggacgaggaccagcacaagctgtaccagcagatcaaggctggtgcctatgacttcccgtcccctgagtgggacaccgtcactcctgaagccaaaaacctcatcaaccagatgctgaccatcaaccctgccaagcgcatcacagcccatgaggccctgaagcacccgtgggtctgccaacgctccacggtagcatccatgatgcacagacaggagactgtggagtgtctgaaaaagttcaatgccaggagaaagctcaagggagccatcctcaccaccatgctggccacacggaatttctcagcccggaagcaggagatcattaagaccacggagcagctcatcgaggccgtcaacaacggtgactttgaggcctacgcgaaaatctgtgacccagggctgacctcgtttgagcctgaagcactgggcaacctggttgaagggatggacttccacagattctacttcgagaacctgctggccaagaacagcaagccgatccacacgaccatcctgaacccacacgtgcacgtcattggagaggatgccgcctgcatcgcttacatccggctcacgcagtacattgacgggcagggccggccccgcaccagccagtctgaggagacccgcgtgtggcaccgccgcgacggcaagtggcagaacgtgcacttccactgctcgggcgcgcctgtggccccgctgcagtgaagagctgcgccctggtttcgccggacagagttggtgtttggagcccgactgccctcgggcacacggcctgcctgtcgcatgtttgtgtctgcctcgttccctcccctggtgcctgtgtctgcagaaaaacaagaccagatgtgatttgttaaaaaaaaacaaaaaaaaaaaaaaaaaaaacaagatgacgacgacaaccacaaaaaaaattgacatcagatgaaatgaaaaaaaaaaaaaacaaaaaaaactaaaggaaggaaaaagctgtaaaaatcactggcattcgtggggccactccccacccaagctccacgtgtgtccgtctgtgctcctggcctctgggggaccagctgggacatgaacttgtctgccaggcccccgtcgcgtgctgaacggtgttagtttgtaggtaacgcacacaccccacacctaaggtgtctgcatcctcctgccaacgcatgggctccacgtggtgtgctcgctggctgtcgtgactgtcagctgtctcttgggaggggctgtgggggcccgctgggctgcctcctttcccgctagttgtgcctgagagttgctgttgttcctgctttcccttcccttcctttcatcccctgaagggctaggtgtgggttttccgtgcccggtatccccacacacccagcacggacaacccttcggcagagcccaggccggcccctcaccccctggagtattgaaactggagtcccgtccccaaggccttcagagatgcccctacacacccagggctccagctctggtccttctgggggagtaaagtgcaaagaggggcacagcttagttttgggcctctcgccgagcaagagacagcactgctggctacagctccaacacagccagctgtggcaagaggactctgcctgggctggcccccctcctgtgtgaggtgtctgtcccttctctgctggccagcagcagatgcactggcagctcccaaccctgtttccgcccctcggccctcccccagcctgttcggcttctctgcagcccgcaagggggagcagacttttgacaaaggactgcgggcctcgctcaagtccctgagcccccagctgaagctgggaggggaggccaggctttgtgtctgggcatattcgtctgctgatggggtttggggaagcctggggcttggggtttggtcgggtggtgcagctagtggcagagcgggatcagaggtggtggctgcccagcttctgggctgagacaagggtctgtgcaggggtttactgaagtgggagtgcctttggaatctgggccgggagcagaagggagcaaaagctacagtgggagccagcctagggcacatgggaggcgtgagggcagtgctgcccgtgcagtgtcaggtgtgccagtgccttggcgggctgcagtgcgtgtgagggcaccttctaggtgggccagggatgcagctatggagataaggcgggctggggacagaaacaggtgggcacagggcccaggacaccagcggatggagggcagggtctagccctgtgctcctgagcgtcggctgcctgggttcgaggcggtgggtccccggccccttgtgatggtgtgtaccatgggggagctcggggacagggcaagcccgagcatggtggggctgcagggtgggtctgaagccaggttgggtgggggtggtcacaagccctgactgcagagggtcaggggctcctgccccagtgcctgcccactttcaattcacattgttttcaacaaggattttctttatcttcccctacaaatcaagccaagggaggggcacagaatggggaacaggacacaggatcctaaactccaaggggactgtccaccgatgaacactcagagtggacaccatcttccgtccacgctgtgcccaggacagctgtccccatccatgaacacagggtaaacatctgccgggctccgcaccagtggctccctgggccatgggacagcggcagggctcaccacggacagcacgtggcccagcagccggccaccctggcgtcctggggcctcctcccctcctctccctctcaccttgtcacctccacggagctgcctgtctgggataatttggggattttttttctgggggataattcttttgcatgacccctaaagagcaagccacaccggtctgctagctaggtgtccgcggtgtggtggtggcggccgctggccagcgctgcaaggggtcggctgcccacggtgctggctggcctcccctcctctctctttttgctgagtttcattgtcttttctttctgagccttgtaagtgtacaaaaattattcttattttgttctgtctcgggaaactgcaaataaaagaaaaacaggacaaactg

SEQ ID NO: 17025 - protein, 449 aa, Homo sapiens; identical to SEQ ID NO: 2012

SEQ ID NO: 17026 - DNA, 4089 bp, Homo sapiens
agcggcgcccgcgcctccccgcgcgtaggtgtgcggcgcgctcctggcgaggacggagcgagcagatctcgcgtgcgctcgccgcccggcgcagcccagcccggcccccgcctggcgccgcgagccgaggtgtctcccgcgcccgcgcccgtgtcgccgccgtgcccgcgagcgggagccggagtcgccgccgcccgagcgcagccgagcgcacgccgagcccgtccgccgccgccatggccaccacggtgacctgcacccgcttcaccgacgagtaccagctctacgaggatattggcaagggggctttctctgtggtccgacgctgtgtcaagctctgcaccggccatgagtatgcagccaagatcatcaacaccaagaagctgtcagccagagatcaccagaagctggagagagaggctcggatctgccgccttctgaagcattccaacatcgtgcgtctccacgacagcatctccgaggagggcttccactacctggtcttcgatctggtcactggtggggagctctttgaagacattgtggcgagagagtactacagcgaggctgatgccagtcactgtatccagcagatcctggaggccgttctccattgtcaccaaatgggggtcgtccacagagacctcaagccggagaacctgcttctggccagcaagtgcaaaggggctgcagtgaagctggcagacttcggcctagctatcgaggtgcagggggaccagcaggcatggtttggtttcgctggcacaccaggctacctgtcccctgaggtccttcgcaaagaggcgtatggcaagcctgtggacatctgggcatgtggggtgatcctgtacatcctgctcgtgggctacccacccttctgggacgaggaccagcacaagctgtaccagcagatcaaggctggtgcctatgacttcccgtcccctgagtgggacaccgtcactcctgaagccaaaaacctcatcaaccagatgctgaccatcaaccctgccaagcgcatcacagcccatgaggccctgaagcacccgtgggtctgccaacgctccacggtagcatccatgatgcacagacaggagactgtggagtgtctgaaaaagttcaatgccaggagaaagctcaagggagccatcctcaccaccatgctggccacacggaatttctcagtgggcagacagaccaccgctccggccacaatgtccaccgcggcctccggcaccaccatggggctggtggaacaagccaagagtttactcaacaagaaagcagatggagtcaaggagcctcaaaccaccgtcatccataacccagtggacgggattaaggagtcttctgacagtgccaataccaccatagaggatgaagacgctaaagcccggaagcaggagatcattaagaccacggagcagctcatcgaggccgtcaacaacggtgactttgaggcctacgcattctacttcgagaacctgctggccaagaacagcaagccgatccacacgaccatcctgaacccacacgtgcacgtcattggagaggatgccgcctgcatcgcttacatccggctcacgcagtacattgacgggcagggccggccccgcaccagccagtctgaggagacccgcgtgtggcaccgccgcgacggcaagtggcagaacgtgcacttccactgctcgggcgcgcctgtggccccgctgcagtgaagagctgcgccctggtttcgccggacagagttggtgtttggagcccgactgccctcgggcacacggcctgcctgtcgcatgtttgtgtctgcctcgttccctcccctggtgcctgtgtctgcagaaaaacaagaccagatgtgatttgttaaaaaaaaacaaaaaaaaaaaaaaaaaaaacaagatgacgacgacaaccacaaaaaaaattgacatcagatgaaatgaaaaaaaaaaaaaacaaaaaaaactaaaggaaggaaaaagctgtaaaaatcactggcattcgtggggccactccccacccaagctccacgtgtgtccgtctgtgctcctggcctctgggggaccagctgggacatgaacttgtctgccaggcccccgtcgcgtgctgaacggtgttagtttgtaggtaacgcacacaccccacacctaaggtgtctgcatcctcctgccaacgcatgggctccacgtggtgtgctcgctggctgtcgtgactgtcagctgtctcttgggaggggctgtgggggcccgctgggctgcctcctttcccgctagttgtgcctgagagttgctgttgttcctgctttcccttcccttcctttcatcccctgaagggctaggtgtgggttttccgtgcccggtatccccacacacccagcacggacaacccttcggcagagcccaggccggcccctcaccccctggagtattgaaactggagtcccgtccccaaggccttcagagatgcccctacacacccagggctccagctctggtccttctgggggagtaaagtgcaaagaggggcacagcttagttttgggcctctcgccgagcaagagacagcactgctggctacagctccaacacagccagctgtggcaagaggactctgcctgggctggcccccctcctgtgtgaggtgtctgtcccttctctgctggccagcagcagatgcactggcagctcccaaccctgtttccgcccctcggccctcccccagcctgttcggcttctctgcagcccgcaagggggagcagacttttgacaaaggactgcgggcctcgctcaagtccctgagcccccagctgaagctgggaggggaggccaggctttgtgtctgggcatattcgtctgctgatggggtttggggaagcctggggcttggggtttggtcgggtggtgcagctagtggcagagcgggatcagaggtggtggctgcccagcttctgggctgagacaagggtctgtgcaggggtttactgaagtgggagtgcctttggaatctgggccgggagcagaagggagcaaaagctacagtgggagccagcctagggcacatgggaggcgtgagggcagtgctgcccgtgcagtgtcaggtgtgccagtgccttggcgggctgcagtgcgtgtgagggcaccttctaggtgggccagggatgcagctatggagataaggcgggctggggacagaaacaggtgggcacagggcccaggacaccagcggatggagggcagggtctagccctgtgctcctgagcgtcggctgcctgggttcgaggcggtgggtccccggccccttgtgatggtgtgtaccatgggggagctcggggacagggcaagcccgagcatggtggggctgcagggtgggtctgaagccaggttgggtgggggtggtcacaagccctgactgcagagggtcaggggctcctgccccagtgcctgcccactttcaattcacattgttttcaacaaggattttctttatcttcccctacaaatcaagccaagggaggggcacagaatggggaacaggacacaggatcctaaactccaaggggactgtccaccgatgaacactcagagtggacaccatcttccgtccacgctgtgcccaggacagctgtccccatccatgaacacagggtaaacatctgccgggctccgcaccagtggctccctgggccatgggacagcggcagggctcaccacggacagcacgtggcccagcagccggccaccctggcgtcctggggcctcctcccctcctctccctctcaccttgtcacctccacggagctgcctgtctgggataatttggggattttttttctgggggataattcttttgcatgacccctaaagagcaagccacaccggtctgctagctaggtgtccgcggtgtggtggtggcggccgctggccagcgctgcaaggggtcggctgcccacggtgctggctggcctcccctcctctctctttttgctgagtttcattgtcttttctttctgagccttgtaagtgtacaaaaattattcttattttgttctgtctcgggaaactgcaaataaaagaaaaacaggacaaactg

SEQ ID NO: 17027 - protein, 492 aa, Homo sapiens; identical to SEQ ID NO: 2008

SEQ ID NO: 17028 - DNA, 4611 bp, Homo sapiens
agcggcgcccgcgcctccccgcgcgtaggtgtgcggcgcgctcctggcgaggacggagcgagcagatctcgcgtgcgctcgccgcccggcgcagcccagcccggcccccgcctggcgccgcgagccgaggtgtctcccgcgcccgcgcccgtgtcgccgccgtgcccgcgagcgggagccggagtcgccgccgcccgagcgcagccgagcgcacgccgagcccgtccgccgccgccatggccaccacggtgacctgcacccgcttcaccgacgagtaccagctctacgaggatattggcaagggggctttctctgtggtccgacgctgtgtcaagctctgcaccggccatgagtatgcagccaagatcatcaacaccaagaagctgtcagccagagatcaccagaagctggagagagaggctcggatctgccgccttctgaagcattccaacatcgtgcgtctccacgacagcatctccgaggagggcttccactacctggtcttcgatctggtcactggtggggagctctttgaagacattgtggcgagagagtactacagcgaggctgatgccagtcactgtatccagcagatcctggaggccgttctccattgtcaccaaatgggggtcgtccacagagacctcaagccggagaacctgcttctggccagcaagtgcaaaggggctgcagtgaagctggcagacttcggcctagctatcgaggtgcagggggaccagcaggcatggtttggtttcgctggcacaccaggctacctgtcccctgaggtccttcgcaaagaggcgtatggcaagcctgtggacatctgggcatgtggggtgatcctgtacatcctgctcgtgggctacccacccttctgggacgaggaccagcacaagctgtaccagcagatcaaggctggtgcctatgacttcccgtcccctgagtgggacaccgtcactcctgaagccaaaaacctcatcaaccagatgctgaccatcaaccctgccaagcgcatcacagcccatgaggccctgaagcacccgtgggtctgccaacgctccacggtagcatccatgatgcacagacaggagactgtggagtgtctgaaaaagttcaatgccaggagaaagctcaagggagccatcctcaccaccatgctggccacacggaatttctcagtgggcagacagaccaccgctccggccacaatgtccaccgcggcctccggcaccaccatggggctggtggaacaagccaagagtttactcaacaagaaagcagatggagtcaagccccagacgaatagcaccaaaaacagtgcagccgccaccagccccaaagggacgcttcctcctgccgccctggagcctcaaaccaccgtcatccataacccagtggacgggattaaggagtcttctgacagtgccaataccaccatagaggatgaagacgctaaagcccccagggtccccgacatcctgagctcagtgaggaggggctcgggagccccagaagccgaggggcccctgccctgcccatctccggctccctttagccccctgccagccccatcccccaggatctctgacatcctgaactctgtgagaaggggttcaggaaccccagaagccgagggccccctctcagcggggcccccgccctgcctgtctccggctctcctaggccccctgtcctccccgtcccccaggatctctgacatcctgaactctgtgaggaggggctcagggaccccagaagccgagggcccctcgccagtggggcccccgccctgcccatctccgactatccctggccccctgcccaccccatcccggaagcaggagatcattaagaccacggagcagctcatcgaggccgtcaacaacggtgactttgaggcctacgcgaaaatctgtgacccagggctgacctcgtttgagcctgaagcactgggcaacctggttgaagggatggacttccacagattctacttcgagaacctgctggccaagaacagcaagccgatccacacgaccatcctgaacccacacgtgcacgtcattggagaggatgccgcctgcatcgcttacatccggctcacgcagtacattgacgggcagggccggccccgcaccagccagtctgaggagacccgcgtgtggcaccgccgcgacggcaagtggcagaacgtgcacttccactgctcgggcgcgcctgtggccccgctgcagtgaagagctgcgccctggtttcgccggacagagttggtgtttggagcccgactgccctcgggcacacggcctgcctgtcgcatgtttgtgtctgcctcgttccctcccctggtgcctgtgtctgcagaaaaacaagaccagatgtgatttgttaaaaaaaaacaaaaaaaaaaaaaaaaaaaacaagatgacgacgacaaccacaaaaaaaattgacatcagatgaaatgaaaaaaaaaaaaaacaaaaaaaactaaaggaaggaaaaagctgtaaaaatcactggcattcgtggggccactccccacccaagctccacgtgtgtccgtctgtgctcctggcctctgggggaccagctgggacatgaacttgtctgccaggcccccgtcgcgtgctgaacggtgttagtttgtaggtaacgcacacaccccacacctaaggtgtctgcatcctcctgccaacgcatgggctccacgtggtgtgctcgctggctgtcgtgactgtcagctgtctcttgggaggggctgtgggggcccgctgggctgcctcctttcccgctagttgtgcctgagagttgctgttgttcctgctttcccttcccttcctttcatcccctgaagggctaggtgtgggttttccgtgcccggtatccccacacacccagcacggacaacccttcggcagagcccaggccggcccctcaccccctggagtattgaaactggagtcccgtccccaaggccttcagagatgcccctacacacccagggctccagctctggtccttctgggggagtaaagtgcaaagaggggcacagcttagttttgggcctctcgccgagcaagagacagcactgctggctacagctccaacacagccagctgtggcaagaggactctgcctgggctggcccccctcctgtgtgaggtgtctgtcccttctctgctggccagcagcagatgcactggcagctcccaaccctgtttccgcccctcggccctcccccagcctgttcggcttctctgcagcccgcaagggggagcagacttttgacaaaggactgcgggcctcgctcaagtccctgagcccccagctgaagctgggaggggaggccaggctttgtgtctgggcatattcgtctgctgatggggtttggggaagcctggggcttggggtttggtcgggtggtgcagctagtggcagagcgggatcagaggtggtggctgcccagcttctgggctgagacaagggtctgtgcaggggtttactgaagtgggagtgcctttggaatctgggccgggagcagaagggagcaaaagctacagtgggagccagcctagggcacatgggaggcgtgagggcagtgctgcccgtgcagtgtcaggtgtgccagtgccttggcgggctgcagtgcgtgtgagggcaccttctaggtgggccagggatgcagctatggagataaggcgggctggggacagaaacaggtgggcacagggcccaggacaccagcggatggagggcagggtctagccctgtgctcctgagcgtcggctgcctgggttcgaggcggtgggtccccggccccttgtgatggtgtgtaccatgggggagctcggggacagggcaagcccgagcatggtggggctgcagggtgggtctgaagccaggttgggtgggggtggtcacaagccctgactgcagagggtcaggggctcctgccccagtgcctgcccactttcaattcacattgttttcaacaaggattttctttatcttcccctacaaatcaagccaagggaggggcacagaatggggaacaggacacaggatcctaaactccaaggggactgtccaccgatgaacactcagagtggacaccatcttccgtccacgctgtgcccaggacagctgtccccatccatgaacacagggtaaacatctgccgggctccgcaccagtggctccctgggccatgggacagcggcagggctcaccacggacagcacgtggcccagcagccggccaccctggcgtcctggggcctcctcccctcctctccctctcaccttgtcacctccacggagctgcctgtctgggataatttggggattttttttctgggggataattcttttgcatgacccctaaagagcaagccacaccggtctgctagctaggtgtccgcggtgtggtggtggcggccgctggccagcgctgcaaggggtcggctgcccacggtgctggctggcctcccctcctctctctttttgctgagtttcattgtcttttctttctgagccttgtaagtgtacaaaaattattcttattttgttctgtctcgggaaactgcaaataaaagaaaaacaggacaaactg

SEQ ID NO: 17029 - protein, 666 aa, Homo sapiens; identical to SEQ ID NO: 1998

SEQ ID NO: 17030 - DNA, 2270 bp, Homo sapiens
cacctaataagccttatgctgttctcagggctaccctggtgcccaaaaagggtcagccactctgccagtttaggggagaaaacttctcacctgtccaaagcatagccttgctcctgcccggcctacccagctatgacactgtccctgagcagagatgagcacaggactttgggccctggatgccggagagtgggtgtttgtgtgattcccctgcagtctggaacaggccccaaaggcaacagcatgaaggctgtccagaggttctccatcaccctcagccgagtggggtgctgagcagtgagggaggggacctgggaggggggcccagcctggatcctgcaggggagaagagaagacagccagaagccagcagctgtggctcagatctgagcccgagcagcctctcgaggtggaggcagacaccccccaccccaccccgtgcagaaagaagccttgccagcctgccctgaggctggtacagagtccaggcaggctcagtggccatcatgcccctacgatgactgtcactccctctccgtgcgcctggcctctgctggctctggccaggggtggtcacagcactagggtggcagggtggcctctgactctgcgccagcctgcactggcctgtgctgccctggcctctgctggctctggctctggcaccggtcccgtgttggctccttcagccttcacatacctgctgcggccaccacaggcccaggacccccacaggtggccaccccacctccaccccaggagccccaggtatccagctgtcaccccctccctccctcctggcctccccctgtccttctccagttgccttcttttcctgcgggcgcaccacccacctgcctgcctcacctgttccgcctcagcccccagggtccccgacatcctgagctcagtgaggaggggctcgggagccccagaagccgaggggcccctgccctgcccatctccggctccctttagccccctgccagccccatgtaagtagcctgggtcctgctgctgtgggggtcatgttggagggctggcaaccccctagaggggccactccagagccgagggcaggctgagcgtggaccctggctccagcctcatcaccccacaatccctcactggggctttccagggtggccccagcccatcgagccccacctctttgtgaggagggccctggaccactttcctgctcaaggccactgggcaggatgggaggccctggaggctcgggcctcaattccagtcttcagggtcggtgcaggcctcactccacctcagcttgcgggcgggggggctccctgctattgaggcaggctctgattcagggcctgatcccagggcccaaggggtctagaacacgggacccctcccactggcctcctccgccttgccgccgcctcgtgtgtctgtctgcctcatgttcacgtctcatctgttccaccccagcccccaggatctctgacatcctgaactctgtgagaaggggttcaggaaccccagaagccgagggccccctctcagcggggcccccgccctgcctgtctccggctctcctaggccccctgtcctccccgtcccccaggatctctgacatcctgaactctgtgaggaggggctcagggaccccagaagccgagggcccctcgccagtggggcccccgccctgcccatctccgactatccctggccccctgcccaccccatcccggaagcaggagatcattaagaccacggagcagctcatcgaggccgtcaacaacggtgactttgaggcctacgcgaaaatctgtgacccagggctgacctcgtttgagcctgaagcactgggcaacctggttgaagggatggacttccacagattctacttcgagaacctgctggccaagaacagcaagccgatccacacgaccatcctgaacccacacgtgcacgtcattggagaggatgccgcctgcatcgcttacatccggctcacgcagtacattgacgggcagggccggccccgcaccagccagtctgaggagacccgcgtgtggcaccgccgcgacggcaagtggcagaacgtgcacttccactgctcgggcgcgcctgtggccccgctgcagtgaagagctgcgccctggtttcgccggacagagttggtgtttggagcccgactgccctcgggcacacggcctgcctgtcgcatgtttgtgtctgcctcgttccctcccctggtgcctgtgtctgcagaaaaacaagaccagatgtgatttgtt

SEQ ID NO: 17031 - protein, 299 aa, Homo sapiens
MGGPGGSGLNSSLQGRCRPHSTSACGRGGSLLLRQALIQGLIPGPKGSRTRDPSHWPPPPCRRLVCLSASCSRLICSTPAPRISDILNSVRRGSGTPEAEGPLSAGPPPCLSPALLGPLSSPSPRISDILNSVRRGSGTPEAEGPSPVGPPPCPSPTIPGPLPTPSRKQEIIKTTEQLIEAVNNGDFEAYAKICDPGLTSFEPEALGNLVEGMDFHRFYFENLLAKNSKPIHTTILNPHVHVIGEDAACIAYIRLTQYIDGQGRPRTSQSEETRVWHRRDGKWQNVHFHCSGAPVAPLQ

SEQ ID NO: 17032 - DNA, 4883 bp, Homo sapiens
ccggaagtggccagtcggcaggtctgaggcggcgctgtgtgtgtgaagcgtacctagggcgggaggcgacatggagacaggggcggccgagctgtatgaccaggcccttttgggcatcctgcagcacgtgggcaacgtccaggatttcctgcgcgttctctttggcttcctctaccgcaagacagacttctatcgcttgctgcgccacccatcggaccgcatgggcttcccgcccggggccgcgcaggccttggtgctgcaggtattcaaaacctttgaccacatggcccgtcaggatgatgagaagagaaggcaggaacttgaagagaaaatcagaagaaaggaagaggaagaggccaagactgtgtcagctgctgcagctgagaaggagccagtcccagttccagtccaggaaatagagattgactccaccacagaattggatgggcatcaggaagtagagaaagtgcagcctccaggccctgtgaaggaaatggcccatggttcacaggaggcagaagctccaggagcagttgctggtgctgctgaagtccctagggaaccaccaattcttcccaggattcaggagcagttccagaaaaatcccgacagttacaatggtgctgtccgagagaactacacctggtcacaggactatactgacctggaggtcagggtgccagtacccaagcacgtggtgaagggaaagcaggtctcagtggcccttagcagcagctccattcgtgtggccatgctggaggaaaatggggagcgcgtcctcatggaagggaagctcacccacaagatcaacactgagagttctctctggagtctcgagcccgggaagtgcgttttggtgaacctgagcaaggtgggcgagtattggtggaacgccatcctggagggagaagagcccatcgacattgacaagatcaacaaggagcgctccatggccaccgtggatgaggaggaacaggcggtgttggacaggcttacctttgactaccaccagaagctgcagggcaagccacagagccatgagctgaaagtccatgagatgctgaagaaggggtgggatgctgaaggttctcccttccgaggccagcgattcgaccctgccatgttcaacatctccccgggggctgtgcagttttaatgaccagaaggaaaggaaaccctcgccggtggggaggcagagccttatcctcggctgcccttcttggctccctgcattccagggacttgctcgtcttgtttacccctagccatcctttctttcaagggtgaaccaggccttccaccctgaccttgcatctccagactgttccagagaaggtgcggggccagctgctatgtggtggccgctgtggctgacactgagtgaaggtgtttgaaatgcaggagaggatatcccagcaaattgggatcacatgcttttgtctccacagcaaccagccactgcaggcagcatgtctttcctcccctgctctctgcttgctgttgttttgacgctattctgcttgcatgtcttctggttgggatgtggagttgttgctggactctcaggcgaagctgaagtcattgaagtgtgtgaagctctgtgcttgcatgagggcaagcaaggaatggctgtgcctgaggctgctctgggaaactccttgccccttgacctcttttgagagcattcacgtggtcttcttgctcatccccttataaatgtgctttgcctgcctcagcctcatggtcagagcagtggagactggagccctgtttgcacgttctagttgttcggagaaagcctaggttctgggctcaggtccagatgcagcggggattctgttctctgactgtggcgaccttgctttggttcttgttgaagtgaaccaagcccggccaccacgcatggcatgctgtgcttggctccccataagacgtcctctttgggtgcacggtgtcaaagtgtgggcaggagtggagagctggtgccctcaggaggagaccacagcatgtccatcagctcagcagagctcgacagccacaagtcctgagaagctttgaccttgaagggcttctgggagaggaggaatttctgcatggggcgtgaaggcacactgtcccaccacaactgaaccagaagagagtgaagactcccctcttcccatcctctgtgccaggtgccagactgtgctccttggaacttatggcccaatcttacctgttctccagggactggtcactgcctcaggacccccaagcctatgccctgagccatggctgctgactgactccagccaaggtgcaaagacgagattatgagacaggtcctcaggcctgtgttccaagtactcacaggggctctgggtgcccatcgccgggagtatggttcagctgccaccggcactgtccatttgcctgtctgtcaagctcagagcatggataagccacacagcagggcagtgcaccctggcaccatgcacggccagcaagaatcaaggcccgcagatgctaagagggcctattgtcaggggaaggtccccgctcctgcacactctctatggatacttgggttgtgggggctctcttggagagtaagtttgtggtttgtttctggtttacagtggtggctgacaccccttgtaagaaagcattcctgggaagtcttctgtgggtccaaacatgttgctccgatcatcacaggagagcaaaaggccctagataccccctttggaatgtgagagtcttgttgtctgatatttgccactgagctggtgaagcccctctaaagagatctcgaccctggggagcagaattcttgtcatctatgaggggtcctgagaaagacttgtcattttttttcctggagttcttcccattgaggtcctaggatttgcacaccactgtcccacaagagctttcctgcctaatgaaaggaggtcttgtggtgtgtgtctcctctcttctctatagttcccgagttggcccccattgcagcccccaccctgtgggtagtcttccagaagtgatgcagtggtgtgagatgccctacaccttgttatttgggagactttgagagtcattcacttccatggtgactagtgtttgttttgcctgattttatattctgtgttgcatttctccccactccctgccctgctttaataaacagcaaaccaatatctaggaagaatgactgagggatagtattgggtattggccccatggcaggaacagccacttgcatctggtcccggtgccacactgcggtgcttggtgtggttgtggagcctgtccctgcgcgccttgctcccgttgagccacgctgtctggtgggtgattctctgccctgagccaccaccctggactggcccagtctccagagctggcacaccctgcctgttttctctttttagacacaacagccgcagtttggccagccactaagtcccaccagctgaggtccgaggaaagcggggtgactcatttcccttgtccagggcccgaggagagtgaggtgtccagcctgcaaagctattccagctccttggtgttggtttgcaataaattggtatttaagcagttctgggtctgcgtgtgacatttgctgctgagacagttctgtctgtgcatggtcattattgttgcattctagccttgaggtcccaggccaacgtacacagcaaacaccagcatggggaattcttaggggttgtttcccatctggtctgaatgcactgggcaagatctcaatacagctttagaaatcctgtaagattttgaccagtggggagaaaaagaatgtagctatagatcttacatcctttcaaacaggttctggaattctgtagttactggaaagcttagggtgagtgcagagttgggaatgattccactgaagggccacctttgcccaccaggctccaaggccctccttggtctccaggtgcatacctgctgttaactttgctgagccctcgcaatgggcttcctccaggacataacgccgtgtctgacacagaagtctcccaggtggctggccacctgcttcttcctcagtcagatctttgactctccttctctgtgcccaccccatctccagcctcctctgaccctgctcacccctggggacaggacctaggggtgtgagaagtacttggctgaataaagactgtttcaaaggcaatccttagaattgcctagcatactcccagggccagaaataacccgccagaaaggagaggcgtatttgcccctgaagagtgcaggagggagaacagttgagaagtgttttgtgtggaaatgtgtccaagaggcgtcagctgctgcacagagaactcactgcccagaacactgcgcttggggaacagacctcacccccacctcaaatctgctctccactgggcctgttggcagccagctcagctggggaagggacagcatgactcgctttgtcgatgaaaagcacgaagttgtcagcacagaacctggccagtccttgagaaactccctccttggtggtcagaggtcaagcagcccatgtggcccacggtcctgaagaactgggctatgtccctgaggctcctctctaccgtctgactgtggggtctggggaacaggcatttaaaccaggctgctgccctggggagtgcccactggacgccagggtgccccatagggacagggtcacaaagccctggggcttcccctgccagtcctggtgaggacagtgtggtcactatctcagagagacgaaaaatgaatattctgtcatttcagactaaactactcacccagctcacactaatatggatttgttaattttacctttttttttctttccaactttaggttcaagggttgttacatgggtaaattggatcataggg

SEQ ID NO: 17033 - protein, 361 aa, Homo sapiens
METGAAELYDQALLGILQHVGNVQDFLRVLFGFLYRKTDFYRLLRHPSDRMGFPPGAAQALVLQVFKTFDHMARQDDEKRRQELEEKIRRKEEEEAKTVSAAAAEKEPVPVPVQEIEIDSTTELDGHQEVEKVQPPGPVKEMAHGSQEAEAPGAVAGAAEVPREPPILPRIQEQFQKNPDSYNGAVRENYTWSQDYTDLEVRVPVPKHVVKGKQVSVALSSSSIRVAMLEENGERVLMEGKLTHKINTESSLWSLEPGKCVLVNLSKVGEYWWNAILEGEEPIDIDKINKERSMATVDEEEQAVLDRLTFDYHQKLQGKPQSHELKVHEMLKKGWDAEGSPFRGQRFDPAMFNISPGAVQF

SEQ ID NO: 17034 - DNA, 2870 bp, Homo sapiens
ctggagggagaagagcccatcgacattgacaagatcaacaaggagcgctccatggccaccgtggatgaggaggaacaggcggtgttggacaggcttacctttgactaccaccagaagctgcagggcaagccacagagccatgagctgaaagtccatgagatgctgaagaaggggtgggatgctgaaggttctcccttccgaggccagcgattcgaccctgccatgttcaacatctccccgggggctgtgcagttttaatgaccagaaggaaaggaaaccctcgccggtggggaggcagagccttatcctcggctgcccttcttggctccctgcattccagggacttgctcgtcttgtttacccctagccatcctttctttcaagggtgaaccaggccttccaccctgaccttgcatctccagactgttccagagaaggtgcggggccagctgctatgtggtggccgctgtggctgacactgagtgaaggtgtttgaaatgcaggagaggatatcccagcaaattgggatcacatgcttttgtctccacagcaaccagccactgcaggcagcatgtctttcctcccctgctctctgcttgctgttgttttgacgctattctgcttgcatgtcttctggttgggatgtggagttgttgctggactctcaggcgaagctgaagtcattgaagtgtgtgaagctctgtgcttgcatgagggcaagcaaggaatggctgtgcctgaggctgctctgggaaactccttgccccttgacctcttttgagagcattcacgtggtcttcttgctcatccccttataaatgtgctttgcctgcctcagcctcatggtcagagcagtggagactggagccctgtttgcacgttctagttgttcggagaaagcctaggttctgggctcaggtccagatgcagcggggattctgttctctgactgtggcgaccttgctttggttcttgttgaagtgaaccaagcccggccaccacgcatggcatgctgtgcttggctccccataagacgtcctctttgggtgcacggtgtcaaagtgtgggcaggagtggagagctggtgccctcaggaggagaccacagcatgtccatcagctcagcagagctcgacagccacaagtcctgagaagctttgaccttgaagggcttctgggagaggaggaatttctgcatggggcgtgaaggcacactgtcccaccacaactgaaccagaagagagtgaagactcccctcttcccatcctctgtgccaggtgccagactgtgctccttggaacttatggcccaatcttacctgttctccagggactggtcactgcctcaggacccccaagcctatgccctgagccatggctgctgactgactccagccaaggtgcaaagacgagattatgagacaggtcctcaggcctgtgttccaagtactcacaggggctctgggtgcccatcgccgggagtatggttcagctgccaccggcactgtccatttgcctgtctgtcaagctcagagcatggataagccacacagcagggcagtgcaccctggcaccatgcacggccagcaagaatcaaggcccgcagatgctaagagggcctattgtcaggggaaggtccccgctcctgcacactctctatggatacttgggttgtgggggctctcttggagagtaagtttgtggtttgtttctggtttacagtggtggctgacaccccttgtaagaaagcattcctgggaagtcttctgtgggtccaaacatgttgctccgatcatcacaggagagcaaaaggccctagataccccctttggaatgtgagagtcttgttgtctgatatttgccactgagctggtgaagcccctctaaagagatctcgaccctggggagcagaattcttgtcatctatgaggggtcctgagaaagacttgtcattttttttcctggagttcttcccattgaggtcctaggatttgcacaccactgtcccacaagagctttcctgcctaatgaaaggaggtcttgtggtgtgtgtctcctctcttctctatagttcccgagttggcccccattgcagcccccaccctgtgggtagtcttccagaagtgatgcagtggtgtgagatgccctacaccttgttatttgggagactttgagagtcattcacttccatggtgactagtgtttgttttgcctgattttatattctgtgttgcatttctccccactccctgccctgctttaataaacagcaaaccaatatctaggaagaatgactgagggatagtattgggtattggccccatggcaggaacagccacttgcatctggtcccggtgccacactgcggtgcttggtgtggttgtggagcctgtccctgcgcgccttgctcccgttgagccacgctgtctggtgggtgattctctgccctgagccaccaccctggactggcccagtctccagagctggcacaccctgcctgttttctctttttagacacaacagccgcagtttggccagccactaagtcccaccagctgaggtccgaggaaagcggggtgactcatttcccttgtccagggcccgaggagagtgaggtgtccagcctgcaaagctattccagctccttggtgttggtttgcaataaattggtatttaagcagttctgggtctgcgtgtgacatttgctgctgagacagttctgtctgtgcatggtcattattgttgcattctagccttgaggtcccaggccaacgtacacagcaaacaccagcatggggaattcttaggggttgtttcccatctggtctgaatgcactgggcaagatctcaatacagctttagaaatcctgta

SEQ ID NO: 17035 - protein, 68 aa, Homo sapiens [sequence omitted]

SEQ ID NO: 17036 - DNA, 2017 bp, Homo sapiens
gaagtggggacagggcatggtgccctgtcatggggtgaggactccccaggagattctgtcatgcattaggctgagccctaagtctcataggtcccagcttacccctaagatagcagaatgttggatgttgctcttggaagcaagagagatcactggagaggtagttggttgataagagctaagcagagccttccatggcaagcatgggggcaggctgggttggcccaggacaggtcctggtgtgggggggtgtcatgggtcttggaaaatagcctttcttcatgagagtgggcaaggtgtgcacatggaacaggcactgtcctgagtatccaggacctgctgaagaaggataaaggcatcttccagaatgtcagtcccctcaggtatgtgcctcctagctcttccctgggatatgttagcacaggcagcaaatgcattcccaggcacagagggtcctgccttgggttctggcaccccctcttgtctgtcacctccctttgtgtagttggtccctgagccatggctgctgactgactccagccaaggtgcaaagacgagattatgagacaggtcctcaggcctgtgttccaagtactcacaggggctctgggtgcccatcgccgggagtatggttcagctgccaccggcactgtccatttgcctgtctgtcaagctcagagcatggataagccacacagcagggcagtgcaccctggcaccatgcacggccagcaagaatcaaggcccgcagatgctaagagggcctattgtcaggggaaggtccccgctcctgcacactctctatggatacttgggttgtgggggctctcttggagagtaagtttgtggtttgtttctggtttacagtggtggctgacaccccttgtaagaaagcattcctgggaagtcttctgtgggtccaaacatgttgctccgatcatcacaggagagcaaaaggccctagataccccctttggaatgtgagagtcttgttgtctgatatttgccactgagctggtgaagcccctctaaagagatctcgaccctggggagcagaattcttgtcatctatgaggggtcctgagaaagacttgtcattttttttcctggagttcttcccattgaggtcctaggatttgcacaccactgtcccacaagagctttcctgcctaatgaaaggaggtcttgtggtgtgtgtctcctctcttctctatagttcccgagttggcccccattgcagcccccaccctgtgggtagtcttccagaagtgatgcagtggtgtgagatgccctacaccttgttatttgggagactttgagagtcattcacttccatggtgactagtgtttgttttgcctgattttatattctgtgttgcatttctccccactccctgccctgctttaataaacagcaaaccaatatctaggaagaatgactgagggatagtattgggtattggccccatggcaggaacagccacttgcatctggtcccggtgccacactgcggtgcttggtgtggttgtggagcctgtccctgcgcgccttgctcccgttgagccacgctgtctggtgggtgattctctgccctgagccaccaccctggactggcccagtctccagagctggcacaccctgcctgttttctctttttagacacaacagccgcagtttggccagccactaagtcccaccagctgaggtccgaggaaagcggggtgactcatttcccttgtccagggcccgaggagagtgaggtgtccagcctgcaaagctattccagctccttggtgttggtttgcaataaattggtatttaagcagttctgggtctgcgtgtgacatttgctgctgagacagttctgtctgtgcatggtcattattgttgcattctagccttgaggtcccaggccaacgtacacagcaaacaccagcatggggaattcttaggggttgtttcccatctggtctgaatgcactgggcaagatctcaatacagctttagaaatcctgta

SEQ ID NO: 17037 - protein, 32 aa, Homo sapiens
MHSQAQRVLPWVLAPPLVCHLPLCSWSLSHGC

SEQ ID NO: 17038 - DNA, 3356 bp, Homo sapiens
ccagcagttcagttcctcatcctttgaccccagacatataaagcctgtgcattatgacacagcctggagccttttcccaagctataggctcctgtgactactaccagttcctttcctttatgtcatacttgactttgcagatgccattacggcctctccctcacttgagcttcacgtggttgtggaggtatgagagcatgagtgatgcactagtagtactggggccggctagcttgccctctgaaggtgcagccctggccgcctgtattacactagtgagcccgtgatcctggggttgccatctccatggactgagaggtcgtgatagccctgccttaaaacactggccttgactctcctgccttccgttgggtgaactcagtgcagatcatggagcaggtcacgatgctctcaagttggttccctctgagcgaggagctcttggtgaacctgagcaaggtgggcgagtattggtggaacgccatcctggagggagaagagcccatcgacattgacaagatcaacaaggagcgctccatggccaccgtggatgaggaggaacaggcggtgttggacaggcttacctttgactaccaccagaagctgcagggcaagccacagagccatgagctgaaagtccatgagatgctgaagaaggggtgggatgctgaaggttctcccttccgaggccagcgattcgaccctgccatgttcaacatctccccgggggctgtgcagttttaatgaccagaaggaaaggaaaccctcgccggtggggaggcagagccttatcctcggctgcccttcttggctccctgcattccagggacttgctcgtcttgtttacccctagccatcctttctttcaagggtgaaccaggccttccaccctgaccttgcatctccagactgttccagagaaggtgcggggccagctgctatgtggtggccgctgtggctgacactgagtgaaggtgtttgaaatgcaggagaggatatcccagcaaattgggatcacatgcttttgtctccacagcaaccagccactgcaggcagcatgtctttcctcccctgctctctgcttgctgttgttttgacgctattctgcttgcatgtcttctggttgggatgtggagttgttgctggactctcaggcgaagctgaagtcattgaagtgtgtgaagctctgtgcttgcatgagggcaagcaaggaatggctgtgcctgaggctgctctgggaaactccttgccccttgacctcttttgagagcattcacgtggtcttcttgctcatccccttataaatgtgctttgcctgcctcagcctcatggtcagagcagtggagactggagccctgtttgcacgttctagttgttcggagaaagcctaggttctgggctcaggtccagatgcagcggggattctgttctctgactgtggcgaccttgctttggttcttgttgaagtgaaccaagcccggccaccacgcatggcatgctgtgcttggctccccataagacgtcctctttgggtgcacggtgtcaaagtgtgggcaggagtggagagctggtgccctcaggaggagaccacagcatgtccatcagctcagcagagctcgacagccacaagtcctgagaagctttgaccttgaagggcttctgggagaggaggaatttctgcatggggcgtgaaggcacactgtcccaccacaactgaaccagaagagagtgaagactcccctcttcccatcctctgtgccaggtgccagactgtgctccttggaacttatggcccaatcttacctgttctccagggactggtcactgcctcaggacccccaagcctatgccctgagccatggctgctgactgactccagccaaggtgcaaagacgagattatgagacaggtcctcaggcctgtgttccaagtactcacaggggctctgggtgcccatcgccgggagtatggttcagctgccaccggcactgtccatttgcctgtctgtcaagctcagagcatggataagccacacagcagggcagtgcaccctggcaccatgcacggccagcaagaatcaaggcccgcagatgctaagagggcctattgtcaggggaaggtccccgctcctgcacactctctatggatacttgggttgtgggggctctcttggagagtaagtttgtggtttgtttctggtttacagtggtggctgacaccccttgtaagaaagcattcctgggaagtcttctgtgggtccaaacatgttgctccgatcatcacaggagagcaaaaggccctagataccccctttggaatgtgagagtcttgttgtctgatatttgccactgagctggtgaagcccctctaaagagatctcgaccctggggagcagaattcttgtcatctatgaggggtcctgagaaagacttgtcattttttttcctggagttcttcccattgaggtcctaggatttgcacaccactgtcccacaagagctttcctgcctaatgaaaggaggtcttgtggtgtgtgtctcctctcttctctatagttcccgagttggcccccattgcagcccccaccctgtgggtagtcttccagaagtgatgcagtggtgtgagatgccctacaccttgttatttgggagactttgagagtcattcacttccatggtgactagtgtttgttttgcctgattttatattctgtgttgcatttctccccactccctgccctgctttaataaacagcaaaccaatatctaggaagaatgactgagggatagtattgggtattggccccatggcaggaacagccacttgcatctggtcccggtgccacactgcggtgcttggtgtggttgtggagcctgtccctgcgcgccttgctcccgttgagccacgctgtctggtgggtgattctctgccctgagccaccaccctggactggcccagtctccagagctggcacaccctgcctgttttctctttttagacacaacagccgcagtttggccagccactaagtcccaccagctgaggtccgaggaaagcggggtgactcatttcccttgtccagggcccgaggagagtgaggtgtccagcctgcaaagctattccagctccttggtgttggtttgcaataaattggtatttaagcagttctgggtctgcgtgtgacatttgctgctgagacagttctgtctgtgcatggtcattattgttgcattctagccttgaggtcccaggccaacgtacacagcaaacaccagcatggggaattcttaggggttgtttcccatctggtctgaatgcactgggcaagatctcaatacagctttagaaatcctgta

SEQ ID NO: 17039 - protein, 117 aa, Homo sapiens
MEQVTMLSSWFPLSEELLVNLSKVGEYWWNAILEGEEPIDIDKINKERSMATVDEEEQAVLDRLTFDYHQKLQGKPQSHELKVHEMLKKGWDAEGSPFRGQRFDPAMFNISPGAVQF

SEQ ID NO: 17040 - DNA, 3107 bp, Homo sapiens
acttgagtttcaaacactaaagtttctgaaacctccatctaatgagtttaagtctcagtggcccttagcagcagctccattcgtgtggccatgctggaggaaaatggggagcgcgtcctcatggaagggaagctcacccacaagatcaacactgagagttctctctggagtctcgagcccgggaagtgcgttttggtgaacctgagcaaggtgggcgagtattggtggaacgccatcctggagggagaagagcccatcgacattgacaagatcaacaaggagcgctccatggccaccgtggatgaggaggaacaggcggtgttggacaggcttacctttgactaccaccagaagctgcagggcaagccacagagccatgagctgaaagtccatgagatgctgaagaaggggtgggatgctgaaggttctcccttccgaggccagcgattcgaccctgccatgttcaacatctccccgggggctgtgcagttttaatgaccagaaggaaaggaaaccctcgccggtggggaggcagagccttatcctcggctgcccttcttggctccctgcattccagggacttgctcgtcttgtttacccctagccatcctttctttcaagggtgaaccaggccttccaccctgaccttgcatctccagactgttccagagaaggtgcggggccagctgctatgtggtggccgctgtggctgacactgagtgaaggtgtttgaaatgcaggagaggatatcccagcaaattgggatcacatgcttttgtctccacagcaaccagccactgcaggcagcatgtctttcctcccctgctctctgcttgctgttgttttgacgctattctgcttgcatgtcttctggttgggatgtggagttgttgctggactctcaggcgaagctgaagtcattgaagtgtgtgaagctctgtgcttgcatgagggcaagcaaggaatggctgtgcctgaggctgctctgggaaactccttgccccttgacctcttttgagagcattcacgtggtcttcttgctcatccccttataaatgtgctttgcctgcctcagcctcatggtcagagcagtggagactggagccctgtttgcacgttctagttgttcggagaaagcctaggttctgggctcaggtccagatgcagcggggattctgttctctgactgtggcgaccttgctttggttcttgttgaagtgaaccaagcccggccaccacgcatggcatgctgtgcttggctccccataagacgtcctctttgggtgcacggtgtcaaagtgtgggcaggagtggagagctggtgccctcaggaggagaccacagcatgtccatcagctcagcagagctcgacagccacaagtcctgagaagctttgaccttgaagggcttctgggagaggaggaatttctgcatggggcgtgaaggcacactgtcccaccacaactgaaccagaagagagtgaagactcccctcttcccatcctctgtgccaggtgccagactgtgctccttggaacttatggcccaatcttacctgttctccagggactggtcactgcctcaggacccccaagcctatgccctgagccatggctgctgactgactccagccaaggtgcaaagacgagattatgagacaggtcctcaggcctgtgttccaagtactcacaggggctctgggtgcccatcgccgggagtatggttcagctgccaccggcactgtccatttgcctgtctgtcaagctcagagcatggataagccacacagcagggcagtgcaccctggcaccatgcacggccagcaagaatcaaggcccgcagatgctaagagggcctattgtcaggggaaggtccccgctcctgcacactctctatggatacttgggttgtgggggctctcttggagagtaagtttgtggtttgtttctggtttacagtggtggctgacaccccttgtaagaaagcattcctgggaagtcttctgtgggtccaaacatgttgctccgatcatcacaggagagcaaaaggccctagataccccctttggaatgtgagagtcttgttgtctgatatttgccactgagctggtgaagcccctctaaagagatctcgaccctggggagcagaattcttgtcatctatgaggggtcctgagaaagacttgtcattttttttcctggagttcttcccattgaggtcctaggatttgcacaccactgtcccacaagagctttcctgcctaatgaaaggaggtcttgtggtgtgtgtctcctctcttctctatagttcccgagttggcccccattgcagcccccaccctgtgggtagtcttccagaagtgatgcagtggtgtgagatgccctacaccttgttatttgggagactttgagagtcattcacttccatggtgactagtgtttgttttgcctgattttatattctgtgttgcatttctccccactccctgccctgctttaataaacagcaaaccaatatctaggaagaatgactgagggatagtattgggtattggccccatggcaggaacagccacttgcatctggtcccggtgccacactgcggtgcttggtgtggttgtggagcctgtccctgcgcgccttgctcccgttgagccacgctgtctggtgggtgattctctgccctgagccaccaccctggactggcccagtctccagagctggcacaccctgcctgttttctctttttagacacaacagccgcagtttggccagccactaagtcccaccagctgaggtccgaggaaagcggggtgactcatttcccttgtccagggcccgaggagagtgaggtgtccagcctgcaaagctattccagctccttggtgttggtttgcaataaattggtatttaagcagttctgggtctgcgtgtgacatttgctgctgagacagttctgtctgtgcatggtcattattgttgcattctagccttgaggtcccaggccaacgtacacagcaaacaccagcatggggaattcttaggggttgtttcccatctggtctgaatgcactgggcaagatctcaatacagctttagaaatcctgta

SEQ ID NO: 17041 - protein, 134 aa, Homo sapiens [sequence omitted]

SEQ ID NO: 17042 - DNA, 1067 bp, Homo sapiens
ggcgctgtgtgtgtgaagcgtacctagggcgggaggcgacatggagacaggggcggccgagctgtatgaccagcccctctaaagagatctcgaccctggggagcagaattcttgtcatctatgaggggtcctgagaaagacttgtcattttttttcctggagttcttcccattgaggtcctaggatttgcacaccactgtcccacaagagctttcctgcctaatgaaaggaggtcttgtggtgtgtgtctcctctcttctctatagttcccgagttggcccccattgcagcccccaccctgtgggtagtcttccagaagtgatgcagtggtgtgagatgccctacaccttgttatttgggagactttgagagtcattcacttccatggtgactagtgtttgttttgcctgattttatattctgtgttgcatttctccccactccctgccctgctttaataaacagcaaaccaatatctaggaagaatgactgagggatagtattgggtattggccccatggcaggaacagccacttgcatctggtcccggtgccacactgcggtgcttggtgtggttgtggagcctgtccctgcgcgccttgctcccgttgagccacgctgtctggtgggtgattctctgccctgagccaccaccctggactggcccagtctccagagctggcacaccctgcctgttttctctttttagacacaacagccgcagtttggccagccactaagtcccaccagctgaggtccgaggaaagcggggtgactcatttcccttgtccagggcccgaggagagtgaggtgtccagcctgcaaagctattccagctccttggtgttggtttgcaataaattggtatttaagcagttctgggtctgcgtgtgacatttgctgctgagacagttctgtctgtgcatggtcattattgttgcattctagccttgaggtcccaggccaacgtacacagcaaacaccagcatggggaattcttaggggttgtttcccatctggtctgaatgcactgggcaagatctcaatacagctttagaaatcctgta

SEQ ID NO: 17043 - protein, 48 aa, Homo sapiens [sequence omitted]

SEQ ID NO: 17044 - DNA, 2657 bp, Homo sapiens
agtcggcaggtctgaggcggcgctgtgtgtgtgaagcgtacctagggcgggaggcgaaaggaaaccctcgccggtggggaggcagagccttatcctcggctgcccttcttggctccctgcattccagggacttgctcgtcttgtttacccctagccatcctttctttcaagggtgaaccaggccttccaccctgaccttgcatctccagactgttccagagaaggtgcggggccagctgctatgtggtggccgctgtggctgacactgagtgaaggtgtttgaaatgcaggagaggatatcccagcaaattgggatcacatgcttttgtctccacagcaaccagccactgcaggcagcatgtctttcctcccctgctctctgcttgctgttgttttgacgctattctgcttgcatgtcttctggttgggatgtggagttgttgctggactctcaggcgaagctgaagtcattgaagtgtgtgaagctctgtgcttgcatgagggcaagcaaggaatggctgtgcctgaggctgctctgggaaactccttgccccttgacctcttttgagagcattcacgtggtcttcttgctcatccccttataaatgtgctttgcctgcctcagcctcatggtcagagcagtggagactggagccctgtttgcacgttctagttgttcggagaaagcctaggttctgggctcaggtccagatgcagcggggattctgttctctgactgtggcgaccttgctttggttcttgttgaagtgaaccaagcccggccaccacgcatggcatgctgtgcttggctccccataagacgtcctctttgggtgcacggtgtcaaagtgtgggcaggagtggagagctggtgccctcaggaggagaccacagcatgtccatcagctcagcagagctcgacagccacaagtcctgagaagctttgaccttgaagggcttctgggagaggaggaatttctgcatggggcgtgaaggcacactgtcccaccacaactgaaccagaagagagtgaagactcccctcttcccatcctctgtgccaggtgccagactgtgctccttggaacttatggcccaatcttacctgttctccagggactggtcactgcctcaggacccccaagcctatgccctgagccatggctgctgactgactccagccaaggtgcaaagacgagattatgagacaggtcctcaggcctgtgttccaagtactcacaggggctctgggtgcccatcgccgggagtatggttcagctgccaccggcactgtccatttgcctgtctgtcaagctcagagcatggataagccacacagcagggcagtgcaccctggcaccatgcacggccagcaagaatcaaggcccgcagatgctaagagggcctattgtcaggggaaggtccccgctcctgcacactctctatggatacttgggttgtgggggctctcttggagagtaagtttgtggtttgtttctggtttacagtggtggctgacaccccttgtaagaaagcattcctgggaagtcttctgtgggtccaaacatgttgctccgatcatcacaggagagcaaaaggccctagataccccctttggaatgtgagagtcttgttgtctgatatttgccactgagctggtgaagcccctctaaagagatctcgaccctggggagcagaattcttgtcatctatgaggggtcctgagaaagacttgtcattttttttcctggagttcttcccattgaggtcctaggatttgcacaccactgtcccacaagagctttcctgcctaatgaaaggaggtcttgtggtgtgtgtctcctctcttctctatagttcccgagttggcccccattgcagcccccaccctgtgggtagtcttccagaagtgatgcagtggtgtgagatgccctacaccttgttatttgggagactttgagagtcattcacttccatggtgactagtgtttgttttgcctgattttatattctgtgttgcatttctccccactccctgccctgctttaataaacagcaaaccaatatctaggaagaatgactgagggatagtattgggtattggccccatggcaggaacagccacttgcatctggtcccggtgccacactgcggtgcttggtgtggttgtggagcctgtccctgcgcgccttgctcccgttgagccacgctgtctggtgggtgattctctgccctgagccaccaccctggactggcccagtctccagagctggcacaccctgcctgttttctctttttagacacaacagccgcagtttggccagccactaagtcccaccagctgaggtccgaggaaagcggggtgactcatttcccttgtccagggcccgaggagagtgaggtgtccagcctgcaaagctattccagctccttggtgttggtttgcaataaattggtatttaagcagttctgggtctgcgtgtgacatttgctgctgagacagttctgtctgtgcatggtcattattgttgcattctagccttgaggtcccaggccaacgtacacagcaaacaccagcatggggaattcttaggggttgtttcccatctggtctgaatgcactgggcaagatctcaatacagctttagaaatcctgta

SEQ ID NO: 17045 - protein, 140 aa, Homo sapiens
MRQVLRPVFQVLTGALGAHRREYGSAATGTVHLPVCQAQSMDKPHSRAVHPGTMHGQQESRPADAKRAYCQGKVPAPAHSLWILGLWGLSWRVSLWFVSGLQWWLTPLVRKHSWEVFCGSKHVAPIITGEQKALDTPFGM

SEQ ID NO: 17046 - DNA, 2680 bp, Homo sapiens
ctggagggagaagagcccatcgacattgacaagatcaacaaggagcgctccatggccaccgtggatgaggaggaacaggcggtgttggacaggcttacctttgactaccaccagaagctgcagggcaagccacagagccatgagctgaaagtccatgagatgctgaagaaggggtgggatgctgaaggttctcccttccgaggccagcgattcgaccctgccatgttcaacatctccccgggggctgtgcagttttaatgaccagaaggaaaggaaaccctcgccggtggggaggcagagccttatcctcggctgcccttcttggctccctgcattccagggacttgctcgtcttgtttacccctagccatcctttctttcaagggtgaaccaggccttccaccctgaccttgcatctccagactgttccagagaaggtgcggggccagctgctatgtggtggccgctgtggctgacactgagtgaaggtgtttgaaatgcaggagaggatatcccagcaaattgggatcacatgcttttgtctccacagcaaccagccactgcaggcagcatgtctttcctcccctgctctctgcttgctgttgttttgacgctattctgcttgcatgtcttctggttgggatgtggagttgttgctggactctcaggcgaagctgaagtcattgaagtgtgtgaagctctgtgcttgcatgagggcaagcaaggaatggctgtgcctgaggctgctctgggaaactccttgccccttgacctcttttgagagcattcacgtggtcttcttgctcatccccttataaatgtgctttgcctgcctcagcctcatggtcagagcagtggagactggagccctgtttgcacgttctagttgttcggagaaagcctaggttctgggctcaggtccagatgcagcggggattctgttctctgactgtggcgaccttgctttggttcttgttgaagtgaaccaagcccggccaccacgcatggcatgctgtgcttggctccccataagacgtcctctttgggtgcacggtgtcaaagtgtgggcaggagtggagagctggtgccctcaggaggagaccacagcatgtccatcagctcagcagagctcgacagccacaagtcctgagaagctttgaccttgaagggcttctgggagaggaggaatttctgcatggggcgtgaaggcacactgtcccaccacaactgaaccagaagagagtgaagactcccctcttcccatcctctgtgccaggtgccagactgtgctccttggaacttatggcccaatcttacctgttctccagggactggtcactgcctcaggacccccaagcctatgccctgagccatggctgctgactgactccagccaaggtgcaaagacgagattatgagacaggtcctcaggcctgtgttccaagtactcacaggggctctgggtgcccatcgccgggagtatggttcagctgccaccggcactgtccatttgcctgtctgtcaagctcagagcatggataagccacacagcagggcagtgcaccctggcaccatgcacggccagcaagaatcaaggcccgcagatgctaagagggcctattgtcaggggaaggtccccgctcctgcacactctctatggatacttgggttgtgggggctctcttggagagtaagtttgtggtttgtttctggtttacagtggtggctgacaccccttgtaagaaagcattcctgggaagtcttctgtgggtccaaacatgttgctccgatcatcacaggagagcaaaaggccctagataccccctttggaatgtgagagtcttgttgtctgatatttgccactgagctggtgaagcccctctaaagagatctcgaccctggggagcagaattcttgtcatctatgaggggtcctgagaaagacttgtcattttttttcctggagttcttcccattgaggtcctaggatttgcacaccactgtcccacaagagctttcctgcctaatgaaaggaggtcttgtggtgtgtgtctcctctcttctctatagttcccgagttggcccccattgcagcccccaccctgtgggtagtcttccagaagtgatgcagtggtgtgagatgccctacaccttgttatttgggagactttgagagtcattcacttccatggtgactagtgtttgttttgcctgattttatattctgtgttgcatttctccccactccctgccctgctttaataaacagcaaaccaatatctaggaagaatgactgagggatagtattgggtattggccccatggcaggaacagccacttgcatctggtcccggtgccacactgcggtgcttggtgtggttgtggagcctgtccctgcgcgccttgctcccgttgagccacgctgtctggtgggtgattctctgccctgagccaccaccctggactggcccagtctccagagctggcacaccctgcctgttttctctttttagacacaacagccgcagtttggccagccactaagtcccaccagctgaggtccgaggaaagcggggtgactcatttcccttgtccagggcccgaggagagtgaggtgtccagcctgcaaagctattccagctccttggtgttggtttgcaataaattggtatttaagcagt

SEQ ID NO: 17047 - protein, 68 aa, Homo sapiens [sequence omitted]

SEQ ID NO: 17048 - DNA, 1827 bp, Homo sapiens
gaagtggggacagggcatggtgccctgtcatggggtgaggactccccaggagattctgtcatgcattaggctgagccctaagtctcataggtcccagcttacccctaagatagcagaatgttggatgttgctcttggaagcaagagagatcactggagaggtagttggttgataagagctaagcagagccttccatggcaagcatgggggcaggctgggttggcccaggacaggtcctggtgtgggggggtgtcatgggtcttggaaaatagcctttcttcatgagagtgggcaaggtgtgcacatggaacaggcactgtcctgagtatccaggacctgctgaagaaggataaaggcatcttccagaatgtcagtcccctcaggtatgtgcctcctagctcttccctgggatatgttagcacaggcagcaaatgcattcccaggcacagagggtcctgccttgggttctggcaccccctcttgtctgtcacctccctttgtgtagttggtccctgagccatggctgctgactgactccagccaaggtgcaaagacgagattatgagacaggtcctcaggcctgtgttccaagtactcacaggggctctgggtgcccatcgccgggagtatggttcagctgccaccggcactgtccatttgcctgtctgtcaagctcagagcatggataagccacacagcagggcagtgcaccctggcaccatgcacggccagcaagaatcaaggcccgcagatgctaagagggcctattgtcaggggaaggtccccgctcctgcacactctctatggatacttgggttgtgggggctctcttggagagtaagtttgtggtttgtttctggtttacagtggtggctgacaccccttgtaagaaagcattcctgggaagtcttctgtgggtccaaacatgttgctccgatcatcacaggagagcaaaaggccctagataccccctttggaatgtgagagtcttgttgtctgatatttgccactgagctggtgaagcccctctaaagagatctcgaccctggggagcagaattcttgtcatctatgaggggtcctgagaaagacttgtcattttttttcctggagttcttcccattgaggtcctaggatttgcacaccactgtcccacaagagctttcctgcctaatgaaaggaggtcttgtggtgtgtgtctcctctcttctctatagttcccgagttggcccccattgcagcccccaccctgtgggtagtcttccagaagtgatgcagtggtgtgagatgccctacaccttgttatttgggagactttgagagtcattcacttccatggtgactagtgtttgttttgcctgattttatattctgtgttgcatttctccccactccctgccctgctttaataaacagcaaaccaatatctaggaagaatgactgagggatagtattgggtattggccccatggcaggaacagccacttgcatctggtcccggtgccacactgcggtgcttggtgtggttgtggagcctgtccctgcgcgccttgctcccgttgagccacgctgtctggtgggtgattctctgccctgagccaccaccctggactggcccagtctccagagctggcacaccctgcctgttttctctttttagacacaacagccgcagtttggccagccactaagtcccaccagctgaggtccgaggaaagcggggtgactcatttcccttgtccagggcccgaggagagtgaggtgtccagcctgcaaagctattccagctccttggtgttggtttgcaataaattggtatttaagcagt

SEQ ID NO: 17049 - protein, 32 aa, Homo sapiens; identical to SEQ ID NO: 17037

SEQ ID NO: 17050 - DNA, 3166 bp, Homo sapiens
ccagcagttcagttcctcatcctttgaccccagacatataaagcctgtgcattatgacacagcctggagccttttcccaagctataggctcctgtgactactaccagttcctttcctttatgtcatacttgactttgcagatgccattacggcctctccctcacttgagcttcacgtggttgtggaggtatgagagcatgagtgatgcactagtagtactggggccggctagcttgccctctgaaggtgcagccctggccgcctgtattacactagtgagcccgtgatcctggggttgccatctccatggactgagaggtcgtgatagccctgccttaaaacactggccttgactctcctgccttccgttgggtgaactcagtgcagatcatggagcaggtcacgatgctctcaagttggttccctctgagcgaggagctcttggtgaacctgagcaaggtgggcgagtattggtggaacgccatcctggagggagaagagcccatcgacattgacaagatcaacaaggagcgctccatggccaccgtggatgaggaggaacaggcggtgttggacaggcttacctttgactaccaccagaagctgcagggcaagccacagagccatgagctgaaagtccatgagatgctgaagaaggggtgggatgctgaaggttctcccttccgaggccagcgattcgaccctgccatgttcaacatctccccgggggctgtgcagttttaatgaccagaaggaaaggaaaccctcgccggtggggaggcagagccttatcctcggctgcccttcttggctccctgcattccagggacttgctcgtcttgtttacccctagccatcctttctttcaagggtgaaccaggccttccaccctgaccttgcatctccagactgttccagagaaggtgcggggccagctgctatgtggtggccgctgtggctgacactgagtgaaggtgtttgaaatgcaggagaggatatcccagcaaattgggatcacatgcttttgtctccacagcaaccagccactgcaggcagcatgtctttcctcccctgctctctgcttgctgttgttttgacgctattctgcttgcatgtcttctggttgggatgtggagttgttgctggactctcaggcgaagctgaagtcattgaagtgtgtgaagctctgtgcttgcatgagggcaagcaaggaatggctgtgcctgaggctgctctgggaaactccttgccccttgacctcttttgagagcattcacgtggtcttcttgctcatccccttataaatgtgctttgcctgcctcagcctcatggtcagagcagtggagactggagccctgtttgcacgttctagttgttcggagaaagcctaggttctgggctcaggtccagatgcagcggggattctgttctctgactgtggcgaccttgctttggttcttgttgaagtgaaccaagcccggccaccacgcatggcatgctgtgcttggctccccataagacgtcctctttgggtgcacggtgtcaaagtgtgggcaggagtggagagctggtgccctcaggaggagaccacagcatgtccatcagctcagcagagctcgacagccacaagtcctgagaagctttgaccttgaagggcttctgggagaggaggaatttctgcatggggcgtgaaggcacactgtcccaccacaactgaaccagaagagagtgaagactcccctcttcccatcctctgtgccaggtgccagactgtgctccttggaacttatggcccaatcttacctgttctccagggactggtcactgcctcaggacccccaagcctatgccctgagccatggctgctgactgactccagccaaggtgcaaagacgagattatgagacaggtcctcaggcctgtgttccaagtactcacaggggctctgggtgcccatcgccgggagtatggttcagctgccaccggcactgtccatttgcctgtctgtcaagctcagagcatggataagccacacagcagggcagtgcaccctggcaccatgcacggccagcaagaatcaaggcccgcagatgctaagagggcctattgtcaggggaaggtccccgctcctgcacactctctatggatacttgggttgtgggggctctcttggagagtaagtttgtggtttgtttctggtttacagtggtggctgacaccccttgtaagaaagcattcctgggaagtcttctgtgggtccaaacatgttgctccgatcatcacaggagagcaaaaggccctagataccccctttggaatgtgagagtcttgttgtctgatatttgccactgagctggtgaagcccctctaaagagatctcgaccctggggagcagaattcttgtcatctatgaggggtcctgagaaagacttgtcattttttttcctggagttcttcccattgaggtcctaggatttgcacaccactgtcccacaagagctttcctgcctaatgaaaggaggtcttgtggtgtgtgtctcctctcttctctatagttcccgagttggcccccattgcagcccccaccctgtgggtagtcttccagaagtgatgcagtggtgtgagatgccctacaccttgttatttgggagactttgagagtcattcacttccatggtgactagtgtttgttttgcctgattttatattctgtgttgcatttctccccactccctgccctgctttaataaacagcaaaccaatatctaggaagaatgactgagggatagtattgggtattggccccatggcaggaacagccacttgcatctggtcccggtgccacactgcggtgcttggtgtggttgtggagcctgtccctgcgcgccttgctcccgttgagccacgctgtctggtgggtgattctctgccctgagccaccaccctggactggcccagtctccagagctggcacaccctgcctgttttctctttttagacacaacagccgcagtttggccagccactaagtcccaccagctgaggtccgaggaaagcggggtgactcatttcccttgtccagggcccgaggagagtgaggtgtccagcctgcaaagctattccagctccttggtgttggtttgcaataaattggtatttaagcagt

SEQ ID NO: 17051 - protein, 117 aa, Homo sapiens; identical to SEQ ID NO: 17039

SEQ ID NO: 17052 - DNA, 2917 bp, Homo sapiens
acttgagtttcaaacactaaagtttctgaaacctccatctaatgagtttaagtctcagtggcccttagcagcagctccattcgtgtggccatgctggaggaaaatggggagcgcgtcctcatggaagggaagctcacccacaagatcaacactgagagttctctctggagtctcgagcccgggaagtgcgttttggtgaacctgagcaaggtgggcgagtattggtggaacgccatcctggagggagaagagcccatcgacattgacaagatcaacaaggagcgctccatggccaccgtggatgaggaggaacaggcggtgttggacaggcttacctttgactaccaccagaagctgcagggcaagccacagagccatgagctgaaagtccatgagatgctgaagaaggggtgggatgctgaaggttctcccttccgaggccagcgattcgaccctgccatgttcaacatctccccgggggctgtgcagttttaatgaccagaaggaaaggaaaccctcgccggtggggaggcagagccttatcctcggctgcccttcttggctccctgcattccagggacttgctcgtcttgtttacccctagccatcctttctttcaagggtgaaccaggccttccaccctgaccttgcatctccagactgttccagagaaggtgcggggccagctgctatgtggtggccgctgtggctgacactgagtgaaggtgtttgaaatgcaggagaggatatcccagcaaattgggatcacatgcttttgtctccacagcaaccagccactgcaggcagcatgtctttcctcccctgctctctgcttgctgttgttttgacgctattctgcttgcatgtcttctggttgggatgtggagttgttgctggactctcaggcgaagctgaagtcattgaagtgtgtgaagctctgtgcttgcatgagggcaagcaaggaatggctgtgcctgaggctgctctgggaaactccttgccccttgacctcttttgagagcattcacgtggtcttcttgctcatccccttataaatgtgctttgcctgcctcagcctcatggtcagagcagtggagactggagccctgtttgcacgttctagttgttcggagaaagcctaggttctgggctcaggtccagatgcagcggggattctgttctctgactgtggcgaccttgctttggttcttgttgaagtgaaccaagcccggccaccacgcatggcatgctgtgcttggctccccataagacgtcctctttgggtgcacggtgtcaaagtgtgggcaggagtggagagctggtgccctcaggaggagaccacagcatgtccatcagctcagcagagctcgacagccacaagtcctgagaagctttgaccttgaagggcttctgggagaggaggaatttctgcatggggcgtgaaggcacactgtcccaccacaactgaaccagaagagagtgaagactcccctcttcccatcctctgtgccaggtgccagactgtgctccttggaacttatggcccaatcttacctgttctccagggactggtcactgcctcaggacccccaagcctatgccctgagccatggctgctgactgactccagccaaggtgcaaagacgagattatgagacaggtcctcaggcctgtgttccaagtactcacaggggctctgggtgcccatcgccgggagtatggttcagctgccaccggcactgtccatttgcctgtctgtcaagctcagagcatggataagccacacagcagggcagtgcaccctggcaccatgcacggccagcaagaatcaaggcccgcagatgctaagagggcctattgtcaggggaaggtccccgctcctgcacactctctatggatacttgggttgtgggggctctcttggagagtaagtttgtggtttgtttctggtttacagtggtggctgacaccccttgtaagaaagcattcctgggaagtcttctgtgggtccaaacatgttgctccgatcatcacaggagagcaaaaggccctagataccccctttggaatgtgagagtcttgttgtctgatatttgccactgagctggtgaagcccctctaaagagatctcgaccctggggagcagaattcttgtcatctatgaggggtcctgagaaagacttgtcattttttttcctggagttcttcccattgaggtcctaggatttgcacaccactgtcccacaagagctttcctgcctaatgaaaggaggtcttgtggtgtgtgtctcctctcttctctatagttcccgagttggcccccattgcagcccccaccctgtgggtagtcttccagaagtgatgcagtggtgtgagatgccctacaccttgttatttgggagactttgagagtcattcacttccatggtgactagtgtttgttttgcctgattttatattctgtgttgcatttctccccactccctgccctgctttaataaacagcaaaccaatatctaggaagaatgactgagggatagtattgggtattggccccatggcaggaacagccacttgcatctggtcccggtgccacactgcggtgcttggtgtggttgtggagcctgtccctgcgcgccttgctcccgttgagccacgctgtctggtgggtgattctctgccctgagccaccaccctggactggcccagtctccagagctggcacaccctgcctgttttctctttttagacacaacagccgcagtttggccagccactaagtcccaccagctgaggtccgaggaaagcggggtgactcatttcccttgtccagggcccgaggagagtgaggtgtccagcctgcaaagctattccagctccttggtgttggtttgcaataaattggtatttaagcagt

SEQ ID NO: 17053 - protein, 134 aa, Homo sapiens [sequence omitted]

SEQ ID NO: 17054 - DNA, 3643 bp, Homo sapiens
ggtgatctgagtgggcctgatctatcagctgaaagcctgaagagcgcagcagagctcccctgaagtagaagaaatttctccgatggacagcagctgcactcagtttctggagagttccacattggcctgctatgtggatttcagactggcctagccagcccccacaatcatgattcaggagcagttccagaaaaatcccgacagttacaatggtgctgtccgagagaactacacctggtcacaggactatactgacctggaggtcagggtgccagtacccaagcacgtggtgaagggaaagcaggtttcttttatgcctcctcagggaacaggtgtcaggctgtgggcctttgttcccctcagcaacaaacacaaaatttatttttcttcagctacaaacacccggtcacccccctttaaactacatcaggtcatgggtgagacccattgaagccccatccagtcctgagaggcaaagcaaagaacccaggtcacagcgatgaagtggacggccaggcctgtgtgctgtggggctcttccatggagcagggagccatgtcctataagtaccgcatgctaaccgattgcgccactggagccacaccatgtcatgatgtacctgtaacattcgcaacttgagtttcaaacactaaagtttctgaaacctccatctaatgagtttaaaaatggagtctccctgtgttgttcaggctggtcttaaactcctaggctcaagtaatccccctgcctcagactcccaaagtgctggaattacaggtctcagtggcccttagcagcagctccattcgtgtggccatgctggaggaaaatggggagcgcgtcctcatggaagggaagctcacccacaagatcaacactgagagttctctctggagtctcgagcccgggaagtgcgttttggtgaacctgagcaaggtgggcgagtattggtggaacgccatcctggagggagaagagcccatcgacattgacaagatcaacaaggagcgctccatggccaccgtggatgaggaggaacaggcggtgttggacaggcttacctttgactaccaccagaagctgcagggcaagccacagagccatgagctgaaagtccatgagatgctgaagaaggggtgggatgctgaaggttctcccttccgaggccagcgattcgaccctgccatgttcaacatctccccgggggctgtgcagttttaatgaccagaaggaaaggaaaccctcgccggtggggaggcagagccttatcctcggctgcccttcttggctccctgcattccagggacttgctcgtcttgtttacccctagccatcctttctttcaagggtgaaccaggccttccaccctgaccttgcatctccagactgttccagagaaggtgcggggccagctgctatgtggtggccgctgtggctgacactgagtgaaggtgtttgaaatgcaggagaggatatcccagcaaattgggatcacatgcttttgtctccacagcaaccagccactgcaggcagcatgtctttcctcccctgctctctgcttgctgttgttttgacgctattctgcttgcatgtcttctggttgggatgtggagttgttgctggactctcaggcgaagctgaagtcattgaagtgtgtgaagctctgtgcttgcatgagggcaagcaaggaatggctgtgcctgaggctgctctgggaaactccttgccccttgacctcttttgagagcattcacgtggtcttcttgctcatccccttataaatgtgctttgcctgcctcagcctcatggtcagagcagtggagactggagccctgtttgcacgttctagttgttcggagaaagcctaggttctgggctcaggtccagatgcagcggggattctgttctctgactgtggcgaccttgctttggttcttgttgaagtgaaccaagcccggccaccacgcatggcatgctgtgcttggctccccataagacgtcctctttgggtgcacggtgtcaaagtgtgggcaggagtggagagctggtgccctcaggaggagaccacagcatgtccatcagctcagcagagctcgacagccacaagtcctgagaagctttgaccttgaagggcttctgggagaggaggaatttctgcatggggcgtgaaggcacactgtcccaccacaactgaaccagaagagagtgaagactcccctcttcccatcctctgtgccaggtgccagactgtgctccttggaacttatggcccaatcttacctgttctccagggactggtcactgcctcaggacccccaagcctatgccctgagccatggctgctgactgactccagccaaggtgcaaagacgagattatgagacaggtcctcaggcctgtgttccaagtactcacaggggctctgggtgcccatcgccgggagtatggttcagctgccaccggcactgtccatttgcctgtctgtcaagctcagagcatggataagccacacagcagggcagtgcaccctggcaccatgcacggccagcaagaatcaaggcccgcagatgctaagagggcctattgtcaggggaaggtccccgctcctgcacactctctatggatacttgggttgtgggggctctcttggagagtaagtttgtggtttgtttctggtttacagtggtggctgacaccccttgtaagaaagcattcctgggaagtcttctgtgggtccaaacatgttgctccgatcatcacaggagagcaaaaggccctagataccccctttggaatgtgagagtcttgttgtctgatatttgccactgagctggtgaagcccctctaaagagatctcgaccctggggagcagaattcttgtcatctatgaggggtcctgagaaagacttgtcattttttttcctggagttcttcccattgaggtcctaggatttgcacaccactgtcccacaagagctttcctgcctaatgaaaggaggtcttgtggtgtgtgtctcctctcttctctatagttcccgagttggcccccattgcagcccccaccctgtgggtagtcttccagaagtgatgcagtggtgtgagatgccctacaccttgttatttgggagactttgagagtcattcacttccatggtgactagtgtttgttttgcctgattttatattctgtgttgcatttctccccactccctgccctgctttaataaacagcaaaccaatatctaggaagaatgactgagggatagtattgggtattggccccatggcaggaacagccacttgcatctggtcccggtgccacactgcggtgcttggtgtggttgtggagcctgtccctgcgcgccttgctcccgttgagccacgctgtctggtgggtgattctctgccctgagccaccaccctggactggcccagtctccagagctggcacaccctgcctgttttctctttttagacacaacagccgcagtttggccagccactaagtcccaccagctgaggtccgaggaaagcggggtgactcatttcccttgtccagggcccgaggagagtgaggtgtccagcctgcaaagctattccagctccttggtgttggtttgcaataaattggtatttaagcagt

SEQ ID NO: 17055 - protein, 134 aa, Homo sapiens [sequence omitted]

SEQ ID NO: 17056 - DNA, 877 bp, Homo sapiens
ggcgctgtgtgtgtgaagcgtacctagggcgggaggcgacatggagacaggggcggccgagctgtatgaccagcccctctaaagagatctcgaccctggggagcagaattcttgtcatctatgaggggtcctgagaaagacttgtcattttttttcctggagttcttcccattgaggtcctaggatttgcacaccactgtcccacaagagctttcctgcctaatgaaaggaggtcttgtggtgtgtgtctcctctcttctctatagttcccgagttggcccccattgcagcccccaccctgtgggtagtcttccagaagtgatgcagtggtgtgagatgccctacaccttgttatttgggagactttgagagtcattcacttccatggtgactagtgtttgttttgcctgattttatattctgtgttgcatttctccccactccctgccctgctttaataaacagcaaaccaatatctaggaagaatgactgagggatagtattgggtattggccccatggcaggaacagccacttgcatctggtcccggtgccacactgcggtgcttggtgtggttgtggagcctgtccctgcgcgccttgctcccgttgagccacgctgtctggtgggtgattctctgccctgagccaccaccctggactggcccagtctccagagctggcacaccctgcctgttttctctttttagacacaacagccgcagtttggccagccactaagtcccaccagctgaggtccgaggaaagcggggtgactcatttcccttgtccagggcccgaggagagtgaggtgtccagcctgcaaagctattccagctccttggtgttggtttgcaataaattggtatttaagcagt

SEQ ID NO: 17057 - protein, 48 aa, Homo sapiens [sequence omitted]

SEQ ID NO: 17058 - DNA, 2467 bp, Homo sapiens
agtcggcaggtctgaggcggcgctgtgtgtgtgaagcgtacctagggcgggaggcgaaaggaaaccctcgccggtggggaggcagagccttatcctcggctgcccttcttggctccctgcattccagggacttgctcgtcttgtttacccctagccatcctttctttcaagggtgaaccaggccttccaccctgaccttgcatctccagactgttccagagaaggtgcggggccagctgctatgtggtggccgctgtggctgacactgagtgaaggtgtttgaaatgcaggagaggatatcccagcaaattgggatcacatgcttttgtctccacagcaaccagccactgcaggcagcatgtctttcctcccctgctctctgcttgctgttgttttgacgctattctgcttgcatgtcttctggttgggatgtggagttgttgctggactctcaggcgaagctgaagtcattgaagtgtgtgaagctctgtgcttgcatgagggcaagcaaggaatggctgtgcctgaggctgctctgggaaactccttgccccttgacctcttttgagagcattcacgtggtcttcttgctcatccccttataaatgtgctttgcctgcctcagcctcatggtcagagcagtggagactggagccctgtttgcacgttctagttgttcggagaaagcctaggttctgggctcaggtccagatgcagcggggattctgttctctgactgtggcgaccttgctttggttcttgttgaagtgaaccaagcccggccaccacgcatggcatgctgtgcttggctccccataagacgtcctctttgggtgcacggtgtcaaagtgtgggcaggagtggagagctggtgccctcaggaggagaccacagcatgtccatcagctcagcagagctcgacagccacaagtcctgagaagctttgaccttgaagggcttctgggagaggaggaatttctgcatggggcgtgaaggcacactgtcccaccacaactgaaccagaagagagtgaagactcccctcttcccatcctctgtgccaggtgccagactgtgctccttggaacttatggcccaatcttacctgttctccagggactggtcactgcctcaggacccccaagcctatgccctgagccatggctgctgactgactccagccaaggtgcaaagacgagattatgagacaggtcctcaggcctgtgttccaagtactcacaggggctctgggtgcccatcgccgggagtatggttcagctgccaccggcactgtccatttgcctgtctgtcaagctcagagcatggataagccacacagcagggcagtgcaccctggcaccatgcacggccagcaagaatcaaggcccgcagatgctaagagggcctattgtcaggggaaggtccccgctcctgcacactctctatggatacttgggttgtgggggctctcttggagagtaagtttgtggtttgtttctggtttacagtggtggctgacaccccttgtaagaaagcattcctgggaagtcttctgtgggtccaaacatgttgctccgatcatcacaggagagcaaaaggccctagataccccctttggaatgtgagagtcttgttgtctgatatttgccactgagctggtgaagcccctctaaagagatctcgaccctggggagcagaattcttgtcatctatgaggggtcctgagaaagacttgtcattttttttcctggagttcttcccattgaggtcctaggatttgcacaccactgtcccacaagagctttcctgcctaatgaaaggaggtcttgtggtgtgtgtctcctctcttctctatagttcccgagttggcccccattgcagcccccaccctgtgggtagtcttccagaagtgatgcagtggtgtgagatgccctacaccttgttatttgggagactttgagagtcattcacttccatggtgactagtgtttgttttgcctgattttatattctgtgttgcatttctccccactccctgccctgctttaataaacagcaaaccaatatctaggaagaatgactgagggatagtattgggtattggccccatggcaggaacagccacttgcatctggtcccggtgccacactgcggtgcttggtgtggttgtggagcctgtccctgcgcgccttgctcccgttgagccacgctgtctggtgggtgattctctgccctgagccaccaccctggactggcccagtctccagagctggcacaccctgcctgttttctctttttagacacaacagccgcagtttggccagccactaagtcccaccagctgaggtccgaggaaagcggggtgactcatttcccttgtccagggcccgaggagagtgaggtgtccagcctgcaaagctattccagctccttggtgttggtttgcaataaattggtatttaagcagt

SEQ ID NO: 17059 - protein, 140 aa, Homo sapiens; identical to SEQ ID NO: 17045

SEQ ID NO: 17060 - DNA, 3592 bp, Homo sapiens
gttggctgcggacgccggaagtggccagtcggcaggtctgaggcggcgctgtgtgtgtgaagcgtacctagggcgggaggcgacatggagacaggggcggccgagctgtatgaccaggcccttttgggcatcctgcagcacgtgggcaacgtccaggatttcctgcgcgttctctttggcttcctctaccgcaagacagacttctatcgcttgctgcgccacccatcggaccgcatgggcttcccgcccggggccgcgcaggccttggtgctgcaggtattcaaaacctttgaccacatggcccgtcaggatgatgagaagagaaggcaggaacttgaagagaaaatcagaagaaaggaagaggaagaggccaagactgtgtcagctgctgcagctgagaaggagccagtcccagttccagtccaggaaatagagattgactccaccacagaattggatgggcatcaggaagtagagaaagtgcagcctccaggccctgtgaaggaaatggcccatggttcacaggaggcagaagctccaggagcagttgctggtgctgctgaagtccctagggaaccaccaattcttcccaggattcaggagcagttccagaaaaatcccgacagttacaatggtgctgtccgagagaactacacctggtcacaggactatactgacctggaggtcagggtgccagtacccaagcacgtggtgaagggaaagcaggtctcagtggcccttagcagcagctccattcgtgtggccatgctggaggaaaatggggagcgcgtcctcatggaagggaagctcacccacaagatcaacactgagagttctctctggagtctcgagcccgggaagtgcgttttggtgaacctgagcaaggtgggcgagtattggtggaacgccatcctggagggagaagagcccatcgacattgacaagatcaacaaggagcgctccatggccaccgtggatgaggaggaacaggcggtgttggacaggcttacctttgactaccaccagaagctgcagggcaagccacagagccatgagctgaaagtccatgagatgctgaagaaggggtgggatgctgaaggttctcccttccgaggccagcgattcgaccctgccatgttcaacatctccccgggggctgtgcagttttaatgaccagaaggaaaggaaaccctcgccggtggggaggcagagccttatcctcggctgcccttcttggctccctgcattccagggacttgctcgtcttgtttacccctagccatcctttctttcaagggtgaaccaggccttccaccctgaccttgcatctccagactgttccagagaaggtgcggggccagctgctatgtggtggccgctgtggctgacactgagtgaaggtgtttgaaatgcaggagaggatatcccagcaaattgggatcacatgcttttgtctccacagcaaccagccactgcaggcagcatgtctttcctcccctgctctctgcttgctgttgttttgacgctattctgcttgcatgtcttctggttgggatgtggagttgttgctggactctcaggcgaagctgaagtcattgaagtgtgtgaagctctgtgcttgcatgagggcaagcaaggaatggctgtgcctgaggctgctctgggaaactccttgccccttgacctcttttgagagcattcacgtggtcttcttgctcatccccttataaatgtgctttgcctgcctcagcctcatggtcagagcagtggagactggagccctgtttgcacgttctagttgttcggagaaagcctaggttctgggctcaggtccagatgcagcggggattctgttctctgactgtggcgaccttgctttggttcttgttgaagtgaaccaagcccggccaccacgcatggcatgctgtgcttggctccccataagacgtcctctttgggtgcacggtgtcaaagtgtgggcaggagtggagagctggtgccctcaggaggagaccacagcatgtccatcagctcagcagagctcgacagccacaagtcctgagaagctttgaccttgaagggcttctgggagaggaggaatttctgcatggggcgtgaaggcacactgtcccaccacaactgaaccagaagagagtgaagactcccctcttcccatcctctgtgccaggtgccagactgtgctccttggaacttatggcccaatcttacctgttctccagggactggtcactgcctcaggacccccaagcctatgccctgagccatggctgctgactgactccagccaaggtgcaaagacgagattatgagacaggtcctcaggcctgtgttccaagtactcacaggggctctgggtgcccatcgccgggagtatggttcagctgccaccggcactgtccatttgcctgtctgtcaagctcagagcatggataagccacacagcagggcagtgcaccctggcaccatgcacggccagcaagaatcaaggcccgcagatgctaagagggcctattgtcaggggaaggtccccgctcctgcacactctctatggatacttgggttgtgggggctctcttggagagtaagtttgtggtttgtttctggtttacagtggtggctgacaccccttgtaagaaagcattcctgggaagtcttctgtgggtccaaacatgttgctccgatcatcacaggagagcaaaaggccctagataccccctttggaatgtgagagtcttgttgtctgatatttgccactgagctggtgaagcccctctaaagagatctcgaccctggggagcagaattcttgtcatctatgaggggtcctgagaaagacttgtcattttttttcctggagttcttcccattgaggtcctaggatttgcacaccactgtcccacaagagctttcctgcctaatgaaaggaggtcttgtggtgtgtgtctcctctcttctctatagttcccgagttggcccccattgcagcccccaccctgtgggtagtcttccagaagtgatgcagtggtgtgagatgccctacaccttgttatttgggagactttgagagtcattcacttccatggtgactagtgtttgttttgcctgattttatattctgtgttgcatttctccccactccctgccctgctttaataaacagcaaaccaatatctaggaagaatgactgagggatagtattgggtattggccccatggcaggaacagccacttgcatctggtcccggtgccacactgcggtgcttggtgtggttgtggagcctgtccctgcgcgccttgctcccgttgagccacgctgtctggtgggtgattctctgccctgagccaccaccctggactggcccagtctccagagctggcacaccctgcctgttttctctttttagacacaacagccgcagtttggccagccactaagtcccaccagctgaggtccgaggaaagcggggtgactcatttcccttgtccagggcccgaggagagtgaggtgtccagcctgcaaagctattccagctccttggtgttggtttgcaataaattggtatttaagcagt

SEQ ID NO: 17061 - protein, 361 aa, Homo sapiens; identical to SEQ ID NO: 17033

SEQ ID NO: 17062 - DNA, 1226 bp, Homo sapiens
cttacctgttctccagggactggtcactgcctcaggacccccaagcctatgccctgagccatggctgctgactgactccagccaaggtgcaaagacgagattatgagacaggtcctcaggcctgtgttccaagtactcacaggggctctgggtgcccatcgccgggagtatggttcagctgccaccggcactgtccatttgcctgtctgtcaagctcagagcatggataagccacacagcagggcagtgcaccctggcaccatgcacggccagcaagaatcaaggcccgcagatgctaagagggcctattgtcaggggaaggtccccgctcctgcacactctctatggatacttgggttgtgggggctctcttggagagtaagtttgtggtttgtttctggtttacagtggtggctgacaccccttgtaagaaagcattcctgggaagtcttctgtgggtccaaacatgttgctccgatcatcacaggagagcaaaaggccctagataccccctttggaatgtgagagtcttgttgtctgatatttgccactgagctggtgaagcccctctaaagagatctcgaccctggggagcagaattcttgtcatctatgaggggtcctgagaaagacttgtcattttttttcctggagttcttcccattgaggtcctaggatttgcacaccactgtcccacaagagctttcctgcctaatgaaaggaggtcttgtggtgtgtgtctcctctcttctctatagttcccgagttggcccccattgcagcccccaccctgtgggtagtcttccagaagtgatgcagtggtgtgagatgccctacaccttgttatttgggagactttgagagtcattcacttccatggtgactagtgtttgttttgcctgattttatattctgtgttgcatttctccccactccctgtccctgcgcgccttgctcccgttgagccacgctgtctggtgggtgattctctgccctgagccaccaccctggactggcccagtctccagagctggcacaccctgcctgttttctctttttagacacaacagccgcagtttggccagccactaagtcccaccagctgaggtccgaggaaagcggggtgactcatttcccttgtccagggcccgaggagagtgaggtgtccagcctgcaaagctattccagctccttggtgttggtttgcaataaattggtatttaagca

SEQ ID NO: 17063 - protein, 140 aa, Homo sapiens; identical to SEQ ID NO: 17045

SEQ ID NO: 17064 - DNA, 490 bp, Homo sapiens
aaaacctttgaccacatggcccgtcaggatgatgagaagagaaggcaggaacttgaagagaaaatcagaagaaaggaagaggaagaggccaagactgtgtcagctgctgcagctgagaaggagccagtcccagttccagtccaggaaatagagattgactccaccacagaattggatgggccaccgtggatgaggaggaacaggcggtgttggacaggcttacctttgactaccaccagaagctgcagggcaagccacagagccatgagctgaaagtccatgagatgctgaagaaggggtgggatgctgaaggttctcccttccgaggccagcgattcgaccctgccatgttcaacatctccccgggggctgtgcagttttaatgaccagaaggaaaggaaaccctcgccggtggggagagtgaggtgtccagcctgcaaagctattccagctccttggtgttggtttgcaataaattggtatttaagca

SEQ ID NO: 17065 - protein, 85 aa, Homo sapiens
MARQDDEKRRQELEEKIRRKEEEEAKTVSAAAAEKEPVPVPVQEIEIDSTTELDGPPWMRRNRRCWTGLPLTTTRSCRASHRAMS

SEQ ID NO: 17066 - DNA, 609 bp, Homo sapiens
ccagcagttcagttcctcatcctttgaccccagacatataaagcctgtgcattatgacacagcctggagccttttcccaagctataggctcctgtgactactaccagttcctttcctttatgtcatacttgactttgcagatgccattacggcctctccctcacttgagcttcacgtggttgtggaggtatgagagcatgagtgatgcactagtagtactggggccggctagcttgccctctgaaggtgcagccctggccgcctgtattacactagtgagcccgtgatcctggggttgccatctccatggactgagaggtcgtgatagccctgccttaaaacactggccttgactctcctgccttccgttgggtgaactcagtgcagatcatggagcaggtcacgatgctctcaagttggttccctctgagcgaggagctcttgacacaacagccgcagtttggccagccactaagtcccaccagctgaggtccgaggaaagcggggtgactcatttcccttgtccagggcccgaggagagtgaggtgtccagcctgcaaagctattccagctccttggtgttggtttgcaataaattggtatttaagc

SEQ ID NO: 17067 - protein, 32 aa, Homo sapiens
MEQVTMLSSWFPLSEELLTQQPQFGQPLSPTS

SEQ ID NO: 17068 - DNA, 2284 bp, Homo sapiens
ctggagggagaagagcccatcgacattgacaagatcaacaaggagcgctccatggccaccgtggatgaggaggaacaggcggtgttggacaggcttacctttgactaccaccagaagctgcagggcaagccacagagccatgagctgaaagtccatgagatgctgaagaaggggtgggatgctgaaggttctcccttccgaggccagcgattcgaccctgccatgttcaacatctccccgggggctgtgcagttttaatgaccagaaggaaaggaaaccctcgccggtggggaggcagagccttatcctcggctgcccttcttggctccctgcattccagggacttgctcgtcttgtttacccctagccatcctttctttcaagggtgaaccaggccttccaccctgaccttgcatctccagactgttccagagaaggtgcggggccagctgctatgtggtggccgctgtggctgacactgagtgaaggtgtttgaaatgcaggagaggatatcccagcaaattgggatcacatgcttttgtctccacagcaaccagccactgcaggcagcatgtctttcctcccctgctctctgcttgctgttgttttgacgctattctgcttgcatgtcttctggttgggatgtggagttgttgctggactctcaggcgaagctgaagtcattgaagtgtgtgaagctctgtgcttgcatgagggcaagcaaggaatggctgtgcctgaggctgctctgggaaactccttgccccttgacctcttttgagagcattcacgtggtcttcttgctcatccccttataaatgtgctttgcctgcctcagcctcatggtcagagcagtggagactggagccctgtttgcacgttctagttgttcggagaaagcctaggttctgggctcaggtccagatgcagcggggattctgttctctgactgtggcgaccttgctttggttcttgttgaagtgaaccaagcccggccaccacgcatggcatgctgtgcttggctccccataagacgtcctctttgggtgcacggtgtcaaagtgtgggcaggagtggagagctggtgccctcaggaggagaccacagcatgtccatcagctcagcagagctcgacagccacaagtcctgagaagctttgaccttgaagggcttctgggagaggaggaatttctgcatggggcgtgaaggcacactgtcccaccacaactgaaccagaagagagtgaagactcccctcttcccatcctctgtgccaggtgccagactgtgctccttggaacttatggcccaatcttacctgttctccagggactggtcactgcctcaggacccccaagcctatgccctgagccatggctgctgactgactccagccaaggtgcaaagacgagattatgagacaggtcctcaggcctgtgttccaagtactcacaggggctctgggtgcccatcgccgggagtatggttcagctgccaccggcactgtccatttgcctgtctgtcaagctcagagcatggataagccacacagcagggcagtgcaccctggcaccatgcacggccagcaagaatcaaggcccgcagatgctaagagggcctattgtcaggggaaggtccccgctcctgcacactctctatggatacttgggttgtgggggctctcttggagagtaagtttgtggtttgtttctggtttacagtggtggctgacaccccttgtaagaaagcattcctgggaagtcttctgtgggtccaaacatgttgctccgatcatcacaggagagcaaaaggccctagataccccctttggaatgtgagagtcttgttgtctgatatttgccactgagctggtgaagcccctctaaagagatctcgaccctggggagcagaattcttgtcatctatgaggggtcctgagaaagacttgtcattttttttcctggagttcttcccattgaggtcctaggatttgcacaccactgtcccacaagagctttcctgcctaatgaaaggaggtcttgtggtgtgtgtctcctctcttctctatagttcccgagttggcccccattgcagcccccaccctgtgggtagtcttccagaagtgatgcagtggtgtgagatgccctacaccttgttatttgggagactttgagagtcattcacttccatggtgactagtgtttgttttgcctgattttatattctgtgttgcatttctccccactccctgccctgctttaataaacagcaaaccaatatctagg

SEQ ID NO: 17069 - protein, 68 aa, Homo sapiens [sequence omitted]

SEQ ID NO: 17070 - DNA, 1431 bp, Homo sapiens
gaagtggggacagggcatggtgccctgtcatggggtgaggactccccaggagattctgtcatgcattaggctgagccctaagtctcataggtcccagcttacccctaagatagcagaatgttggatgttgctcttggaagcaagagagatcactggagaggtagttggttgataagagctaagcagagccttccatggcaagcatgggggcaggctgggttggcccaggacaggtcctggtgtgggggggtgtcatgggtcttggaaaatagcctttcttcatgagagtgggcaaggtgtgcacatggaacaggcactgtcctgagtatccaggacctgctgaagaaggataaaggcatcttccagaatgtcagtcccctcaggtatgtgcctcctagctcttccctgggatatgttagcacaggcagcaaatgcattcccaggcacagagggtcctgccttgggttctggcaccccctcttgtctgtcacctccctttgtgtagttggtccctgagccatggctgctgactgactccagccaaggtgcaaagacgagattatgagacaggtcctcaggcctgtgttccaagtactcacaggggctctgggtgcccatcgccgggagtatggttcagctgccaccggcactgtccatttgcctgtctgtcaagctcagagcatggataagccacacagcagggcagtgcaccctggcaccatgcacggccagcaagaatcaaggcccgcagatgctaagagggcctattgtcaggggaaggtccccgctcctgcacactctctatggatacttgggttgtgggggctctcttggagagtaagtttgtggtttgtttctggtttacagtggtggctgacaccccttgtaagaaagcattcctgggaagtcttctgtgggtccaaacatgttgctccgatcatcacaggagagcaaaaggccctagataccccctttggaatgtgagagtcttgttgtctgatatttgccactgagctggtgaagcccctctaaagagatctcgaccctggggagcagaattcttgtcatctatgaggggtcctgagaaagacttgtcattttttttcctggagttcttcccattgaggtcctaggatttgcacaccactgtcccacaagagctttcctgcctaatgaaaggaggtcttgtggtgtgtgtctcctctcttctctatagttcccgagttggcccccattgcagcccccaccctgtgggtagtcttccagaagtgatgcagtggtgtgagatgccctacaccttgttatttgggagactttgagagtcattcacttccatggtgactagtgtttgttttgcctgattttatattctgtgttgcatttctccccactccctgccctgctttaataaacagcaaaccaatatctagg

SEQ ID NO: 17071 - protein, 32 aa, Homo sapiens; identical to SEQ ID NO: 17037

SEQ ID NO: 17072 - DNA, 2770 bp, Homo sapiens
ccagcagttcagttcctcatcctttgaccccagacatataaagcctgtgcattatgacacagcctggagccttttcccaagctataggctcctgtgactactaccagttcctttcctttatgtcatacttgactttgcagatgccattacggcctctccctcacttgagcttcacgtggttgtggaggtatgagagcatgagtgatgcactagtagtactggggccggctagcttgccctctgaaggtgcagccctggccgcctgtattacactagtgagcccgtgatcctggggttgccatctccatggactgagaggtcgtgatagccctgccttaaaacactggccttgactctcctgccttccgttgggtgaactcagtgcagatcatggagcaggtcacgatgctctcaagttggttccctctgagcgaggagctcttggtgaacctgagcaaggtgggcgagtattggtggaacgccatcctggagggagaagagcccatcgacattgacaagatcaacaaggagcgctccatggccaccgtggatgaggaggaacaggcggtgttggacaggcttacctttgactaccaccagaagctgcagggcaagccacagagccatgagctgaaagtccatgagatgctgaagaaggggtgggatgctgaaggttctcccttccgaggccagcgattcgaccctgccatgttcaacatctccccgggggctgtgcagttttaatgaccagaaggaaaggaaaccctcgccggtggggaggcagagccttatcctcggctgcccttcttggctccctgcattccagggacttgctcgtcttgtttacccctagccatcctttctttcaagggtgaaccaggccttccaccctgaccttgcatctccagactgttccagagaaggtgcggggccagctgctatgtggtggccgctgtggctgacactgagtgaaggtgtttgaaatgcaggagaggatatcccagcaaattgggatcacatgcttttgtctccacagcaaccagccactgcaggcagcatgtctttcctcccctgctctctgcttgctgttgttttgacgctattctgcttgcatgtcttctggttgggatgtggagttgttgctggactctcaggcgaagctgaagtcattgaagtgtgtgaagctctgtgcttgcatgagggcaagcaaggaatggctgtgcctgaggctgctctgggaaactccttgccccttgacctcttttgagagcattcacgtggtcttcttgctcatccccttataaatgtgctttgcctgcctcagcctcatggtcagagcagtggagactggagccctgtttgcacgttctagttgttcggagaaagcctaggttctgggctcaggtccagatgcagcggggattctgttctctgactgtggcgaccttgctttggttcttgttgaagtgaaccaagcccggccaccacgcatggcatgctgtgcttggctccccataagacgtcctctttgggtgcacggtgtcaaagtgtgggcaggagtggagagctggtgccctcaggaggagaccacagcatgtccatcagctcagcagagctcgacagccacaagtcctgagaagctttgaccttgaagggcttctgggagaggaggaatttctgcatggggcgtgaaggcacactgtcccaccacaactgaaccagaagagagtgaagactcccctcttcccatcctctgtgccaggtgccagactgtgctccttggaacttatggcccaatcttacctgttctccagggactggtcactgcctcaggacccccaagcctatgccctgagccatggctgctgactgactccagccaaggtgcaaagacgagattatgagacaggtcctcaggcctgtgttccaagtactcacaggggctctgggtgcccatcgccgggagtatggttcagctgccaccggcactgtccatttgcctgtctgtcaagctcagagcatggataagccacacagcagggcagtgcaccctggcaccatgcacggccagcaagaatcaaggcccgcagatgctaagagggcctattgtcaggggaaggtccccgctcctgcacactctctatggatacttgggttgtgggggctctcttggagagtaagtttgtggtttgtttctggtttacagtggtggctgacaccccttgtaagaaagcattcctgggaagtcttctgtgggtccaaacatgttgctccgatcatcacaggagagcaaaaggccctagataccccctttggaatgtgagagtcttgttgtctgatatttgccactgagctggtgaagcccctctaaagagatctcgaccctggggagcagaattcttgtcatctatgaggggtcctgagaaagacttgtcattttttttcctggagttcttcccattgaggtcctaggatttgcacaccactgtcccacaagagctttcctgcctaatgaaaggaggtcttgtggtgtgtgtctcctctcttctctatagttcccgagttggcccccattgcagcccccaccctgtgggtagtcttccagaagtgatgcagtggtgtgagatgccctacaccttgttatttgggagactttgagagtcattcacttccatggtgactagtgtttgttttgcctgattttatattctgtgttgcatttctccccactccctgccctgctttaataaacagcaaaccaatatctagg

SEQ ID NO: 17073 - protein, 117 aa, Homo sapiens; identical to SEQ ID NO: 17039

SEQ ID NO: 17074 - DNA, 2521 bp, Homo sapiens
acttgagtttcaaacactaaagtttctgaaacctccatctaatgagtttaagtctcagtggcccttagcagcagctccattcgtgtggccatgctggaggaaaatggggagcgcgtcctcatggaagggaagctcacccacaagatcaacactgagagttctctctggagtctcgagcccgggaagtgcgttttggtgaacctgagcaaggtgggcgagtattggtggaacgccatcctggagggagaagagcccatcgacattgacaagatcaacaaggagcgctccatggccaccgtggatgaggaggaacaggcggtgttggacaggcttacctttgactaccaccagaagctgcagggcaagccacagagccatgagctgaaagtccatgagatgctgaagaaggggtgggatgctgaaggttctcccttccgaggccagcgattcgaccctgccatgttcaacatctccccgggggctgtgcagttttaatgaccagaaggaaaggaaaccctcgccggtggggaggcagagccttatcctcggctgcccttcttggctccctgcattccagggacttgctcgtcttgtttacccctagccatcctttctttcaagggtgaaccaggccttccaccctgaccttgcatctccagactgttccagagaaggtgcggggccagctgctatgtggtggccgctgtggctgacactgagtgaaggtgtttgaaatgcaggagaggatatcccagcaaattgggatcacatgcttttgtctccacagcaaccagccactgcaggcagcatgtctttcctcccctgctctctgcttgctgttgttttgacgctattctgcttgcatgtcttctggttgggatgtggagttgttgctggactctcaggcgaagctgaagtcattgaagtgtgtgaagctctgtgcttgcatgagggcaagcaaggaatggctgtgcctgaggctgctctgggaaactccttgccccttgacctcttttgagagcattcacgtggtcttcttgctcatccccttataaatgtgctttgcctgcctcagcctcatggtcagagcagtggagactggagccctgtttgcacgttctagttgttcggagaaagcctaggttctgggctcaggtccagatgcagcggggattctgttctctgactgtggcgaccttgctttggttcttgttgaagtgaaccaagcccggccaccacgcatggcatgctgtgcttggctccccataagacgtcctctttgggtgcacggtgtcaaagtgtgggcaggagtggagagctggtgccctcaggaggagaccacagcatgtccatcagctcagcagagctcgacagccacaagtcctgagaagctttgaccttgaagggcttctgggagaggaggaatttctgcatggggcgtgaaggcacactgtcccaccacaactgaaccagaagagagtgaagactcccctcttcccatcctctgtgccaggtgccagactgtgctccttggaacttatggcccaatcttacctgttctccagggactggtcactgcctcaggacccccaagcctatgccctgagccatggctgctgactgactccagccaaggtgcaaagacgagattatgagacaggtcctcaggcctgtgttccaagtactcacaggggctctgggtgcccatcgccgggagtatggttcagctgccaccggcactgtccatttgcctgtctgtcaagctcagagcatggataagccacacagcagggcagtgcaccctggcaccatgcacggccagcaagaatcaaggcccgcagatgctaagagggcctattgtcaggggaaggtccccgctcctgcacactctctatggatacttgggttgtgggggctctcttggagagtaagtttgtggtttgtttctggtttacagtggtggctgacaccccttgtaagaaagcattcctgggaagtcttctgtgggtccaaacatgttgctccgatcatcacaggagagcaaaaggccctagataccccctttggaatgtgagagtcttgttgtctgatatttgccactgagctggtgaagcccctctaaagagatctcgaccctggggagcagaattcttgtcatctatgaggggtcctgagaaagacttgtcattttttttcctggagttcttcccattgaggtcctaggatttgcacaccactgtcccacaagagctttcctgcctaatgaaaggaggtcttgtggtgtgtgtctcctctcttctctatagttcccgagttggcccccattgcagcccccaccctgtgggtagtcttccagaagtgatgcagtggtgtgagatgccctacaccttgttatttgggagactttgagagtcattcacttccatggtgactagtgtttgttttgcctgattttatattctgtgttgcatttctccccactccctgccctgctttaataaacagcaaaccaatatctagg

SEQ ID NO: 17075 - protein, 134 aa, Homo sapiens [sequence omitted]

SEQ ID NO: 17076 - DNA, 2071 bp, Homo sapiens
agtcggcaggtctgaggcggcgctgtgtgtgtgaagcgtacctagggcgggaggcgaaaggaaaccctcgccggtggggaggcagagccttatcctcggctgcccttcttggctccctgcattccagggacttgctcgtcttgtttacccctagccatcctttctttcaagggtgaaccaggccttccaccctgaccttgcatctccagactgttccagagaaggtgcggggccagctgctatgtggtggccgctgtggctgacactgagtgaaggtgtttgaaatgcaggagaggatatcccagcaaattgggatcacatgcttttgtctccacagcaaccagccactgcaggcagcatgtctttcctcccctgctctctgcttgctgttgttttgacgctattctgcttgcatgtcttctggttgggatgtggagttgttgctggactctcaggcgaagctgaagtcattgaagtgtgtgaagctctgtgcttgcatgagggcaagcaaggaatggctgtgcctgaggctgctctgggaaactccttgccccttgacctcttttgagagcattcacgtggtcttcttgctcatccccttataaatgtgctttgcctgcctcagcctcatggtcagagcagtggagactggagccctgtttgcacgttctagttgttcggagaaagcctaggttctgggctcaggtccagatgcagcggggattctgttctctgactgtggcgaccttgctttggttcttgttgaagtgaaccaagcccggccaccacgcatggcatgctgtgcttggctccccataagacgtcctctttgggtgcacggtgtcaaagtgtgggcaggagtggagagctggtgccctcaggaggagaccacagcatgtccatcagctcagcagagctcgacagccacaagtcctgagaagctttgaccttgaagggcttctgggagaggaggaatttctgcatggggcgtgaaggcacactgtcccaccacaactgaaccagaagagagtgaagactcccctcttcccatcctctgtgccaggtgccagactgtgctccttggaacttatggcccaatcttacctgttctccagggactggtcactgcctcaggacccccaagcctatgccctgagccatggctgctgactgactccagccaaggtgcaaagacgagattatgagacaggtcctcaggcctgtgttccaagtactcacaggggctctgggtgcccatcgccgggagtatggttcagctgccaccggcactgtccatttgcctgtctgtcaagctcagagcatggataagccacacagcagggcagtgcaccctggcaccatgcacggccagcaagaatcaaggcccgcagatgctaagagggcctattgtcaggggaaggtccccgctcctgcacactctctatggatacttgggttgtgggggctctcttggagagtaagtttgtggtttgtttctggtttacagtggtggctgacaccccttgtaagaaagcattcctgggaagtcttctgtgggtccaaacatgttgctccgatcatcacaggagagcaaaaggccctagataccccctttggaatgtgagagtcttgttgtctgatatttgccactgagctggtgaagcccctctaaagagatctcgaccctggggagcagaattcttgtcatctatgaggggtcctgagaaagacttgtcattttttttcctggagttcttcccattgaggtcctaggatttgcacaccactgtcccacaagagctttcctgcctaatgaaaggaggtcttgtggtgtgtgtctcctctcttctctatagttcccgagttggcccccattgcagcccccaccctgtgggtagtcttccagaagtgatgcagtggtgtgagatgccctacaccttgttatttgggagactttgagagtcattcacttccatggtgactagtgtttgttttgcctgattttatattctgtgttgcatttctccccactccctgccctgctttaataaacagcaaaccaatatctagg

SEQ ID NO: 17077 - protein, 140 aa, Homo sapiens; identical to SEQ ID NO: 17045

SEQ ID NO: 17078 - DNA, 549 bp, Homo sapiens
agaaaaggctctcttcctcggcgctgcctacggaggtggcagccatctcctcctcggcatcatggccgccctcagaccccttgtgaagcccaagatcgtcaaaaagagaaccaagaagttcatccagcaccagtcagaccaatatgtcaaaattaagcgtaactggcggaaacccagaggcactgacaacagggttcgtagaagattcaagggccagatcttgatgcccaacattggttatgggagcaacaaaaaaacaaagcacatgctgcccagtggcttccggaagttcctggtccacaacatcaaggagctggaagtgctgctgatgtgcaacaaatcttactgtgccgagatcgctcacaatgtttcctccaagaaccgcaaagccatcgtggaaacagctgcccaactggccatcagagtcaccaaccccaatgccaggctgcgcagcgaagaaaatgagtagacagctcgtgtgcacgttttctgtttaaataaatgtaaaaactgcaaaaaaaaaaaaaaaaaaaaagaaaagaaaactaa

SEQ ID NO: 17079 - protein, 135 aa, Homo sapiens; identical to SEQ ID NO: 4829

SEQ ID NO: 17080 - DNA, 332 bp, Homo sapiens
aagtggccagtcggcaggtctgaggcggcgctgtgtgtgtgaagcgtacctagggcgggaggcgacatggagacaggggcggccgagctgtatgaccaggcccttttgggcatcctgcagcacgtgggcaacgtccaggatttcctgcgcgttctctttggcttcctctaccgcaagacagacttctatcgcttgctgcgccacccatcggaccgcatgggcttcccgcccggggccgcgcaggccttggtgctgcaggtattcaaaacctttgaccacatggcccgtcaggatgatgagaagagaaggcaggaacttgaagagaaaatcag

SEQ ID NO: 17081 - protein, 87 aa, Homo sapiens
METGAAELYDQALLGILQHVGNVQDFLRVLFGFLYRKTDFYRLLRHPSDRMGFPPGAAQALVLQVFKTFDHMARQDDEKRRQELEEK

SEQ ID NO: 17082 - DNA, 1891 bp, Homo sapiens
ggtgccactcgcgcgccggccgcgctccgggcttctcttttccctccgacgcgccacggctgcccagacattccggctgccgggtctggagagctccccgaacccctccgcggagaggagcgaggcggcgccagggtggcccccggggcgcgcttggtctcggagaagcggggacgaggccggaggatgagcgactgagggcgacgcgggcactgacgcgagttggggccgcgactaccggcagctgacagcgcgatgagcgactccccagagacgccctagcccggtgtgcgcgccaggcggagcgcgcaggtggggctgggctgttagtggtccgccccacgcgggtcgccggccggcccaggatgggcgctggcaacccgggcccgcgcccgccgctgctacccctgcgcccgctgcgagcccggcgtccggcccgcgccctgcgctcatggacggcggctcccggctggcggcggcgcgcccccgggctgtgaatgcgactcgcccctcggccgcgctccccgcccgcccgcccgccgggacgtggtaggggatgcccagctccactgcgatggcagttggcgcgctctccagttccctcctggtcacctgctgcctgatggtggctctgtgcagtccgagcatcccgctggagaagctggcccaggcaccagagcagccgggccaggagaagcgtgagcacgcctctcgggacggcccggggcgggtgaacgagctcgggcgcccggcgagggacgagggcggcagcggccgggactggaagagcaagagcggccgtgggctcgccggccgtgagccgtggagcaagctgaagcaggcctgggtctcccagggcgggggcgccaaggccggggatctgcaggtccggccccgcggggacaccccgcaggcggaagccctggccgcagccgcccaggacgcgattggcccggaactcgcgcccacgcccgagccacccgaggagtacgtgtacccggactaccgtggcaagggctgcgtggacgagagcggcttcgtgtacgcgatcggggagaagttcgcgccgggcccctcggcctgcccgtgcctgtgcaccgaggaggggccgctgtgcgcgcagcccgagtgcccgaggctgcacccgcgctgcatccacgtcgacacgagccagtgctgcccgcagtgcaaggagaggaagaactactgcgagttccggggcaagacctatcagactttggaggagttcgtggtgtctccatgcgagaggtgtcgctgtgaagccaacggtgaggtgctatgcacagtgtcagcgtgtccccagacggagtgtgtggaccctgtgtacgagcctgatcagtgctgtcccatctgcaaaaatggtccaaactgctttgcagaaaccgcggtgatccctgctggcagagaagtgaagactgacgagtgcaccatatgccactgtacttatgaggaaggcacatggagaatcgagcggcaggccatgtgcacgagacatgaatgcaggcaaatgtagacgcttcccagaacacaaactctgactttttctagaacattttactgatgtgaacattctagatgactctgggaactatcagtcaaagaagacttttgatgaggaataatggaaaattgttggtacttttccttttcttgataacagttactacaacagaaggaaatggatatatttcaaaacatcaacaagaactttgggcataaaatccttctctaaataaatgtgctattttcacagtaagtacacaaaagtacactattatatatcaaatgtatttctataatccctccattagagagcttatataagtgttttctatagatgcagattaaaaatgctgtgttgtcaaccgtc

SEQ ID NO: 17083 - protein, 325 aa, Homo sapiens
MPSSTAMAVGALSSSLLVTCCLMVALCSPSIPLEKLAQAPEQPGQEKREHASRDGPGRVNELGRPARDEGGSGRDWKSKSGRGLAGREPWSKLKQAWVSQGGGAKAGDLQVRPRGDTPQAEALAAAAQDAIGPELAPTPEPPEEYVYPDYRGKGCVDESGFVYAIGEKFAPGPSACPCLCTEEGPLCAQPECPRLHPRCIHVDTSQCCPQCKERKNYCEFRGKTYQTLEEFVVSPCERCRCEANGEVLCTVSACPQTECVDPVYEPDQCCPICKNGPNCFAETAVIPAGREVKTDECTICHCTYEEGTWRIERQAMCTRHECRQM

SEQ ID NO: 17084 - DNA, 610 bp, Homo sapiens
ttccttctaagaggaaggcaagagggtcaaaggcagaaaaaggaaatgcgctgacaaaaggagaacttgcagtgattttctttgaaaatcaaagaagaagccacatgccaaataatgaaggcagccactacagctagaaatgacaaagaattggattccccctaaagctttcagaatgaatacagcttgatttttgcttagtaagactcattttggatttctgatctccagagccataaggctaaaaatctcatagagagattttttaatcaacaagtagaaattcttggcagacgtgcagaacaattacctcaaatatactatattgaaggtactctccaaatggtttggattaatcgctgctttccaggatatggaatgaatgtccagcaacatccaaaatgtcctgagtgctgtgtagttgggacttccactatgatgttgaaaggaaatgaagaaaggagacagccttattttgttcctaatcctggtgggaaagcttcaagtttctcaacagacctcctgcagagcccctgtccatctccttgtgcctaagctaccactccttccatagttccaggaatacttggcttataaggatgccacagga

SEQ ID NO: 17085 - protein, 70 aa, Homo sapiens
MVWINRCFPGYGMNVQQHPKCPECCVVGTSTMMLKGNEERRQPYFVPNPGGKASSFSTDLLQSPCPSPCA

SEQ ID NO: 17086 - DNA, 694 bp, Homo sapiens
aggaaatgcgctgacaaaaggagaacttgcagtgattttctttgaaaatcaaagaagaagccacatgccaaataatgaaggcagccactacagctagaaatgacaaagaattggattccccctaaagctttcagaatgaatacagcttgatttttgcttagtaagactcattttggatttctgatctccagagccataaggctaaaaatctcatagagagattttttaatcaacaagtagaaattcttggcagacgtgcagaacaattacctcaaatatactatattgaaggtactctccaaatggtttggattaatcgctgctttccaggatatggaatgaatgtccagcaacatccaaaatgtcctgagtgctgtgtagttgggacttccactatgatgttgaaaggaaatgaagaaaggagacagccttattttgttcctaatcctggtgggaaagcttcaagtttctcaacagtctcttcaatttggagagtaacagtttgtcctgtgacctctgagggatccaagaagagttgttgattttttagtttgttcagagttttacctgtttttaggatagagttgcaacttccaagcttctacatgccagactggaaactctattgatcagtgtttgagtactaagccaactttggcatatctggaataaactccccttgttcttggcatgc

SEQ ID NO: 17087 - protein, 79 aa, Homo sapiens
MVWINRCFPGYGMNVQQHPKCPECCVVGTSTMMLKGNEERRQPYFVPNPGGKASSFSTVSSIWRVTVCPVTSEGSKKSC

SEQ ID NO: 17088 - DNA, 1881 bp, Homo sapiens
tgcaggtgggcgcgcgttgcctaacgaccttccgcgcggacggtgggcaggcgacggcggcgtgtggatggaggccttcgcccttggcccagcgcggcggggcaggcggcggacccgggccgccggctccctgctctctcgggccgccatcctcctctttatctccgccttcctggtgcgggtgccctcatcagttggacacttggttcgattaccaagagcttttcgcttgaccaaagattcagtgaaaatagtgggatcaacaagttttccagtgaaagcgtatgtcatgctccatcaaaagagtccacacgtgttatgtgtaacgcaacaactgcgaaatgctgaactgatagacccatcattccaatggtatgggcctaaaggaaaagttgtttcagtagaaaaccgcactgcacaaataacatccacaggaagccttgtattccaaaattttgaggagagtatgagtggaatttatacatgtttcctcgaatataaacctactgtggaagaaattgttaaacgtcttcaactaaaatatgctatatatgcttatcgtgagcctcattattattatcagttcacagctcgatatcatgcagctccctgcaatagcatttataatatttcttttgagaagaaacttcttcagattttaagcaaactgcttcttgacctttcatgtgaaatttccttacttaagtctgaatgccatcgcgttaaaatgcaaagagctggtttgcaaaatgaattgttctttgcattttcagtttcatctctagacactgaaaaaggacccaagcgatgtacagaccataactgtgaaccttacaaaagactttttaaggctaaaaatctcatagagagattttttaatcaacaagtagaaattcttggcagacgtgcagaacaattacctcaaatatactatattgaaggtactctccaaatggtttggattaatcgctgctttccaggatatggaatgaatgtccagcaacatccaaaatgtcctgagtgctgtgtgatctgcagccctggatcatataacccccgtgatggaattcattgccttcaatgcaatagcagcctggtgtatggagcaaaaacgtgcttataagccattatcttcagttattcagtggtttattaaatgcaaagtatatatttgaaatattaacataataaattattatgccaaaattaatcatattttacaaaaaaatgtgtcatcattttaatcaaatactgtatgtccaaatgttttatgaggatgaaaatcctctagtctttatccattaatgccaaacctacatatgattctaaaatatttctagtatcactgcattttaaaaatagtttcaaatatactgttttcaggttagcccaaaagattttccaggatttttcagaaatattctgttttatctttactatatgttcactagatccaggccaccatattcttgtataataactttaatttcagtttgtttctttcttttgatttaaatttataggattttattcattctagtttcacctttcacagtttaaagccatatttaaagcctgtggtcttattgcaatttttagcctctttaatataaggcctagttccaaccaccctgtggattttttaatatagttcagtgtgactatcttaaacttttcagttttaagtctcttaaattacctttttggcattttagaatggagtaattattgtatgtgcctaaattaatagttgaactttcttagtggaaagagagaatgaaaaaaagcaatttctttccctgacaacccctctagaaaaaataatcaacaatcatcacaacctttattttatttcttccactatgaaaatgaatattatat

SEQ ID NO: 17089 - protein, 351 aa, Homo sapiens
MEAFALGPARRGRRRTRAAGSLLSRAAILLFISAFLVRVPSSVGHLVRLPRAFRLTKDSVKIVGSTSFPVKAYVMLHQKSPHVLCVTQQLRNAELIDPSFQWYGPKGKVVSVENRTAQITSTGSLVFQNFEESMSGIYTCFLEYKPTVEEIVKRLQLKYAIYAYREPHYYYQFTARYHAAPCNSIYNISFEKKLLQILSKLLLDLSCEISLLKSECHRVKMQRAGLQNELFFAFSVSSLDTEKGPKRCTDHNCEPYKRLFKAKNLIERFFNQQVEILGRRAEQLPQIYYIEGTLQMVWINRCFPGYGMNVQQHPKCPECCVICSPGSYNPRDGIHCLQCNSSLVYGAKTCL

SEQ ID NO: 17090 - DNA, 1208 bp, Homo sapiens
tgcaggtgggcgcgcgttgcctaacgaccttccgcgcggacggtgggcaggcgacggcggcgtgtggatggaggccttcgcccttggcccagcgcggcggggcaggcggcggacccgggccgccggctccctgctctctcgggccgccatcctcctctttatctccgccttcctggtgcgggtgccctcatcagttggacacttggttcgattaccaagagcttttcgcttgaccaaagattcagtgaaaatagtgggatcaacaagttttccagtgaaagcgtatgtcatgctccatcaaaagagtccacacgtgttatgtgtaacgcaacaactgcgaaatgctgaactgatagacccatcattccaatggtatgggcctaaaggaaaagttgtttcagtagaaaaccgcactgcacaaataacatccacaggaagccttgtattccaaaattttgaggagagtatgagtggaatttatacatgtttcctcgaatataaacctactgtggaagaaattgttaaacgtcttcaactaaaatatgctatatatgcttatcgtgagcctcattattattatcagttcacagctcgatatcatgcagctccctgcaatagcatttataatatttcttttgagaagaaacttcttcagattttaagcaaactgcttcttgacctttcatgtgaaatttccttacttaagtctgaatgccatcgcgttaaaatgcaaagagctggtttgcaaaatgaattgttctttgcattttcagtttcatctctagacactgaaaaaggacccaagcgatgtacagaccataactgtgaaccttacaaaagactttttaaggctaaaaatctcatagagagattttttaatcaacaagtagaaattcttggcagacgtgcagaacaattacctcaaatatactatattgaaggtactctccaaatggtttggattaatcgctgctttccaggatatggaatgaatgtccagcaacatccaaaatgtcctgagtgctgtgtgatctgcagccctggatcatataacccccgtgatggaattcattgccttcaatgcaatagcagcctggtgtatggagcaaaaacgtgcttataagccattatcttcagttattcagtggtttattaaatgcaaagtatatatttgaaatattaacataataaattattatgccaaaatt

SEQ ID NO: 17091 - protein, 351 aa, Homo sapiens; identical to SEQ ID NO: 17089

SEQ ID NO: 17092 - DNA, 1733 bp, Homo sapiens
ccggcggccgctggccttgggtccccgctgctggttctcctccctcctcctcgcattctcctcctcctctgctcctcccgatccctcctccgccgcctggtccctcctcctcccgccctgcctccccgcgcctcggcccgcgcgagctagacgtccgggcagcccccggcgcagcgcggccgcagcagcctccgccccccgcacggtgtgagcgcccgacgcggccgaggcggccggagtcccgagctagccccggcggccgccgccgcccagaccggacgacaggccacctcgtcggcgtccgcccgagtccccgcctcgccgccaacgccacaaccaccgcgcacggccccctgactccgtccagtattgatcgggagagccggagcgagctcttcggggagcagcgatgcgaccctccgggacggccggggcagcgctcctggcgctgctggctgcgctctgcccggcgagtcgggctctggaggaaaagaaagtttgccaaggcacgagtaacaagctcacgcagttgggcacttttgaagatcattttctcagcctccagaggatgttcaataactgtgaggtggtccttgggaatttggaaattacctatgtgcagaggaattatgatctttccttcttaaagaccatccaggaggtggctggttatgtcctcattgccctcaacacagtggagcgaattcctttggaaaacctgcagatcatcagaggaaatatgtactacgaaaattcctatgccttagcagtcttatctaactatgatgcaaataaaaccggactgaaggagctgcccatgagaaatttacaggaaatcctgcatggcgccgtgcggttcagcaacaaccctgccctgtgcaacgtggagagcatccagtggcgggacatagtcagcagtgactttctcagcaacatgtcgatggacttccagaaccacctgggcagctgccaaaagtgtgatccaagctgtcccaatgggagctgctggggtgcaggagaggagaactgccagaaactgaccaaaatcatctgtgcccagcagtgctccgggcgctgccgtggcaagtcccccagtgactgctgccacaaccagtgtgctgcaggctgcacaggcccccgggagagcgactgcctggtctgccgcaaattccgagacgaagccacgtgcaaggacacctgccccccactcatgctctacaaccccaccacgtaccagatggatgtgaaccccgagggcaaatacagctttggtgccacctgcgtgaagaagtgtccccgtaattatgtggtgacagatcacggctcgtgcgtccgagcctgtggggccgacagctatgagatggaggaagacggcgtccgcaagtgtaagaagtgcgaagggccttgccgcaaagtgtgtaacggaataggtattggtgaatttaaagactcactctccataaatgctacgaatattaaacacttcaaaaactgcacctccatcagtggcgatctccacatcctgccggtggcatttaggggtgactccttcacacatactcctcctctggatccacaggaactggatattctgaaaaccgtaaaggaaatcacaggtttgagctgaattatcacatgaatataaatgggaaatcagtgttttagagagagaacttttcgacatatttcctgttcccttggaataaaaacatttcttctgaaattttaccgtt

SEQ ID NO: 17093 - protein, 405 aa, Homo sapiens; identical to SEQ ID NO: 2024

SEQ ID NO: 17094 - DNA, 2250 bp, Homo sapiens
gtccgggcagcccccggcgcagcgcggccgcagcagcctccgccccccgcacggtgtgagcgcccgacgcggccgaggcggccggagtcccgagctagccccggcggccgccgccgcccagaccggacgacaggccacctcgtcggcgtccgcccgagtccccgcctcgccgccaacgccacaaccaccgcgcacggccccctgactccgtccagtattgatcgggagagccggagcgagctcttcggggagcagcgatgcgaccctccgggacggccggggcagcgctcctggcgctgctggctgcgctctgcccggcgagtcgggctctggaggaaaagaaagtttgccaaggcacgagtaacaagctcacgcagttgggcacttttgaagatcattttctcagcctccagaggatgttcaataactgtgaggtggtccttgggaatttggaaattacctatgtgcagaggaattatgatctttccttcttaaagaccatccaggaggtggctggttatgtcctcattgccctcaacacagtggagcgaattcctttggaaaacctgcagatcatcagaggaaatatgtactacgaaaattcctatgccttagcagtcttatctaactatgatgcaaataaaaccggactgaaggagctgcccatgagaaatttacaggaaatcctgcatggcgccgtgcggttcagcaacaaccctgccctgtgcaacgtggagagcatccagtggcgggacatagtcagcagtgactttctcagcaacatgtcgatggacttccagaaccacctgggcagctgccaaaagtgtgatccaagctgtcccaatgggagctgctggggtgcaggagaggagaactgccagaaactgaccaaaatcatctgtgcccagcagtgctccgggcgctgccgtggcaagtcccccagtgactgctgccacaaccagtgtgctgcaggctgcacaggcccccgggagagcgactgcctggtctgccgcaaattccgagacgaagccacgtgcaaggacacctgccccccactcatgctctacaaccccaccacgtaccagatggatgtgaaccccgagggcaaatacagctttggtgccacctgcgtgaagaagtgtccccgtaattatgtggtgacagatcacggctcgtgcgtccgagcctgtggggccgacagctatgagatggaggaagacggcgtccgcaagtgtaagaagtgcgaagggccttgccgcaaagtgtgtaacggaataggtattggtgaatttaaagactcactctccataaatgctacgaatattaaacacttcaaaaactgcacctccatcagtggcgatctccacatcctgccggtggcatttaggggtgactccttcacacatactcctcctctggatccacaggaactggatattctgaaaaccgtaaaggaaatcacagggtttttgctgattcaggcttggcctgaaaacaggacggacctccatgcctttgagaacctagaaatcatacgcggcaggaccaagcaacatggtcagttttctcttgcagtcgtcagcctgaacataacatccttgggattacgctccctcaaggagataagtgatggagatgtgataatttcaggaaacaaaaatttgtgctatgcaaatacaataaactggaaaaaactgtttgggacctccggtcagaaaaccaaaattataagcaacagaggtgaaaacagctgcaaggccacaggccaggtctgccatgccttgtgctcccccgagggctgctggggcccggagcccagggactgcgtctcttgccggaatgtcagccgaggcagggaatgcgtggacaagtgcaaccttctggagggtgagccaagggagtttgtggagaactctgagtgcatacagtgccacccagagtgcctgcctcaggccatgaacatcacctgcacaggacggggaccagacaactgtatccagtgtgcccactacattgacggcccccactgcgtcaagacctgcccggcaggagtcatgggagaaaacaacaccctggtctggaagtacgcagacgccggccatgtgtgccacctgtgccatccaaactgcacctacgggtcctaataaatcttcactgtctgactttagtctcccactaaaactgcatttcctttctacaatttcaatttctccctttgcttcaaataaagtcctgacactattcatttga

SEQ ID NO: 17095 - protein, 628 aa, Homo sapiens; identical to SEQ ID NO: 2022

SEQ ID NO: 17096 - DNA, 2876 bp, Homo sapiens
gtccgggcagcccccggcgcagcgcggccgcagcagcctccgccccccgcacggtgtgagcgcccgacgcggccgaggcggccggagtcccgagctagccccggcggccgccgccgcccagaccggacgacaggccacctcgtcggcgtccgcccgagtccccgcctcgccgccaacgccacaaccaccgcgcacggccccctgactccgtccagtattgatcgggagagccggagcgagctcttcggggagcagcgatgcgaccctccgggacggccggggcagcgctcctggcgctgctggctgcgctctgcccggcgagtcgggctctggaggaaaagaaagtttgccaaggcacgagtaacaagctcacgcagttgggcacttttgaagatcattttctcagcctccagaggatgttcaataactgtgaggtggtccttgggaatttggaaattacctatgtgcagaggaattatgatctttccttcttaaagaccatccaggaggtggctggttatgtcctcattgccctcaacacagtggagcgaattcctttggaaaacctgcagatcatcagaggaaatatgtactacgaaaattcctatgccttagcagtcttatctaactatgatgcaaataaaaccggactgaaggagctgcccatgagaaatttacaggaaatcctgcatggcgccgtgcggttcagcaacaaccctgccctgtgcaacgtggagagcatccagtggcgggacatagtcagcagtgactttctcagcaacatgtcgatggacttccagaaccacctgggcagctgccaaaagtgtgatccaagctgtcccaatgggagctgctggggtgcaggagaggagaactgccagaaactgaccaaaatcatctgtgcccagcagtgctccgggcgctgccgtggcaagtcccccagtgactgctgccacaaccagtgtgctgcaggctgcacaggcccccgggagagcgactgcctggtctgccgcaaattccgagacgaagccacgtgcaaggacacctgccccccactcatgctctacaaccccaccacgtaccagatggatgtgaaccccgagggcaaatacagctttggtgccacctgcgtgaagaagtgtccccgtaattatgtggtgacagatcacggctcgtgcgtccgagcctgtggggccgacagctatgagatggaggaagacggcgtccgcaagtgtaagaagtgcgaagggccttgccgcaaagtgtgtaacggaataggtattggtgaatttaaagactcactctccataaatgctacgaatattaaacacttcaaaaactgcacctccatcagtggcgatctccacatcctgccggtggcatttaggggtgactccttcacacatactcctcctctggatccacaggaactggatattctgaaaaccgtaaaggaaatcacagggtttttgctgattcaggcttggcctgaaaacaggacggacctccatgcctttgagaacctagaaatcatacgcggcaggaccaagcaacatggtcagttttctcttgcagtcgtcagcctgaacataacatccttgggattacgctccctcaaggagataagtgatggagatgtgataatttcaggaaacaaaaatttgtgctatgcaaatacaataaactggaaaaaactgtttgggacctccggtcagaaaaccaaaattataagcaacagaggtgaaaacagctgcaaggccacaggccaggtctgccatgccttgtgctcccccgagggctgctggggcccggagcccagggactgcgtctcttgccggaatgtcagccgaggcagggaatgcgtggacaagtgcaaccttctggagggtgagccaagggagtttgtggagaactctgagtgcatacagtgccacccagagtgcctgcctcaggccatgaacatcacctgcacaggacggggaccagacaactgtatccagtgtgcccactacattgacggcccccactgcgtcaagacctgcccggcaggagtcatgggagaaaacaacaccctggtctggaagtacgcagacgccggccatgtgtgccacctgtgccatccaaactgcacctacgggccaggaaatgagagtctcaaagccatgttattctgcctttttaaactatcatcctgtaatcaaagtaatgatggcagcgtgtcccaccagagcgggagcccagctgctcaggagtcatgcttaggatggatcccttctcttctgccgtcagagtttcagctgggttggggtggatgcagccacctccatgcctggccttctgcatctgtgatcatcacggcctcctcctgccactgagcctcatgccttcacgtgtctgttccccccgcttttcctttctgccacccctgcacgtgggccgccaggttcccaagagtatcctacccatttccttccttccactccctttgccagtgcctctcaccccaactagtagctaaccatcacccccaggactgacctcttcctcctcgctgccagatgattgttcaaagcacagaatttgtcagaaacctgcagggactccatgctgccagccttctccgtaattagcatggccccagtccatgcttctagccttggttccttctgcccctctgtttgaaattctagagccagctgtgggacaattatctgtgtcaaaagccagatgtgaaaacatctcaataacaaactggctgctttgttcaatgctagaacaacgcctgtcacagagtagaaactcaaaaatatttgctgagtgaatgaacaaatgaataaatgcataataaataattaaccaccaatccaacatccaga

SEQ ID NO: 17097 - protein, 705 aa, Homo sapiens; identical to SEQ ID NO: 2026

SEQ ID NO: 17098 - DNA, 5610 bp, Homo sapiens
gtccgggcagcccccggcgcagcgcggccgcagcagcctccgccccccgcacggtgtgagcgcccgacgcggccgaggcggccggagtcccgagctagccccggcggccgccgccgcccagaccggacgacaggccacctcgtcggcgtccgcccgagtccccgcctcgccgccaacgccacaaccaccgcgcacggccccctgactccgtccagtattgatcgggagagccggagcgagctcttcggggagcagcgatgcgaccctccgggacggccggggcagcgctcctggcgctgctggctgcgctctgcccggcgagtcgggctctggaggaaaagaaagtttgccaaggcacgagtaacaagctcacgcagttgggcacttttgaagatcattttctcagcctccagaggatgttcaataactgtgaggtggtccttgggaatttggaaattacctatgtgcagaggaattatgatctttccttcttaaagaccatccaggaggtggctggttatgtcctcattgccctcaacacagtggagcgaattcctttggaaaacctgcagatcatcagaggaaatatgtactacgaaaattcctatgccttagcagtcttatctaactatgatgcaaataaaaccggactgaaggagctgcccatgagaaatttacaggaaatcctgcatggcgccgtgcggttcagcaacaaccctgccctgtgcaacgtggagagcatccagtggcgggacatagtcagcagtgactttctcagcaacatgtcgatggacttccagaaccacctgggcagctgccaaaagtgtgatccaagctgtcccaatgggagctgctggggtgcaggagaggagaactgccagaaactgaccaaaatcatctgtgcccagcagtgctccgggcgctgccgtggcaagtcccccagtgactgctgccacaaccagtgtgctgcaggctgcacaggcccccgggagagcgactgcctggtctgccgcaaattccgagacgaagccacgtgcaaggacacctgccccccactcatgctctacaaccccaccacgtaccagatggatgtgaaccccgagggcaaatacagctttggtgccacctgcgtgaagaagtgtccccgtaattatgtggtgacagatcacggctcgtgcgtccgagcctgtggggccgacagctatgagatggaggaagacggcgtccgcaagtgtaagaagtgcgaagggccttgccgcaaagtgtgtaacggaataggtattggtgaatttaaagactcactctccataaatgctacgaatattaaacacttcaaaaactgcacctccatcagtggcgatctccacatcctgccggtggcatttaggggtgactccttcacacatactcctcctctggatccacaggaactggatattctgaaaaccgtaaaggaaatcacagggtttttgctgattcaggcttggcctgaaaacaggacggacctccatgcctttgagaacctagaaatcatacgcggcaggaccaagcaacatggtcagttttctcttgcagtcgtcagcctgaacataacatccttgggattacgctccctcaaggagataagtgatggagatgtgataatttcaggaaacaaaaatttgtgctatgcaaatacaataaactggaaaaaactgtttgggacctccggtcagaaaaccaaaattataagcaacagaggtgaaaacagctgcaaggccacaggccaggtctgccatgccttgtgctcccccgagggctgctggggcccggagcccagggactgcgtctcttgccggaatgtcagccgaggcagggaatgcgtggacaagtgcaaccttctggagggtgagccaagggagtttgtggagaactctgagtgcatacagtgccacccagagtgcctgcctcaggccatgaacatcacctgcacaggacggggaccagacaactgtatccagtgtgcccactacattgacggcccccactgcgtcaagacctgcccggcaggagtcatgggagaaaacaacaccctggtctggaagtacgcagacgccggccatgtgtgccacctgtgccatccaaactgcacctacggatgcactgggccaggtcttgaaggctgtccaacgaatgggcctaagatcccgtccatcgccactgggatggtgggggccctcctcttgctgctggtggtggccctggggatcggcctcttcatgcgaaggcgccacatcgttcggaagcgcacgctgcggaggctgctgcaggagagggagcttgtggagcctcttacacccagtggagaagctcccaaccaagctctcttgaggatcttgaaggaaactgaattcaaaaagatcaaagtgctgggctccggtgcgttcggcacggtgtataagggactctggatcccagaaggtgagaaagttaaaattcccgtcgctatcaaggaattaagagaagcaacatctccgaaagccaacaaggaaatcctcgatgaagcctacgtgatggccagcgtggacaacccccacgtgtgccgcctgctgggcatctgcctcacctccaccgtgcagctcatcacgcagctcatgcccttcggctgcctcctggactatgtccgggaacacaaagacaatattggctcccagtacctgctcaactggtgtgtgcagatcgcaaagggcatgaactacttggaggaccgtcgcttggtgcaccgcgacctggcagccaggaacgtactggtgaaaacaccgcagcatgtcaagatcacagattttgggctggccaaactgctgggtgcggaagagaaagaataccatgcagaaggaggcaaagtgcctatcaagtggatggcattggaatcaattttacacagaatctatacccaccagagtgatgtctggagctacggggtgactgtttgggagttgatgacctttggatccaagccatatgacggaatccctgccagcgagatctcctccatcctggagaaaggagaacgcctccctcagccacccatatgtaccatcgatgtctacatgatcatggtcaagtgctggatgatagacgcagatagtcgcccaaagttccgtgagttgatcatcgaattctccaaaatggcccgagacccccagcgctaccttgtcattcagggggatgaaagaatgcatttgccaagtcctacagactccaacttctaccgtgccctgatggatgaagaagacatggacgacgtggtggatgccgacgagtacctcatcccacagcagggcttcttcagcagcccctccacgtcacggactcccctcctgagctctctgagtgcaaccagcaacaattccaccgtggcttgcattgatagaaatgggctgcaaagctgtcccatcaaggaagacagcttcttgcagcgatacagctcagaccccacaggcgccttgactgaggacagcatagacgacaccttcctcccagtgcctgaatacataaaccagtccgttcccaaaaggcccgctggctctgtgcagaatcctgtctatcacaatcagcctctgaaccccgcgcccagcagagacccacactaccaggacccccacagcactgcagtgggcaaccccgagtatctcaacactgtccagcccacctgtgtcaacagcacattcgacagccctgcccactgggcccagaaaggcagccaccaaattagcctggacaaccctgactaccagcaggacttctttcccaaggaagccaagccaaatggcatctttaagggctccacagctgaaaatgcagaatacctaagggtcgcgccacaaagcagtgaatttattggagcatgaccacggaggatagtatgagccctaaaaatccagactctttcgatacccaggaccaagccacagcaggtcctccatcccaacagccatgcccgcattagctcttagacccacagactggttttgcaacgtttacaccgactagccaggaagtacttccacctcgggcacattttgggaagttgcattcctttgtcttcaaactgtgaagcatttacagaaacgcatccagcaagaatattgtccctttgagcagaaatttatctttcaaagaggtatatttgaaaaaaaaaaaaagtatatgtgaggatttttattgattggggatcttggagtttttcattgtcgctattgatttttacttcaatgggctcttccaacaaggaagaagcttgctggtagcacttgctaccctgagttcatccaggcccaactgtgagcaaggagcacaagccacaagtcttccagaggatgcttgattccagtggttctgcttcaaggcttccactgcaaaacactaaagatccaagaaggccttcatggccccagcaggccggatcggtactgtatcaagtcatggcaggtacagtaggataagccactctgtcccttcctgggcaaagaagaaacggaggggatggaattcttccttagacttacttttgtaaaaatgtccccacggtacttactccccactgatggaccagtggtttccagtcatgagcgttagactgacttgtttgtcttccattccattgttttgaaactcagtatgctgcccctgtcttgctgtcatgaaatcagcaagagaggatgacacatcaaataataactcggattccagcccacattggattcatcagcatttggaccaatagcccacagctgagaatgtggaatacctaaggatagcaccgcttttgttctcgcaaaaacgtatctcctaatttgaggctcagatgaaatgcatcaggtcctttggggcatagatcagaagactacaaaaatgaagctgctctgaaatctcctttagccatcaccccaaccccccaaaattagtttgtgttacttatggaagatagttttctccttttacttcacttcaaaagctttttactcaaagagtatatgttccctccaggtcagctgcccccaaaccccctccttacgctttgtcacacaaaaagtgtctctgccttgagtcatctattcaagcacttacagctctggccacaacagggcattttacaggtgcgaatgacagtagcattatgagtagtgtggaattcaggtagtaaatatgaaactagggtttgaaattgataatgctttcacaacatttgcagatgttttagaaggaaaaaagttccttcctaaaataatttctctacaattggaagattggaagattcagctagttaggagcccaccttttttcctaatctgtgtgtgccctgtaacctgactggttaacagcagtcctttgtaaacagtgttttaaactctcctagtcaatatccaccccatccaatttatcaaggaagaaatggttcagaaaatattttcagcctacagttatgttcagtcacacacacatacaaaatgttccttttgcttttaaagtaatttttgactcccagatcagtcagagcccctacagcattgttaagaaagtatttgatttttgtctcaatgaaaataaaactatattcatttccactct

SEQ ID NO: 17099 - protein, 1210 aa, Homo sapiens [sequence omitted]

SEQ ID NO: 17100 - DNA, 6368 bp, Homo sapiens
gtccgggcagcccccggcgcagcgcggccgcagcagcctccgccccccgcacggtgtgagcgcccgacgcggccgaggcggccggagtcccgagctagccccggcggccgccgccgcccagaccggacgacaggccacctcgtcggcgtccgcccgagtccccgcctcgccgccaacgccacaaccaccgcgcacggccccctgactccgtccagtattgatcgggagagccggagcgagctcttcggggagcagcgatgcgaccctccgggacggccggggcagcgctcctggcgctgctggctgcgctctgcccggcgagtcgggctctggaggaaaagaaagtttgccaaggcacgagtaacaagctcacgcagttgggcacttttgaagatcattttctcagcctccagaggatgttcaataactgtgaggtggtccttgggaatttggaaattacctatgtgcagaggaattatgatctttccttcttaaagaccatccaggaggtggctggttatgtcctcattgccctcaacacagtggagcgaattcctttggaaaacctgcagatcatcagaggaaatatgtactacgaaaattcctatgccttagcagtcttatctaactatgatgcaaataaaaccggactgaaggagctgcccatgagaaatttacaggaaatcctgcatggcgccgtgcggttcagcaacaaccctgccctgtgcaacgtggagagcatccagtggcgggacatagtcagcagtgactttctcagcaacatgtcgatggacttccagaaccacctgggcagctgccaaaagtgtgatccaagctgtcccaatgggagctgctggggtgcaggagaggagaactgccagaaactgaccaaaatcatctgtgcccagcagtgctccgggcgctgccgtggcaagtcccccagtgactgctgccacaaccagtgtgctgcaggctgcacaggcccccgggagagcgactgcctggtctgccgcaaattccgagacgaagccacgtgcaaggacacctgccccccactcatgctctacaaccccaccacgtaccagatggatgtgaaccccgagggcaaatacagctttggtgccacctgcgtgaagaagtgtccccgtaattatgtggtgacagatcacggctcgtgcgtccgagcctgtggggccgacagctatgagatggaggaagacggcgtccgcaagtgtaagaagtgcgaagggccttgccgcaaagtgtgtaacggaataggtattggtgaatttaaagactcactctccataaatgctacgaatattaaacacttcaaaaactgcacctccatcagtggcgatctccacatcctgccggtggcatttaggggtgactccttcacacatactcctcctctggatccacaggaactggatattctgaaaaccgtaaaggaaatcacagggtttttgctgattcaggcttggcctgaaaacaggacggacctccatgcctttgagaacctagaaatcatacgcggcaggaccaagcaacatggtcagttttctcttgcagtcgtcagcctgaacataacatccttgggattacgctccctcaaggagataagtgatggagatgtgataatttcaggaaacaaaaatttgtgctatgcaaatacaataaactggaaaaaactgtttgggacctccggtcagaaaaccaaaattataagcaacagaggtgaaaacagctgcaaggccacaggccaggtctgccatgccttgtgctcccccgagggctgctggggcccggagcccagggactgcgtctcttgccggaatgtcagccgaggcagggaatgcgtggacaagtgcaaccttctggagggtgagccaagggagtttgtggagaactctgagtgcatacagtgccacccagagtgcctgcctcaggccatgaacatcacctgcacaggacggggaccagacaactgtatccagtgtgcccactacattgacggcccccactgcgtcaagacctgcccggcaggagtcatgggagaaaacaacaccctggtctggaagtacgcagacgccggccatgtgtgccacctgtgccatccaaactgcacctacggatgcactgggccaggtcttgaaggctgtccaacgaatgggcctaagatcccgtccatcgccactgggatggtgggggccctcctcttgctgctggtggtggccctggggatcggcctcttcatgcgaaggcgccacatcgttcggaagcgcacgctgcggaggctgctgcaggagagggagcttgtggagcctcttacacccagtggagaagctcccaaccaagctctcttgaggatcttgaaggaaactgaattcaaaaagatcaaagtgctgggctccggtgcgttcggcacggtgtataagggactctggatcccagaaggtgagaaagttaaaattcccgtcgctatcaaggaattaagagaagcaacatctccgaaagccaacaaggaaatcctcgatgaagcctacgtgatggccagcgtggacaacccccacgtgtgccgcctgctgggcatctgcctcacctccaccgtgcagctcatcacgcagctcatgcccttcggctgcctcctggactatgtccgggaacacaaagacaatattggctcccagtacctgctcaactggtgtgtgcagatcgcaaagggcatgaactacttggaggaccgtcgcttggtgcaccgcgacctggcagccaggaacgtactggtgaaaacaccgcagcatgtcaagatcacagattttgggctggccaaactgctgggtgcggaagagaaagaataccatgcagaaggaggcaaagtgcctatcaagtggatggcattggaatcaattttacacagaatctatacccaccagagtgatgtctggagctacggggtgactgtttgggagttgatgacctttggatccaagccatatgacggaatccctgccagcgagatctcctccatcctggagaaaggagaacgcctccctcagccacccatatgtaccatcgatgtctacatgatcatggtcaagtgctggatgatagacgcagatagtcgcccaaagttccgtgagttgatcatcgaattctccaaaatggcccgagacccccagcgctaccttgtcattcagggggatgaaagaatgcatttgccaagtcctacagactccaacttctaccgtgccctgatggatgaagaagacatggacgacgtggtggatgccgacgagtacctcatcccacagcagggcttcttcagcagcccctccacgtcacggactcccctcctgagctctctgagtgcaaccagcaacaattccaccgtggcttgcattgatagaaatgggctgcaaagctgtcccatcaaggaagacagcttcttgcagcgatacagctcagaccccacaggcgccttgactgaggacagcatagacgacaccttcctcccagtgcctgaatacataaaccagtccgttcccaaaaggcccgctggctctgtgcagaatcctgtctatcacaatcagcctctgaaccccgcgcccagcagagacccacactaccaggacccccacagcactgcagtgggcaaccccgagtatctcaacactgtccagcccacctgtgtcaacagcacattcgacagccctgcccactgggcccagaaaggcagccaccaaattagcctggacaaccctgactaccagcaggacttctttcccaaggaagccaagccaaatggcatctttaagggctccacagctgaaaatgcagaatacctaagggtcgcgccacaaagcagtgaatttattggagcatgaccacggaggatagtatgagccctaaaaatccagactctttcgatacccaggaccaagccacagcaggtcctccatcccaacagccatgcccgcattagctcttagacccacagactggttttgcaacgtttacaccgactagccaggaagtacttccacctcgggcacattttgggaagttgcattcctttgtcttcaaactgtgaagcatttacagaaacgcatccagcaagaatattgtccctttgagcagaaatttatctttcaaagaggtatatttgaaaaaaaaaaaaagtatatgtgaggatttttattgattggggatcttggagtttttcattgtcgctattgatttttacttcaatgggctcttccaacaaggaagaagcttgctggtagcacttgctaccctgagttcatccaggcccaactgtgagcaaggagcacaagccacaagtcttccagaggatgcttgattccagtggttctgcttcaaggcttccactgcaaaacactaaagatccaagaaggccttcatggccccagcaggccggatcggtactgtatcaagtcatggcaggtacagtaggataagccactctgtcccttcctgggcaaagaagaaacggaggggatggaattcttccttagacttacttttgtaaaaatgtccccacggtacttactccccactgatggaccagtggtttccagtcatgagcgttagactgacttgtttgtcttccattccattgttttgaaactcagtatgctgcccctgtcttgctgtcatgaaatcagcaagagaggatgacacatcaaataataactcggattccagcccacattggattcatcagcatttggaccaatagcccacagctgagaatgtggaatacctaaggatagcaccgcttttgttctcgcaaaaacgtatctcctaatttgaggctcagatgaaatgcatcaggtcctttggggcatagatcagaagactacaaaaatgaagctgctctgaaatctcctttagccatcaccccaaccccccaaaattagtttgtgttacttatggaagatagttttctccttttacttcacttcaaaagctttttactcaaagagtatatgttccctccaggtcagctgcccccaaaccccctccttacgctttgtcacacaaaaagtgtctctgccttgagtcatctattcaagcacttacagctctggccacaacagggcattttacaggtgcgaatgacagtagcattatgagtagtgtggaattcaggtagtaaatatgaaactagggtttgaaattgataatgctttcacaacatttgcagatgttttagaaggaaaaaagttccttcctaaaataatttctctacaattggaagattggaagattcagctagttaggagcccaccttttttcctaatctgtgtgtgccctgtaacctgactggttaacagcagtcctttgtaaacagtgttttaaactctcctagtcaatatccaccccatccaatttatcaaggaagaaatggttcagaaaatattttcagcctacagttatgttcagtcacacacacatacaaaatgttccttttgcttttaaagtaatttttgactcccagatcagtcagagcccctacagcattgttaagaaagtatttgatttttgtctcaatgaaaataaaactatattcatttccactctattatgctctcaaatacccctaagcatctatactagcctggtatgggtatgaaagatacaaagataaataaaacatagtccctgattctaagaaattcacaatttagcaaaggaaatggactcatagatgctaaccttaaaacaacgtgacaaatgccagacaggacccatcagccaggcactgtgagagcacagagcagggaggttgggtcctgcctgaggagacctggaagggaggcctcacaggaggatgaccaggtctcagtcagcggggaggtggaaagtgcaggtgcatcaggggcaccctgaccgaggaaacagctgccagaggcctccactgctaaagtccacataaggctgaggtcagtcaccctaaacaacctgctccctctaagccaggggatgagcttggagcatcccacaagttccctaaaagttgcagcccccagggggattttgagctatcatctctgcacatgcttagtgagaagactacacaacatttctaagaatctgagattttatattgtcagttaaccactttcattattcattcacctcaggacatgcagaaatatttcagtcagaactgggaaacagaaggacctacattctgctgtcacttatgtgtcaagaagcagatgatcgatgaggcaggtcagttgtaagtgagtcacattgtagcattaaattctagtatttttgtagtttgaaacagtaacttaataaaagagcaaaagctattctagctttcttct

SEQ ID NO: 17101 - protein, 1210 aa, Homo sapiens [sequence omitted]

SEQ ID NO: 17102 - DNA, 2604 bp, Homo sapiens
gtccgggcagcccccggcgcagcgcggccgcagcagcctccgccccccgcacggtgtgagcgcccgacgcggccgaggcggccggagtcccgagctagccccggcggccgccgccgcccagaccggacgacaggccacctcgtcggcgtccgcccgagtccccgcctcgccgccaacgccacaaccaccgcgcacggccccctgactccgtccagtattgatcgggagagccggagcgagctcttcggggagcagcgatgcgaccctccgggacggccggggcagcgctcctggcgctgctggctgcgctctgcccggcgagtcgggctctggaggaaaagaaagtttgccaaggcacgagtaacaagctcacgcagttgggcacttttgaagatcattttctcagcctccagaggatgttcaataactgtgaggtggtccttgggaatttggaaattacctatgtgcagaggaattatgatctttccttcttaaagaccatccaggaggtggctggttatgtcctcattgccctcaacacagtggagcgaattcctttggaaaacctgcagatcatcagaggaaatatgtactacgaaaattcctatgccttagcagtcttatctaactatgatgcaaataaaaccggactgaaggagctgcccatgagaaatttacaggaaatcctgcatggcgccgtgcggttcagcaacaaccctgccctgtgcaacgtggagagcatccagtggcgggacatagtcagcagtgactttctcagcaacatgtcgatggacttccagaaccacctgggcagctgccaaaagtgtgatccaagctgtcccaatgggagctgctggggtgcaggagaggagaactgccagaaactgaccaaaatcatctgtgcccagcagtgctccgggcgctgccgtggcaagtcccccagtgactgctgccacaaccagtgtgctgcaggctgcacaggcccccgggagagcgactgcctggtctgccgcaaattccgagacgaagccacgtgcaaggacacctgccccccactcatgctctacaaccccaccacgtaccagatggatgtgaaccccgagggcaaatacagctttggtgccacctgcgtgaagaagtgtccccgtaattatgtggtgacagatcacggctcgtgcgtccgagcctgtggggccgacagctatgagatggaggaagacggcgtccgcaagtgtaagaagtgcgaagggccttgccgcaaagtgtgtaacggaataggtattggtgaatttaaagactcactctccataaatgctacgaatattaaacacttcaaaaactgcacctccatcagtggcgatctccacatcctgccggtggcatttaggggtgactccttcacacatactcctcctctggatccacaggaactggatattctgaaaaccgtaaaggaaatcacagggtttttgctgattcaggcttggcctgaaaacaggacggacctccatgcctttgagaacctagaaatcatacgcggcaggaccaagcaacatggtcagttttctcttgcagtcgtcagcctgaacataacatccttgggattacgctccctcaaggagataagtgatggagatgtgataatttcaggaaacaaaaatttgtgctatgcaaatacaataaactggaaaaaactgtttgggacctccggtcagaaaaccaaaattataagcaacagaggtgaaaacagctgcaaggccacaggccaggtctgccatgccttgtgctcccccgagggctgctggggcccggagcccagggactgcgtctcttgccggaatgtcagccgaggcagggaatgcgtggacaagtgcaaccttctggagggtgagccaagggagtttgtggagaactctgagtgcatacagtgccacccagagtgcctgcctcaggccatgaacatcacctgcacaggacggggaccagacaactgtatccagtgtgcccactacattgacggcccccactgcgtcaagacctgcccggcaggagtcatgggagaaaacaacaccctggtctggaagtacgcagacgccggccatgtgtgccacctgtgccatccaaactgcacctacggatgcactgggccaggtcttgaaggctgtccaacgaatggaagctacatagtgtctcactttccaagatcattctacaagatgtcagtgcactgaaacatgcaggggcgtgttgatgcccgtgaggatcttgacaagttgttttgaagatggcattttgctaagtccctgagggtcactggtcctcaaagcggcatggcggcatggcgtggctggttctgccacatgccagctgtgtgacctctgagactccacttcttcagtgctgaaaataaagaaggagttttactaaggaccaaacaagataatgaatgtgaaactgctccacgaaccccaaagaattatgcacatagatgcgatcattaagatgcgaagccatcgagttaccacctggcatgcttaaactgtaaagagtgggtcaaagtaaactgaattggaaaatccaaagttatgcagaaaaacaataaag

SEQ ID NO: 17103 - protein, 657 aa, Homo sapiens
MRPSGTAGAALLALLAALCPASRALEEKKVCQGTSNKLTQLGTFEDHFLSLQRMFNNCEVVLGNLEITYVQRNYDLSFLKTIQEVAGYVLIALNTVERIPLENLQIIRGNMYYENSYALAVLSNYDANKTGLKELPMRNLQEILHGAVRFSNNPALCNVESIQWRDIVSSDFLSNMSMDFQNHLGSCQKCDPSCPNGSCWGAGEENCQKLTKIICAQQCSGRCRGKSPSDCCHNQCAAGCTGPRESDCLVCRKFRDEATCKDTCPPLMLYNPTTYQMDVNPEGKYSFGATCVKKCPRNYVVTDHGSCVRACGADSYEMEEDGVRKCKKCEGPCRKVCNGIGIGEFKDSLSINATNIKHFKNCTSISGDLHILPVAFRGDSFTHTPPLDPQELDILKTVKEITGFLLIQAWPENRTDLHAFENLEIIRGRTKQHGQFSLAVVSLNITSLGLRSLKEISDGDVIISGNKNLCYANTINWKKLFGTSGQKTKIISNRGENSCKATGQVCHALCSPEGCWGPEPRDCVSCRNVSRGRECVDKCNLLEGEPREFVENSECIQCHPECLPQAMNITCTGRGPDNCIQCAHYIDGPHCVKTCPAGVMGENNTLVWKYADAGHVCHLCHPNCTYGCTGPGLEGCPTNGSYIVSHFPRSFYKMSVH

SEQ ID NO: 17104 - DNA, 561 bp, Homo sapiens
caggccacctcgtcggcgtccgcccgagtccccgcctcgccgccaacgccacaaccaccgcgcacggccccctgactccgtccagtattgatcgggagagccggagcgagctcttcggggagcagcgatgcgaccctccgggacggccggggcagcgctcctggcgctgctggctgcgctctgcccggcgagtcgggctctggaggaaaagaaagttcaagtgccattcaatttatcctggcaagaagaggaaggcatcatcaagaccttaattttctaatacatctgatctgagaagaatgtgaaagctataaaattaatttttgatcaataactacaggccttttgagagagtgccctcctaatgaattgagtacctatttctccatacacagtgtctatcatgacctacaaacccttttcccatgaggtgtaacagagagagattacagccttggaactggatgtcagactctcctggtttaagacaataagccatgacatagagcctgaaaccaacacaatcttccgagtggttccagaaacatataggggataatg

SEQ ID NO: 17105 - protein, 50 aa, Homo sapiens
MRPSGTAGAALLALLAALCPASRALEEKKVQVPFNLSWQEEEGIIKTLIF

SEQ ID NO: 17106 - DNA, 927 bp, Homo sapiens
gtgtgcctgtgtgtatgtgtatatgtgtatgtgtgtacatgtatgtacgcgtgtgcatacgtgtgtgtgtgtgcacaggtgtgtatgtgtgtgcctgtgtgtgtgtgtgcatgtgtggtggggacactaaaaatctctcatcacctttttagtcaaaagaacagttgttttggtttggctcttctgttttaaaatatcagaacaataataatttcccacagacaaaatcctcaatcctcaccatccttctatttcctatattcatcataaacttcatgcttgatgttgaaattgttttctgaaaatagagaatacaaagaggagattttaaaatgtcagtggcagccccacactcctttttaatcttatttcctgatatcttgagtttacttggacgtagagttttccttgactatggttatttctggtagtagcagctccagattaggcaatggttttcttcagagatagcttagagtgagccccagaacaaggtcaatgcgaagattgcttgtgtctgcgtgtccagggcacagtgatcctcatcactagccggggggctccgtgaggatctgctcctggtcgtttctgttctgtatcttctctgcagcccttactgaagccgttaccaactggcacaattcaattcctactgtacccatcatgcacagatggctgaagtattgagaacgctccagtgaccgggaggcaatagtctgtctctctgtctttctcatacacacttacacacacatacacacaaccttgttgcttaattttcagagagtctactttcagaaaagccttcaggaatacatcatgtacaaaactgagaaattacctgaagtatctttaaatttagtaaaaagttgcattgttttttgaacatcacacttgaaaagtacatgaatacaaacatacttagga

SEQ ID NO: 17107 - protein, 49 aa, Homo sapiens
MYACAYVCVCAQVCMCVPVCVCACVVGTLKISHHLFSQKNSCFGLALLF

SEQ ID NO: 17108 - DNA, 783 bp, Homo sapiens
ctgacctttccttccccatctcgagtcccctggtggttattccaagtgtgttcttagatgtggacagactattgcctcccggtcactggagcgttctcaatacttcagccatctgtgcatgatgggtacagtaggaattgaattgtgccagttggtaacggcttcagtaagggctgcagagaagatacagaacagaaacgaccaggagcagatcctcacggagccccccggctagtgatgaggatcactgtgccctggacacgcagacacaagcaatcttcgcattgaccttgttctggggctcactctaagctatctctgaagaaaaccattgcctaatctggagctgctactaccagaaataaccatagtcaaggaaaactctacgtccaagtaaactcaagatatcaggaaataagattaaaaaggagtgtggggctgccactgacattttaaaatctcctctttgtattctctattttcagaaaacaatttcaacatcaagcatgaagtttatgatgaatataggaaatagaaggatggtgaggattgaggattttgtctgtgggaaattattattgttctgatattttaaaacagaagagccaaaccaaaacaactgttcttttgactaaaaaggtgatgagagatttttagtgtccccaccacacatgcacacacacacacaggcacacacatacacacctgtgcacacacacacacgtatgcacacgcgtacatacatgtacacacatacacatatacacatacacacaggcacac

SEQ ID NO: 17109 - protein, 38 aa, Homo sapiens
MMGTVGIELCQLVTASVRAAEKIQNRNDQEQILTEPPG

SEQ ID NO: 17110 - DNA, 300 bp, Homo sapiens
gctgcaggtcccgcaagacacagagcaaccctgcaagccaggtcaccttccctcttctctgctgtccgactggccctccaccatgtgacattcaaaagctcaagttacttaacctctcaaaactcagcatccttttctgtacatgtgggccagtttcgcctttagaaccacaattctctgatatgtgcaatgagagaattaattatagactcaaaggattgcatgcagacacacacagatacaaacacatacacacaacacacagagttacacacagacatgctcacaatacacagaaat

SEQ ID NO: 17111 - protein, 38 aa, Homo sapiens
MCNERINYRLKGLHADTHRYKHIHTTHRVTHRHAHNTQ

SEQ ID NO: 17112 - DNA, 1861 bp, Homo sapiens
gctatggcaatgacaagtcttacagagctacaaacgagagttttatgagaaagccattttaccagctaatgtcaagtaataactagaaaaggatatcaaatagaaacaggctaatctggagttccatgtcatcatagacactgacgtttatccctgaccattacctcagtcatgatgtgctgccatactcgctcttaaaaactttttttaaaagccctgctttgcaccatttgcctattcccttagtgtaaatactcctactatagctgatttcaaggtaccaagtttcactcagctggtcacagaattcttatttcacgataggcgctaatgaccccataggagccagctctgaaggcttcagagtttcactgaattttggatggggtttacttagccttcttctgtttttcttttacctttcctttttaaataagaaataatgcaagacagatacaaagtaattctttttaatttccattttcactggagagtgttgaaccccgtgaggcatgagagcacagtgttccagaacaatgcttactgctcattatcacaggggtcaaaggctaacgtgcagggattgttgcagatcgtggacatgctgcctcctgtgtccatgactgcaatcgtctacctattttacagttgttgagcactcgtgtgcattagggttcaactgggcgtcctagggctccctggacccattttagaccttgagttcttgagttcctcaaaagagaaatcacgcatttatgttttctcttcttagaccatccaggaggtggctggttatgtcctcattgccctcaacacagtggagcgaattcctttggaaaacctgcagatcatcagaggaaatatgtactacgaaaattcctatgccttagcagtcttatctaactatgatgcaaataaaaccggactgaaggagctgcccatgagaaatttacaggaaatcctgcatggcgccgtgcggttcagcaacaaccctgccctgtgcaacgtggagagcatccagtggcgggacatagtcagcagtgactttctcagcaacatgtcgatggacttccagaaccacctgggcagctgtaagtgtcgcatacacactatctctgcctccagctcctatgggggacagctctacagcactggggcaggggagagaagccatgtttagtaagtcacattaatcagaaacaaaaagtagtaagcaaaatatctgaccactagaaaagcatgtatttaccacggacatagagatcgtttttttgtggcgggtggcagcccagctggttggcagtgcaggccaccggaggcagatcccctgcagggacagcagagcacttgtgtcctgagaagagctgctgttcatggggctggcagcaccagggcctctcctagcctgccctgctgacactggccagactcctacatgcttctgagtctccagaggctacccggccctcctgaagcaccagggctgaatccacccccagctgagggcatgaacactgccacatggagtcacacacacagctgggcactgccatggagaggaagtctgtccatgtttccttgaatactggtggcctggtccctgtcccattccccagtgaggcagcctgtggggaagcctggcagggaaccaggcgcaggtcagcgtggcgccctgactcaggccagcactgatgggggactctgagacgcaagctcacactcacccagctcccctgggctgcgcccgttcctgatcgcttggactttctgttctttagagtaagaagtgatcaccatttcctgcttctttgtttctccacaactgtgcagtggatgcctgtttgttttctgccctcagaac

SEQ ID NO: 17113 - protein, 105 aa, Homo sapiens
MYYENSYALAVLSNYDANKTGLKELPMRNLQEILHGAVRFSNNPALCNVESIQWRDIVSSDFLSNMSMDFQNHLGSCKCRIHTISASSSYGGQLYSTGAGERSHV

SEQ ID NO: 17114 - DNA, 2825 bp, Homo sapiens
cctgagccatttctacacagtgtctgtttcctcagaacaccggtcttcaccaaaggcgtgggaaagggcagagagcacaggacatattctggaattcaggtcaccttttacatctgcctggagttgggtgagcgcctcacgaatgactcggcaggactgactgccactgctaaccaggcggatgcaagcaatgaggaggacctgcccaggccgggtgggtgtctgctccctccctctggtccctggcacatctctggaccccctgccctgctgtcggagagagatgacgggcaacggcgtattctcagagacagggcctgcctgcaaatcctttaaagtcaatgggatgaaatgtatacccattgttagaaaaaaataggacttagcaagttgagtgcaaataactgatgcaagactgggatggagatgggaggggtttggggcaaaagcagaagtctttctgggtccgcaccagctgtgaaatacctggcttgttgttctgtgcctgtctccagcacccaggcagggctacctgaccactctgctctctcagccccgccctggctctggagcgagcctgtggaaagggggacacttagccaaggccccagccacatagcagcagcagctgcgccctctgtcagctccttgcacctcctcactgggcctcctgcaaggcacctgctccactccaccactatcacctgggtcctcctggccttggcctggcttgcttaccttgttatcaagtcctgaatgggggaagcaatattccttctccactacaaatcaccacagtattcacaaagaattccagagaaataagaacagagacatcagaccacactgagcactcaataaagagaaaattcttcaaaggtagctgattgatgagagtttccacatgcagatgggacaggcactgatttgtgcacaagaagatcaacttgattgaatccaaaataaaggaatgtgtgtgtgctgcatgcacgcacacacatatccccatggcaaactcttgctatcccaggagcgcagaccgcatgtgaggatcctggctccttatctcccctccccgtatctcccttccctgattacctttgcgatctgcacacaccagttgagcaggtactgggagccaatattgtctttgtgttcccggacatagtccaggaggcagccgaagggcatgagctgcgtgatgagctgcacggtggaggtgaggcagatgcccagcaggcggcacacgtgggggttgtccacgctggccatcacgtaggcttcctggagggagggagaggcacgtcagtgtggcttcgcatggtggccagaaggaggggcacatggaccccttccaggtgaagacgcatgaatgcgatcttgagtttcaaaatacgtactcatggaggaaaagctgtgcctgcaaaagacctagcacagggacgtttacgcagggctgtgaagtgacagatgcagtgggagagggcccctcctgggtgcatctggggattccccatgacagagaggcccaggcaacagtggccatgaggagcacattggataaaggaggagtcggagtcacctgatctctgagtttgggaactgatagtatctttgttatgaagacctccgcctcaaggttgaggatgctgtgttttaaaatatcatgagggcctgtaggaatctgtgtggggtccggaacaccctgggtaatgactgaccctgcacatcaggaacgctggctgtgggtgctgcagaggacaagcgatggagaaggcatccggggagcaccgagccagcagggagaaaggcctcccttccccacaggccaggcttggccctgactgtgctctgggaaatgggtgggcatttgggctggggaccctgcccacagcacctctgcaaagagtagctggataagctctttcaatagaccagtcccaggttttgaaatggacagagcattcaatctacagtgactaaaggctgcctggctgcccgggacccatttctaaagagaagtggtctctctgtgctgtgcccccaggctccctatgggaaatccatgctgcactgagtcaggcatctgctgccctgctaattccggctggctgccaaggcaggggccttcctttgacagagccataaatacagactttattttaacccttctgctattcttgggctgaggaagctaaatttatttgcaatcaggcacacaatggggccctcttttctgtctgactgagaatgagggaatccccaatttccacccataaattctctttctctttaaaatacaaatggtggtgaccttttattcagatatggaaaagaacacacagactgtagcagaaagcatccacagctgcttttcacatctcagcaatgcctatgttttgagtgtggacttgggcaagttagtttctctgcagaagtgaacacactgagccaggctctgagatagggtgctgctccagggtgcccgggcaggtcaggagcaacaggctggcgggaggcagggtggagataggagacaggagacaaaggcaaggtggggcgaggggacacagacagtggaccctcagtatctggggaattggttccaggacctcccttaaatatcaaaatgtgaggatgctcaagcccctgatataaagtggcacagcatttgtgtgtaacctacagacatcctcccatctacagcatctcctgattacctatagtacctaatacagtgcaaatgctatgtgaataattgttatgctgtattgtttagggaataatgacaagaaaaaaagtccgtatatgttcagtaccgatgc

SEQ ID NO: 17115 - protein, 111 aa, Homo sapiens [sequence omitted]

SEQ ID NO: 17116 - DNA, 1081 bp, Homo sapiens
ccggatcggtactgtatcaagtcatggcaggtacagtaggataagccactctgtcccttcctgggcaaagaagaaacggaggggatggaattcttccttagacttacttttgtaaaaatgtccccacggtacttactccccactgatggaccagtggtttccagtcatgagcgttagactgacttgtttgtcttccattccattgttttgaaactcagtatgctgcccctgtcttgctgtcatgaaatcagcaagagaggatgacacatcaaataataactcggattccagcccacattggattcatcagcatttggaccaatagcccacagctgagaatgtggaatacctaaggatagcaccgcttttgttctcgcaaaaacgtatctcctaatttgaggctcagatgaaatgcatcaggtcctttggggcatagatcagaagactacaaaaatgaagctgctctgaaatctcctttagccatcaccccaaccccccaaaattagtttgtgttacttatggaagatagttttctccttttacttcacttcaaaagctttttactcaaagagtatatgttccctccagtcagcggggaggtggaaagtgcaggtgcatcaggggcaccctgaccgaggaaacagctgccagaggcctccactgctaaagtccacataaggctgaggtcagtcaccctaaacaacctgctccctctaagccaggggatgagcttggagcatcccacaagttccctaaaagttgcagcccccagggggattttgagctatcatctctgcacatgcttagtgagaagactacacaacatttctaagaatctgagattttatattgtcagttaaccactttcattattcattcacctcaggacatgcagaaatatttcagtcagaactgggaaacagaaggacctacattctgctgtcacttatgtgtcaagaagcagatgatcgatgaggcaggtcagttgtaagtgagtcacattgtagcattaaattctagtatttttgtagtttgaaacagtaacttaataaaagagcaaaagctattctagctttcttct

SEQ ID NO: 17117 - protein, 37 aa, Homo sapiens
MEDSFLLLLHFKSFLLKEYMFPPVSGEVESAGASGAP

SEQ ID NO: 17118 - DNA, 2283 bp, Homo sapiens
ctaatgggcaaccagggttgaaacccttatttctagggtcttcagttgtacaagactgtgggtctgtaccagagcccccgtcagagtagaataaaaggctgggtagggtagagattcccatgtgcagtggagagaacaatctgcagtcactgataagcctgagacttggctcatttcaaaagcgttcaattcatcctcaccagcagttcagctggaaaggggcaaatacccccacctgagctttgaaaacgccctgggaccctctgcattctctaagtaagttatagaaaccagtctcttccctcctttgtgagtgagctgctattccacgtaggcaacacctgttgaaattgccctcaatgtctactctgcatttctttcttgtgataagcacacacttttattgcaacataatgatctgctcacatttccttgcctgggggctgtaaaaccttacagaacagaaatccttgcctctttcaccagccacacctgccataccaggggtacagctttgtactattgaagacacagacaggatttttaaatgtaaatctatttttgtaactttgttgcgggatatagttctctttatgtagcactgaactttgtacaatatatttttagaaactcatttttctactaaaacaaacacagtttactttagagagactgcaatagaatcaaaatttgaaactgaaatctttgtttaaaagggttaagttgaggcaagaggaaagccctttctctctcttataaaaaggcacaacctcattggggagctaagctaggtcattgtcatggtgaagaagagaagcatcgtttttatatttaggaaattttaaaagatgatggaaagcacatttagcttggtctgaggcaggttctgttggggcagtgttaatggaaagggctcactgttgttactactagaaaaatccagttgcatgccatactctcatcatctgccagtgtaaccctgtacatgtaagaaaagcaataacatagcactttgttggtttatatatataatgtgacttcaatgcaaattttatttttatatttacaattgatatgcatttaccagtataaactagacatgtctggagagcctaataatgttcagcacactttggttagttcaccaacagtcttaccaagcctgggcccagccaccctagagaaacccaagcattcgtagtttttaaagctcctgaggtcattccaatgtgcggccaaagttgagaactactggcctagggattagccacaaggacatggacttggaggcaaattctgcaggtgtatgtgattctcaggcctagagagctaagacacaaagacctccacatctgtcgctgagagtcaagaacctgaacagagtttccatgaaggttctccaagcactagaagggagagtgtctaaacaatggttgaaaagcaaaggaaatataaaacagacacctctttccatttcctaaggtttctctctttattaagggtggactagtaataaaatataatattcttgctgcttatgcagctgacattgttgccctccctaaagcaaccaagtagcctttatttcccacagtgaaagaaaacgctggcctatcagttacattacaaaaggcagatttcaagaggattgagtaagtagttggatggctttcataaaaacaagaattcaagaagaggattcatgctttaagaaacatttgttatacattcctcacaaattatacctgggataaaaactatgtagcaggcagtgtgttttccttccatgtctctctgcactacctgcagtgtgtcctctgaggctgcaagtctgtcctatctgaattcccagcagaagcactaagaagctccaccctatcacctagcagataaaactatggggaaaacttaaatctgtgcatacatttctggatgcatttacttatctttaaaaaaaaaggaatcctatgacctgatttggccacaaaaataatcttgctgtacaatacaatctcttggaaattaagagatcctatggatttgatgactggtattagaggtgacaatgtaaccgattaacaacagacagcaataacttcgttttagaaacattcaagcaatagctttatagcttcaacatatggtacgttttaaccttgaaagttttgcaatgatgaaagcagtatttgtacaaatgaaaagcagaattctcttttatatggtttatactgttgatcagaaatgttgattgtgcattgagtattaaaaaattagatgtatatt

SEQ ID NO: 17119 - protein, 52 aa, Homo sapiens
MQILFLYLQLICIYQYKLDMSGEPNNVQHTLVSSPTVLPSLGPATLEKPKHS

SEQ ID NO: 17120 - DNA, 2345 bp, Homo sapiens
ctaatgggcaaccagggttgaaacccttatttctagggtcttcagttgtacaagactgtgggtctgtaccagagcccccgtcagagtagaataaaaggctgggtagggtagagattcccatgtgcagtggagagaacaatctgcagtcactgataagcctgagacttggctcatttcaaaagcgttcaattcatcctcaccagcagttcagctggaaaggggcaaatacccccacctgagctttgaaaacgccctgggaccctctgcattctctaagtaagttatagaaaccagtctcttccctcctttgtgagtgagctgctattccacgtaggcaacacctgttgaaattgccctcaatgtctactctgcatttctttcttgtgataagcacacacttttattgcaacataatgatctgctcacatttccttgcctgggggctgtaaaaccttacagaacagaaatccttgcctctttcaccagccacacctgccataccaggggtacagctttgtactattgaagacacagacaggatttttaaatgtaaatctatttttgtaactttgttgcgggatatagttctctttatgtagcactgaactttgtacaatatatttttagaaactcatttttctactaaaacaaacacagtttactttagagagactgcaatagaatcaaaatttgaaactgaaatctttgtttaaaagggttaagttgaggcaagaggaaagccctttctctctcttataaaaaggcacaacctcattggggagctaagctaggtcattgtcatggtgaagaagagaagcatcgtttttatatttaggaaattttaaaagatgatggaaagcacatttagcttggtctgaggcaggttctgttggggcagtgttaatggaaagggctcactgttgttactactagaaaaatccagttgcatgccatactctcatcatctgccagtgtaaccctgtacatgtaagaaaagcaataacatagcactttgttggtttatatatataatgtgacttcaatgcaaattttatttttatatttacaattgatatgcatttaccagtataaactagacatgtctggagagcctaataatgttcagcacactttggttagttcaccaacagtcttaccaagcctgggcccagccaccctagagaaacccaagcattcgtagtttttaaagctcctgaggtcattccaatgtgcggccaaagttgagaactactggcctagggattagccacaaggacatggacttggaggcaaattctgcaggtgtatgtgattctcaggcctagagagctaagacacaaagacctccacatctgtcgctgagagtcaagaacctgaacagagtttccatgaaggttctccaagcactagaagggagagtgtctaaacaatggttgaaaagcaaaggaaatataaaacagacacctctttccatttcctaaggtttctctctttattaagggtggactagtaataaaatataatattcttgctgcttatgcagctgacattgttgccctccctaaagcaaccaagtagcctttatttcccacagtgaaagaaaacgctggcctatcagttacattacaaaaggcagatttcaagaggattgagtaagtagttggatggctttcataaaaacaagaattcaagaagaggattcatgctttaagaaacatttgttatacattcctcacaaattatacctgggataaaaactatgtagcaggcagtgtgttttccttccatgtctctctgcactacctgcagtgtgtcctctgaggctgcaagtctgtcctatctgaattcccagcagaagcactaagaagctccaccctatcacctagcagataaaactatggggaaaacttaaatctgtgcatacatttctggatgcatttacttatctttaaaaaaaaaggaatcctatgacctgatttggccacaaaaataatcttgctgtacaatacaatctcttggaaattaagagatcctatggatttgatgactggtattagaggtgacaatgtaaccgattaacaacagacagcaataacttcgttttagaaacattcaagcaatagctttatagcttcaacatatggtacgttttaaccttgaaagttttgcaatgatgaaagcagtatttgtacaaatgaaaagcagaattctcttttatatggtttatactgttgatcagaaatgttgattgtgcattgagtattaaaaaattagatgtatattattcattgttctttactcctgagtaccttataataataataatgtattctttgttaacaatg

SEQ ID NO: 17121 - protein, 52 aa, Homo sapiens; identical to SEQ ID NO: 17119

SEQ ID NO: 17122 - DNA, 2438 bp, Homo sapiens
ctaatgggcaaccagggttgaaacccttatttctagggtcttcagttgtacaagactgtgggtctgtaccagagcccccgtcagagtagaataaaaggctgggtagggtagagattcccatgtgcagtggagagaacaatctgcagtcactgataagcctgagacttggctcatttcaaaagcgttcaattcatcctcaccagcagttcagctggaaaggggcaaatacccccacctgagctttgaaaacgccctgggaccctctgcattctctaagtaagttatagaaaccagtctcttccctcctttgtgagtgagctgctattccacgtaggcaacacctgttgaaattgccctcaatgtctactctgcatttctttcttgtgataagcacacacttttattgcaacataatgatctgctcacatttccttgcctgggggctgtaaaaccttacagaacagaaatccttgcctctttcaccagccacacctgccataccaggggtacagctttgtactattgaagacacagacaggatttttaaatgtaaatctatttttgtaactttgttgcgggatatagttctctttatgtagcactgaactttgtacaatatatttttagaaactcatttttctactaaaacaaacacagtttactttagagagactgcaatagaatcaaaatttgaaactgaaatctttgtttaaaagggttaagttgaggcaagaggaaagccctttctctctcttataaaaaggcacaacctcattggggagctaagctaggtcattgtcatggtgaagaagagaagcatcgtttttatatttaggaaattttaaaagatgatggaaagcacatttagcttggtctgaggcaggttctgttggggcagtgttaatggaaagggctcactgttgttactactagaaaaatccagttgcatgccatactctcatcatctgccagtgtaaccctgtacatgtaagaaaagcaataacatagcactttgttggtttatatatataatgtgacttcaatgcaaattttatttttatatttacaattgatatgcatttaccagtataaactagacatgtctggagagcctaataatgttcagcacactttggttagttcaccaacagtcttaccaagcctgggcccagccaccctagagaaacccaagcattcgtagtttttaaagctcctgaggtcattccaatgtgcggccaaagttgagaactactggcctagggattagccacaaggacatggacttggaggcaaattctgcaggtgtatgtgattctcaggcctagagagctaagacacaaagacctccacatctgtcgctgagagtcaagaacctgaacagagtttccatgaaggttctccaagcactagaagggagagtgtctaaacaatggttgaaaagcaaaggaaatataaaacagacacctctttccatttcctaaggtttctctctttattaagggtggactagtaataaaatataatattcttgctgcttatgcagctgacattgttgccctccctaaagcaaccaagtagcctttatttcccacagtgaaagaaaacgctggcctatcagttacattacaaaaggcagatttcaagaggattgagtaagtagttggatggctttcataaaaacaagaattcaagaagaggattcatgctttaagaaacatttgttatacattcctcacaaattatacctgggataaaaactatgtagcaggcagtgtgttttccttccatgtctctctgcactacctgcagtgtgtcctctgaggctgcaagtctgtcctatctgaattcccagcagaagcactaagaagctccaccctatcacctagcagataaaactatggggaaaacttaaatctgtgcatacatttctggatgcatttacttatctttaaaaaaaaaggaatcctatgacctgatttggccacaaaaataatcttgctgtacaatacaatctcttggaaattaagagatcctatggatttgatgactggtattagaggtgacaatgtaaccgattaacaacagacagcaataacttcgttttagaaacattcaagcaatagctttatagcttcaacatatggtacgttttaaccttgaaagttttgcaatgatgaaagcagtatttgtacaaatgaaaagcagaattctcttttatatggtttatactgttgatcagaaatgttgattgtgcattgagtattaaaaaattagatgtatattattcattgttctttactcctgagtaccttataataataataatgtattctttgttaacaatgccatgttggtactagttattaatcatatctaaccaactgtaggtgttctttcctgataacttttttaaaaaatcaataaattatttttagagc

SEQ ID NO: 17123 - protein, 52 aa, Homo sapiens; identical to SEQ ID NO: 17119

SEQ ID NO: 17124 - DNA, 1334 bp, Homo sapiens
gagaagcatcgtttttatatttaggaaattttaaaagatgatggaaagcacatttagcttggtctgaggcaggttctgttggggcagtgttaatggaaagggctcactgttgttactactagaaaaatccagttgcatgccatactctcatcatctgccagtgtaaccctgtacatgtaagaaaagcaataacatagcactttgttggtttatatatataatgtgacttcaatgcaaattttatttttatatttacaattgatatgcatttaccagtataaactagacatgtctggagagcctaataatgttcagcacactttggttagttcaccaacagtcttaccaagcctgggcccagccaccctagagaagttattcagccctggctgcagtgacatcacctgaggagcttttaaaagcttgaagcccagctacacctcagaccgattaaacgcaaatctctggggctgaaacccaagcattcgtagtttttaaagctcctgaggtcattccaatgtgcggccaaagttgagaactactggcctagggattagccacaaggacatggacttggaggcaaattctgcaggtgtatgtgattctcaggcctagagagctaagacacaaagacctccacatctgtcgctgagagtcaagaacctgaacagagtttccatgaaggttctccaagcactagaagggagagtgtctaaacaatggttgaaaagcaaaggaaatataaaacagacacctctttccatttcctaaggtttctctctttattaagggtggactgggataaaaactatgtagcaggcagtgtgttttccttccatgtctctctgcactacctgcagtgtgtcctctgaggctgcaagtctgtcctatctgaattcccagcagaagcactaagaagctccaccctatcacctagcagataaaactatggggaaaacttaaatctgtgcatacatttctggatgcatttacttatctttaaaaaaaaaggaatcctatgacctgatttggccacaaaaataatcttgctgtacaatacaatctcttggaaattaagagatcctatggatttgatgactggtattagaggtgacaatgtaaccgattaacaacagacagcaataacttcgttttagaaacattcaagcaatagctttatagcttcaacatatggtacgttttaaccttgaaagttttgcaatgatgaaagcagtatttgtacaaatgaaaagcagaattctcttttatatggtttatactgttgatcagaaatgttgattgtgcattgagtattaaaaaattagatgtatatt

SEQ ID NO: 17125 - protein, 50 aa, Homo sapiens
MVEKQRKYKTDTSFHFLRFLSLLRVDWDKNYVAGSVFSFHVSLHYLQCVL

SEQ ID NO: 17126 - DNA, 838 bp, Homo sapiens
gcgaggagccagcggcttctcccatcacagtggttcccaccgttgtcttagaaaccagtccccgaggcttggcaaagcaggagccctccatggaggtgcttgggtgtcggggcaaaccccaggcggagtccgggggaagcagcacggcatcccagcctcaggcctgcccggacggtgttggttgggctacattgaggccaggtgcagtggctcacacctctaatcccagttctttgggaggctgaggccagcggatcacgaagtcaggagatcaagaccatcctggacaacacggtgaaaccctgtctcttcaaatatacaaagaattaaccagagaagcagggaatctggaattttgggtgaaatgtctgtttccagaagctgaaaatgctctcaaatggaaaattcagggtcagaatggcctggggtactgcacacttcctgccaggaatagaaggccccacagctataggacctctcttccgtttagttctttggaaggatgagcaaattattcagcctctctgagcctcagttttctcatccataaaatgaggacagtacaccaacctcgcaggtcacaaggatgttatgaaatcagagtgcagtgaatagaagacacttctctgcaccccaaaagctccatgctgattgcgagaaggaaatgctggatggaggggttcctggaactactgtgagggaaatggtaacagaactttggatgtggaacgtgcagtaggagttacacgaagtgcgggtctgcacttggggtggtcagcacggcggatgcccagcaaacgcactgcctggtccacatcccggagtggtctctacgccc

SEQ ID NO: 17127 - protein, 51 aa, Homo sapiens [sequence omitted]

SEQ ID NO: 17128 - DNA, 5811 bp, Homo sapiens
actgttgcccggggatgggtttctgagactttgcgaagtaggagccccgtgtgatagtgcgtcagggtcaagtctgagagcagtcctggccagggcattaacaggatggtctccggagcctgggattctcggagggtcgaccaccaggaagaaacctcacaaggaagaaacctcaggcggatcacctgggcggcagcgcgagatcccagcctcaggcctggattcggggagagttgacgaggcctctctcccaatcttcacttcacccgccgccgccctactcccgcagccgccgctccacggtcatttttcttttctttctttttttttttttttttttatagtcagagtctcactctgtcgctcagtcgagtgcagtggtgggatctcagctgactgcaaactctgccgcctgtgttcaagtgattctcttgcctccgcctcccgagtacctgggactacagggattagtcagagtcggggctaagaccagtcatggccggggctaagaccagtcatggccagggcatcaacaggatagtctctggaggccgggattcacggagggtcgtccaggaggaagaagctgcgggcggagggccggggaagcagtgcgggatcccagcctcaggcctgcacggacagtgtgccagtgagtctcttcaaaaaaggagaggttttcttgtgtgcccctgggctgctctctcaccagtgggttgtagtcgtggagagcagaaccctgaaaattcaggggctacctgggggtaggtgttaccgtgccactgctgtatgtctttgtgcgtttgtgtgtgtacgtatatctctctcttgtttctctctctcccctttctcactcttttgctctgtgtccgtctgtgtgtgcgtgttgggacacatgtgccctgtgcgccagagggtggtattttctacgtcctcctttcttgtggtcagcctctccccgcgtctctgcctggcttgtgtggccggttgtcagtcatttttccggcggttccagtttaggtttgtgaaggtccagatgaggtggggagctgcgtctctctcataagaatttaaatcgcctccccaccctgaaaggcctcttttctaggattaaggcctccaccccccagccaaggataatagccttaccggagaggtcgttgtctacctgcaggaacagtgcagagcaccctgaaagaagatggttctcattcgtctctctctttcatctccttgagaaatctagccacagggtaacacaggttttgagaggatgggacgtggcaaggatctgtgagtgtgcaggctgtgtttcacatatcattaaacatagtctagtgagggttctgcagatagctggcatttaagtttgttttattgaatcaaggaaaagaaaaaatgctaagaaaaaaaatgacacaacttgcctgccagcccatctgactgttacaaatttaatagtaattttaatttatcttctcatgtaaaggtctttggcagtgatacctaatttcctaagatagccttgctttatattgtatgattaagatgtcatgcatatcagagtatctggaaattcttcccaacgtccttgacatacgtgattaatcacatttccaaaataacataccaaaacgcataacagaaaatcattttaagttgtggttccttcatgcacaaaacatttcatgtgtgtctggcactcttccggccacagatttcatcttaacctaagtattgaaatgcttgtgccctttgattaatttttctatgtaaatactttgataataagctacattgaggccaggtgcagtggctcacacctctaatcccagttctttgggaggctgaggccagcggatcacgaagtcaggagatcaagaccatcctggacaacacggtgaaaccctgtctcttcaaatatacaaagaattaaccagagaagcagggaatctggaattttgggtgaaatgtctgtttccagaagctgaaaatgctctcaaatggaaaattcaggtaaggttggggaagatgtcaggtgatagaatgtaccctgcctctgacagcatccaatctggagcaaaggcttctttcaaccctcccccaaactcccaatacaagcccaagttctggaacaagtactttccaacacctccttcagagaagctccctggctccaggcagtgcttggtcccctcactgcagcaggaagcccagcttgtgaactgcaggtgtgctccaggtggttgctggatgcagggtattgatagatggatctcatcgatacccccactgcataaccatgtaagcatatcatcccccacttgcacatgaggaagcgaaggtccacagggtggggaagggaagacataatctgtccttcaaatgcgatactggtgagatgtgagaggcagcattcctcataactcagcgaggcagtgggcataccaggaccctcccaggcagatcgggtgtgtggttggccccattgcatagcatgggagggagtgtgggagaccacacatgggtcttgcaacctctccactggcctgacctccctgcagaccccaaggacagggttaagcatctgcttgctggcaggcctggacaccagaggtctttgcttatgtctaaggtccctgtagttgtggttcacaggatgggggctgctcctgagattcagcaccacacaggcactgcacagcactgtgccatggtggtggcactcactttccagatagggcccatgttgccagcaggcatgatgcatcatttaccctaccctgagtgcaataggtggttttatagaaaaaaacttgggccagacgcggtggctcacacctgtaatcccagcactttaggaggccaaggtgggcggatcacaaggtcaggagctcaagacaagcctggctaatatagtgaaaccttgtcagcatgaaaaatacaaaaattagccagatgtggtggtgggcacctgtagtcccagctactcgggaggctgaggcaggagaatcgcttgaacccaggaggcggaggttgtggtgagccaagatcatgccactgcactccagcctaggcaacagagcaagactccatctcaaaaaaaaaaaaaaacaaaaacaaaaacaaacaaaaaaaaaaaaacaaaagaaaaggaaaagtatttgtagatgaatgaaggtgactcctttgaatattgaaaatgattttattgtagccattggtctggcactcattctgatggggtgacatgtgtccctgccttagccagcagagcacaggagtgtgctacacctcccctcatctgaagattcagcccatgagcaggaatgcctgtctttgtgtcatatcaacacagaggatgtgtctggtttcaccattcactgcagaggcagaaattacccagaaagaagagatagtctgttcctgggagtgtgtccttttgacccagcatgggggtcatctcccttccttggccaggacccccaacctgaacacagaggcagagaacatgtgaagggctcccattcccaggtggtccagggtgcaagctctgagcctgtggtcctggtcactgcccttttctccacagcatggctgccaccatcctgggctggggcacagcggggctttgcagagatcagaataacaaaagcattactgagatgctgcaataggagactgtgataccttcgtgggctgccaaggcagcctaagctatttcttgctgcacccagtgtccccccagacagctgtgtggctgtcactgcctctcttgtgtccattttacttctcttctccttcctgagcttctgctctgaactctgtctctaacttacaagaaatcaagctcactggattctgagctcttcagtgtcaaggactgtgtcagtagttcatatctctttctagagatcacagtttagtatctggcacagagcagatactcagtcaatgccaaatgattcatttgccagaaagctgaatttcatccataatgctagtcaatgcaaatacattctgccagtggggtgtgtttgtcctctgaaggcgttttcccaggctttgtaaatacatacacgccatttagaaatttgaatgtcaaagagtaaaggagcttagaaagtaaacattggagaagtgtgggagggtggtgttatttgcaaaacattcctgggtccttgtgagttctatacaccttcgatgagcaccgattctgggccaggccagacacccagctggacccaggagatactgaggtgagtaaagccaaaatgcctcccttcagcaggaggcaggcagtcacaccaaagtgataaaggcacaaaacccagaggcagcagaggagcaaagactgccttgttccaggactctgtgacctcagggagagctttcagaggaggacatctgtgcagggcttggaaggatgaacacaaatttgcctagcagaaaagggagccaaggaaatcctgatggagaacagcttgggtgagagtgtgagtcacaggattgaggggtgcaggcatggaactggaggagcagaaagaatgaggggggataaagttgggaggtcagcagaggtcagtcacagaaggttttgaatcctggtgagggagcagtgggtgctgcacaagggacatggacctggagaagatgcagttagctttgagtgaagatggagcatgccatccactaaggaaccacaagatgcaatagaaataagaaccctgagaagcctgcacaaaggatgagaggcccaggggtagtgccaagaaggtccctgtcagaggccagctttgaacagagacagaaaagactcttgagggcctcagctgctgcaaacctcctcaacaaatcatattttaccttcaaatatttgctaaagaatactaactattggaagagcaatggtccattgataataattattccctcactgtacattttttacaattctcaaaatgctctgggtccagtgtctcattggaacccccataaaatcccattttacaaatagggaaatgaggccctgtgatgtcatgccgaggtttgcagcagttccaggatagaaaatagggagcactttcatctcagccctgggtataagtctcaaagttccttttctgggaggggatccttgaggccatccagcagcccatagtctgagtcttcttcttcctccttgggcttctccacacctgtgtccaaagcctccttctcctcctttgttctcaggtaccactaccagttgttgggcagggagacctcccgctgctgcccatcctagggtgcatcctccaacatgggtgcattttggttcagccagcacctacaccacctgcagcccaggtctcctgtggtgggcctgagcttcctccctatcaaatggaggtgttttggggttgctacctttgctgaagcccatgtccaggtcatcttggaggtggccaagggtacagggccctggggacaggtcagagggctgcaggggcaaaaaccacgaggatgaggggatctctaagtcagactgcctggatccacatcccagagactagctgcaaggcctggggaagactgattcacctctctgggcatcagtttcctcccctgtaaagtgggaggtataacagattcactcctacagttgtctctgagctttacagcaggtaatgtgtgcaaagtactttgcacaatgcctggcacatggtaggtgataataaatagggttactatgatatcatcatctgagctaggtcactcatgcacttctccaatgcttcagggttcccctccatccctcacagggtagca

SEQ ID NO: 17129 - protein, 138 aa, Homo sapiens
MGGSVGDHTWVLQPLHWPDLPADPKDRVKHLLAGRPGHQRSLLMSKVPVVVVHRMGAAPEIQHHTGTAQHCAMVVALTFQIGPMLPAGMMHHLPYPECNRWFYRKKLGPDAVAHTCNPSTLGGQGGRITRSGAQDKPG

SEQ ID NO: 17130 - DNA, 510 bp, Homo sapiens
ccaggagccgaccaggatgaggaaaccacaggcgtagtccgagggtagcagcacagcatctcagcctcaggcctgcccggatgatgttggggatcaagatgaacacactgcagccaaggacaagagccccagaggagctctttgtcctgcaggagagggccggacacacgtcagagaagatggttgtatcttttcacggctcttctctgagaaatgaagccacaccatgttacagtctggaagaggaagccgggaatgggagatggcaacaatccctgtcattggaacgctggcctctctggacaagccacccttttggaaccccttcccttatgcctgtggcggtggcatggtgctgtatcctgcctgggctctgggctctggcctctgctctgtcctccctcttgctctccctaccctgtttctcaggggcctggatgcctctcgctctggtcaaatgtcttcaacaaagatgacttcccagtctgtcagggagacacttcctggaga

SEQ ID NO: 17131 - protein, 131 aa, Homo sapiens
MMLGIKMNTLQPRTRAPEELFVLQERAGHTSEKMVVSFHGSSLRNEATPCYSLEEEAGNGRWQQSLSLERWPLWTSHPFGTPSLMPVAVAWCCILPGLWALASALSSLLLSLPCFSGAWMPLALVKCLQQR

SEQ ID NO: 17132 - DNA, 560 bp, Homo sapiens
ccggatgccaggagtcacaaagggccgaccaggatgaggaaacaccaggcggagtccggaggaagcagcaccgcatcccagccccaggccttcccggacggtgttggttgggagtgcagtgaatagaagacacttctctgcaccccaaaagctccatgctgattgcgagaaggaaatgctggatggaggggttcctggaactactgtgagggaaatggtaacagaactttggatgtggaacgtgcagtaggagttacacgaagtgcgggtctgcacttggggtggtcagcacggcggatgcccagcaaaggcactgcctggtccacatcccggagtggtctctacgccccagtcggcatcgcagctgatggtgaaacttttggtgtggcagaagagtgtccacaaactttggaagttgctagagaaaaatgaaacgactagttttgaaagccttacttctgccaatggaagcacattccagcatgtcgccaacgcaatccattttccaccactttcacaagaaaagttacggcacaattatactatcctacccttatata

SEQ ID NO: 17133 - protein, 63 aa, Homo sapiens
MVKLLVWQKSVHKLWKLLEKNETTSFESLTSANGSTFQHVANAIHFPPLSQEKLRHNYTILPL

SEQ ID NO: 17134 - DNA, 1895 bp, Homo sapiens
aaaatcctgcgggagagggggtggggcaaccctctggaggcagcgcgcccgcgggcagcctcgttgtggctccttgggctctgttggcggcggcgctagcttcggagtctcccgcgcgcacctcagccgcctcctagcggcgcggcgctcgctcctacgcctaaaatgaccaatgtgtgatttcagtggaataaatggcgtccaaagtcacagatgctatagtctggtatcaaaagaagattggagcatatgatcaacaaatatgggaaaaatctgttgaacagagagaaatcaaggggctaaggaataaaccaaagaaaacagcacatgtgaaaccagacctcatagatgttgatcttgtaagagggtctgcatttgcaaaggcaaagcctgaaagtccttggacttctctgaccagaaagggaattgttcgagttgtatttttcccctttttcttccggtggtggttacaagtaacatcaaaggtcatctttttctggcttcttgtcctttatcttcttcaagttgctgcaatagtattattctgctccacttctagcccacacagcatacctctgacagaggtgattgggccgatatggctgatgctgctcctgggaactgtgcattgccagattgtttccacaagaacacccaaacctcctctaagtacagggggtaaaagaagaaggaaattaagaaaagcagcccatttggaagtacatagggaaggagatggttctagtaccacagataacacacaagagggagcagttcagaaccacggtacaagcacctctcacagcgttggcactgtcttcagagatctctggcatgctgctttctttttatcaggatcaaagaaagcaaagaattcaattgataaatcaactgaaactgacaatggctatgtatcccttgatgggaagaagactgttaaaagcggtgaagatggaatacaaaaccatgaacctcagtgtgaaactattcgaccagaagagacagcctggaacacaggaacactgaggaatggtcctagcaaagatacccaaaggacaataacaaatgtctctgatgaagtctccagtgaggaaggtcctgaaacaggatactcattacgtcgtcatgtggacaggacttctgaaggtgttcttcggaatagaaagtcacaccattataagaaacattaccctaatgaggacgcccctaaatcgggtactagttgcagctctcgctgttcaagttccagacaggattctgagagtgcaaggccagaatctgaaacagaagatgtgttatgggaagacttgttacattgtgcagaatgccattcatcttgtaccagtgagacagatgtggaaaatcatcagattaatccatgtgtgaaaaaagaatatagagatgacccttttcatcagagtcatttgccctggctccatagttcccacccaggattagaaaaaataagtgctatagtatgggaaggtaatgattgtaagaaagcagacatgtctgtacttgaaatcagtggaatgataatgaacagagtgaacagccatataccaggaataggataccagatttttggaaatgcagtctctctcatactgggtttaactccatttgttttccgactttctcaagctacagacttggaacaactcacagcacattctgcttcagaactttatgtgattgcatttggttctaatgaagatgtcatagttctttctatggttataataagttttgtggttcgcgtgtctcttgtgtggattttcttttttttgctctgtgtagcagaaagaacttataaacaggtgggtataatgtagacttccgaataagaatattttatcgttttcataatattaaaagtattcctgaagtacttt

SEQ ID NO: 17135 - protein, 546 aa, Homo sapiens
MASKVTDAIVWYQKKIGAYDQQIWEKSVEQREIKGLRNKPKKTAHVKPDLIDVDLVRGSAFAKAKPESPWTSLTRKGIVRVVFFPFFFRWWLQVTSKVIFFWLLVLYLLQVAAIVLFCSTSSPHSIPLTEVIGPIWLMLLLGTVHCQIVSTRTPKPPLSTGGKRRRKLRKAAHLEVHREGDGSSTTDNTQEGAVQNHGTSTSHSVGTVFRDLWHAAFFLSGSKKAKNSIDKSTETDNGYVSLDGKKTVKSGEDGIQNHEPQCETIRPEETAWNTGTLRNGPSKDTQRTITNVSDEVSSEEGPETGYSLRRHVDRTSEGVLRNRKSHHYKKHYPNEDAPKSGTSCSSRCSSSRQDSESARPESETEDVLWEDLLHCAECHSSCTSETDVENHQINPCVKKEYRDDPFHQSHLPWLHSSHPGLEKISAIVWEGNDCKKADMSVLEISGMIMNRVNSHIPGIGYQIFGNAVSLILGLTPFVFRLSQATDLEQLTAHSASELYVIAFGSNEDVIVLSMVIISFVVRVSLVWIFFFLLCVAERTYKQVGIM

SEQ ID NO: 17136 - DNA, 1986 bp, Homo sapiens
aaaatcctgcgggagagggggtggggcaaccctctggaggcagcgcgcccgcgggcagcctcgttgtggctccttgggctctgttggcggcggcgctagcttcggagtctcccgcgcgcacctcagccgcctcctagcggcgcggcgctcgctcctacgcctaaaatgaccaatgtgtgatttcagtggaataaatggcgtccaaagtcacagatgctatagtctggtatcaaaagaagattggagcatatgatcaacaaatatgggaaaaatctgttgaacagagagaaatcaaggggctaaggaataaaccaaagaaaacagcacatgtgaaaccagacctcatagatgttgatcttgtaagagggtctgcatttgcaaaggcaaagcctgaaagtccttggacttctctgaccagaaagggaattgttcgagttgtatttttcccctttttcttccggtggtggttacaagtaacatcaaaggtcatctttttctggcttcttgtcctttatcttcttcaagttgctgcaatagtattattctgctccacttctagcccacacagcatacctctgacagaggtgattgggccgatatggctgatgctgctcctgggaactgtgcattgccagattgtttccacaagaacacccaaacctcctctaagtacagggggtaaaagaagaaggaaattaagaaaagcagcccatttggaagtacatagggaaggagatggttctagtaccacagataacacacaagagggagcagttcagaaccacggtacaagcacctctcacagcgttggcactgtcttcagagatctctggcatgctgctttctttttatcaggatcaaagaaagcaaagaattcaattgataaatcaactgaaactgacaatggctatgtatcccttgatgggaagaagactgttaaaagcggtgaagatggaatacaaaaccatgaacctcagtgtgaaactattcgaccagaagagacagcctggaacacaggaacactgaggaatggtcctagcaaagatacccaaaggacaataacaaatgtctctgatgaagtctccagtgaggaaggtcctgaaacaggatactcattacgtcgtcatgtggacaggacttctgaaggtgttcttcggaatagaaagtcacaccattataagaaacattaccctaatgaggacgcccctaaatcgggtactagttgcagctctcgctgttcaagttccagacaggattctgagagtgcaaggccagaatctgaaacagaagatgtgttatgggaagacttgttacattgtgcagaatgccattcatcttgtaccagtgagacagatgtggaaaatcatcagattaatccatgtgtgaaaaaagaatatagagatgacccttttcatcagagtcatttgccctggctccatagttcccacccaggattagaaaaaataagtgctatagtatgggaaggtaatgattgtaagaaagcagacatgtctgtacttgaaatcagtggaatgataatgaacagagtgaacagccatataccaggaataggataccagatttttggaaatgcagtctctctcatactgggtttaactccatttgttttccgactttctcaagctacagacttggaacaactcacagcacattctgcttcagaactttatgtgattgcatttggttctaatgaagatgtcatagttctttctatggttataataagttttgtggttcgcgtgtctcttgtgtggattttcttttttttgctctgtgtagcagaaagaacttataaacaggtgggtataatgtagacttccgaataagaatattttatcgttttcataatattaaaagtattcctgaagtactttattatttcattatatcatttttacctaattattttttattttgcttttatagtacctaaccaaataaaatcttaacaattcatattttgtt

SEQ ID NO: 17137 - protein, 546 aa, Homo sapiens; identical to SEQ ID NO: 17135

SEQ ID NO: 17138 - DNA, 1795 bp, Homo sapiens
ggggtggggcaaccctctggaggcagcgcgcccgcgggcagcctcgttgtggctccttgggctctgttggcggcggcgctagcttcggagtctcccgcgcgcacctcagccgcctcctagcggcgcggcgctcgctcctacgcctaaaatgaccaatgtgtgatttcagtggaataaatggcgtccaaagtcacagatgctatagtctggtatcaaaagaagattggagcatatgatcaacaaatatgggaaaaatctgttgaacagagagaaatcaaggggctaaggaataaaccaaagaaaacagcacatgtgaaaccagacctcatagatgttgatcttgtaagagggtctgcatttgcaaaggcaaagcctgaaagtccttggacttctctgaccagaaagggaattgttcgagttgtatttttcccctttttcttccggtggtggttacaagtaacatcaaaggtcatctttttctggcttcttgtcctttatcttcttcaagttgctgcaatagtattattctgctccacttctagcccacacagcatacctctgacagaggtgattgggccgatatggctgatgctgctcctgggaactgtgcattgccagattgtttccacaagaacacccaaacctcctctaagtacagggggtaaaagaagaaggaaattaagaaaagcagcccatttggaagtacatagggaaggagatggttctagtaccacagataacacacaagagggagcagttcagaaccacggtacaagcacctctcacagcgttggcactgtcttcagagatctctggcatgctgctttctttttatcaggatcaaagaaagcaaagaattcaattgataaatcaactgaaactgacaatggctatgtatcccttgatgggaagaagactgttaaaagcggtgaagatggaatacaaaaccatgaacctcagtgtgaaactattcgaccagaagagacagcctggaacacaggaacactgaggaatggtcctagcaaagatacccaaaggacaataacaaatgtctctgatgaagtctccagtgaggaaggtcctgaaacaggatactcattacgtcgtcatgtggacaggacttctgaaggtgttcttcggaatagaaagtcacaccattataagaaacattaccctaatgaggtatatactttgtccttaagtgtatacatacgtatctattttatatgttactaatttataacttctttcaacaattaaaaattgttgaaataaatatttcacattattatcaatatttattattgttgtatgatctggatttataaaatagcagttttaggtttacgtattgcacatgtattgatagatagccacacatttgagctcattttatgcattatctttgaagactcatacattgtttgttgtttgcttttaaagaagaacattctggagagagaatctgcaaactcctgtgttcactttttccacaatttgaaaggctttatacatttgatcatagcaaagttattttaagtaacttccttcatattgctgtcaccagttattaagtccccatacttcaaaattcagttcttttttctttgtttctatttttccttattaatctttattttctctaaacccttttcaactatatcatatctcttgagcttcaaattgtttaaataaagaatttcattcaattgtattttcagtttctaatctaagggtagaacatttggctttaaggcaaataaattacactgtttatcacttttttataaacatt

SEQ ID NO: 17139 - protein, 352 aa, Homo sapiens
MASKVTDAIVWYQKKIGAYDQQIWEKSVEQREIKGLRNKPKKTAHVKPDLIDVDLVRGSAFAKAKPESPWTSLTRKGIVRVVFFPFFFRWWLQVTSKVIFFWLLVLYLLQVAAIVLFCSTSSPHSIPLTEVIGPIWLMLLLGTVHCQIVSTRTPKPPLSTGGKRRRKLRKAAHLEVHREGDGSSTTDNTQEGAVQNHGTSTSHSVGTVFRDLWHAAFFLSGSKKAKNSIDKSTETDNGYVSLDGKKTVKSGEDGIQNHEPQCETIRPEETAWNTGTLRNGPSKDTQRTITNVSDEVSSEEGPETGYSLRRHVDRTSEGVLRNRKSHHYKKHYPNEVYTLSLSVYIRIYFICY

SEQ ID NO: 17140 - DNA, 4611 bp, Homo sapiens
ggggtggggcaaccctctggaggcagcgcgcccgcgggcagcctcgttgtggctccttgggctctgttggcggcggcgctagcttcggagtctcccgcgcgcacctcagccgcctcctagcggcgcggcgctcgctcctacgcctaaaatgaccaatgtgtgatttcagtggaataaatggcgtccaaagtcacagatgctatagtctggtatcaaaagaagattggagcatatgatcaacaaatatgggaaaaatctgttgaacagagagaaatcaaggggctaaggaataaaccaaagaaaacagcacatgtgaaaccagacctcatagatgttgatcttgtaagagggtctgcatttgcaaaggcaaagcctgaaagtccttggacttctctgaccagaaagggaattgttcgagttgtatttttcccctttttcttccggtggtggttacaagtaacatcaaaggtcatctttttctggcttcttgtcctttatcttcttcaagttgctgcaatagtattattctgctccacttctagcccacacagcatacctctgacagaggtgattgggccgatatggctgatgctgctcctgggaactgtgcattgccagattgtttccacaagaacacccaaacctcctctaagtacagggggtaaaagaagaaggaaattaagaaaagcagcccatttggaagtacatagggaaggagatggttctagtaccacagataacacacaagagggagcagttcagaaccacggtacaagcacctctcacagcgttggcactgtcttcagagatctctggcatgctgctttctttttatcaggatcaaagaaagcaaagaattcaattgataaatcaactgaaactgacaatggctatgtatcccttgatgggaagaagactgttaaaagcggtgaagatggaatacaaaaccatgaacctcagtgtgaaactattcgaccagaagagacagcctggaacacaggaacactgaggaatggtcctagcaaagatacccaaaggacaataacaaatgtctctgatgaagtctccagtgaggaaggtcctgaaacaggatactcattacgtcgtcatgtggacaggacttctgaaggtgttcttcggaatagaaagtcacaccattataagaaacattaccctaatgaggacgcccctaaatcgggtactagttgcagctctcgctgttcaagttccagacaggattctgagagtgcaaggccagaatctgaaacagaagatgtgttatgggaagacttgttacattgtgcagaatgccattcatcttgtaccagtgagacagatgtggaaaatcatcagattaatccatgtgtgaaaaaagaatatagagatgacccttttcatcagagtcatttgccctggctccatagttcccacccaggattagaaaaaataagtgctatagtatgggaaggtaatgattgtaagaaagcagacatgtctgtacttgaaatcagtggaatgataatgaacagagtgaacagccatataccaggaataggataccagatttttggaaatgcagtctctctcatactgggtttaactccatttgttttccgactttctcaagctacagacttggaacaactcacagcacattctgcttcagaactttatgtgattgcatttggttctaatgaagatgtcatagttctttctatggttataataagttttgtggttcgcgtgtctcttgtgtggattttcttttttttgctctgtgtagcagaaagaacttataaacagcgattactttttgcaaaactctttggacatttaacatctgcaaggagggctcgaaaatctgaggttcctcatttccggttgaagaaagtacagaatataaaaatgtggctatctctccgttcctatcttaagcgtcgaggtcctcagcgatcagttgatgtaatagtttcatctgctttcttattgactatctcagttgtatttatctgttgtgcccagataaacctctacttgaaaatggagaaaaaacctaacaaaaaggaggaactgacactagtgaataatgttttaaaactggctactaaactgctaaaggagttggacagtccttttagattatatgggcttacaatgaatccgctgctttataacatcacccaggttgttatcctgtcagctgtttctggtgttatcagtgacttgcttggatttaatttaaagctatggaagattaagtcatgacaattcaaagaaaagaagatgtagcctcttttccagaataagagtactgactaagctgcctgaaagcttgtcactgattctttgcttcaggagtctcagctagggagttgaagtgtttacatcagactgtcttgtgcaattcttatatttattttactggttcacttttttttacatttattttagtctttatatttttatttttaagcattgatgtacttagttgttgaaagggtgatgaaactgatatccagatacttgagatcctggtaattggtcataaataattggcaaaataacaaattgtgaaaatagaagccattgctcagcaccgtttctccatcaatgccgtgaacttgccttacttgaggaaaaattctttaactttggaatattgcattgaactcagctatacacataaaacattttctttggtaaatcaagatccagtcagggtttctcttgaattattttggaacaatgccaggatccaaactgattaagttacagtttaagcacccttcagtattaatatatacggtattatataacaggtcaacaagtgctctttgatgataaaacttgtaatagagcaataattgtaaatggttaccatactgtaagatattttgataaaaattaactagtaatacttgtatttatttgaaacactgggctgtttgcacagctccaactgtgcatgctcaaaatgtgcactttttaaaattgttacttttaatgcgtatctttatatgggatctgttatagtatactagggcatgatatggtatccttttgagtgaggtatatactcatctcacaagtgaagtgcctactgatattactaaagtacattatgtttactcaagtaaataattttctccccatggtacactctagtgtaggctattcataccacactgaaatgaacaactgaagaataaggctaagaaccaataaaatatttctctaattgctagttgtaaaactgtatccaaattttcagaaaagacagcttcagcttgcaaattctatcctctaaacttatctggtgcattctccccaccccacccccattatataagggctattttagatgcttttaacctccccaacaaataatttgccaagtgtccaatgagaacttatcatgttggtgtgttaggtaaatcgggcaaatatgatagtgtcttacattgggccttgattttaagttgttatatttgtacaatcgagtattttagaaattacatgaaacatgaaacagtttttgcaattttttttaaactgggcatctggtttctaaaaatttatttgaaacaatctagaattttcttggtgcaaagtgtatcatgtggaatatcctcatatttttaccatattttaagaactttaagacgattaattgtaaataatttatttgattggtgcagttctaatccctaaatcataatcttaaaatcaggaatgtgtggagaacagagccatgtcatatcactttgctcttaccattccttttgatcagcctcaattcagcctcattgtgtagtatgttttttctttctatgaaaaacaacagaaagcatttcattttatttgcctatgttcaaatatgtttaataatgaccaaagtgcattctgagttttttcaaggaatgtaatactggagctttaagaacatacttagtttctcatgtgaaaacttaggctttgtctgatgtttttccttcctctattgtctaatgttgaggttgtttttaggaattatgttttataaactttttcaatataaggtacatgcctatacagaacttaacattttgcacagaatatatcaaatatattttgagaaaaaaagtacggcatgagttctgttaggaataaaagatgaaactattgtatctcacaaaaaatcttatttcagaatggaaatatttttgagaaaagtagctgagtatactggtttaagaaaatgcttgttttagattgaggttaacttagagttgggagttgatttattaagtacagtatacctctcaacagtttataaataatatgttgaattatgtcagtgtgggcagcagtagaatactaaaaggaaaatgtcatgttaagcaatttcagaacattaactgaactattttcaaagcagaaaaattgacattgctgcctttaagaataccatgaatgtaagaaattgaaagaaattgtaaaatatcacataatatagaaatggcagttcaaagagaattgtggcagatgttgtgtgtgaactgttgtttctttgccacatgtgttgtatttgaaagttttacagtaagtttaaaataaaacattctgtgactg

SEQ ID NO: 17141 - protein, 695 aa, Homo sapiens
MASKVTDAIVWYQKKIGAYDQQIWEKSVEQREIKGLRNKPKKTAHVKPDLIDVDLVRGSAFAKAKPESPWTSLTRKGIVRVVFFPFFFRWWLQVTSKVIFFWLLVLYLLQVAAIVLFCSTSSPHSIPLTEVIGPIWLMLLLGTVHCQIVSTRTPKPPLSTGGKRRRKLRKAAHLEVHREGDGSSTTDNTQEGAVQNHGTSTSHSVGTVFRDLWHAAFFLSGSKKAKNSIDKSTETDNGYVSLDGKKTVKSGEDGIQNHEPQCETIRPEETAWNTGTLRNGPSKDTQRTITNVSDEVSSEEGPETGYSLRRHVDRTSEGVLRNRKSHHYKKHYPNEDAPKSGTSCSSRCSSSRQDSESARPESETEDVLWEDLLHCAECHSSCTSETDVENHQINPCVKKEYRDDPFHQSHLPWLHSSHPGLEKISAIVWEGNDCKKADMSVLEISGMIMNRVNSHIPGIGYQIFGNAVSLILGLTPFVFRLSQATDLEQLTAHSASELYVIAFGSNEDVIVLSMVIISFVVRVSLVWIFFFLLCVAERTYKQRLLFAKLFGHLTSARRARKSEVPHFRLKKVQNIKMWLSLRSYLKRRGPQRSVDVIVSSAFLLTISVVFICCAQINLYLKMEKKPNKKEELTLVNNVLKLATKLLKELDSPFRLYGLTMNPLLYNITQVVILSAVSGVISDLLGFNLKLWKIKS

SEQ ID NO: 17142 - DNA, 2742 bp, Homo sapiens
aagtaaccagagtgctatgtctgcatgctgttcagtctccttttggaaggtgggaaataaagtcatttgtatgtttttctctcttgcacagcctaaaatgaccaatgtgtgatttcagtggaataaatggcgtccaaagtcacagatgctatagtctggtatcaaaagaagattggagcatatgatcaacaaatatgggaaaaatctgttgaacagagagaaatcaagtttattaaactggggctaaggaataaaccaaagaaaacagcacatgtgaaaccagacctcatagatgttgatcttgtaagagggtctgcatttgcaaaggcaaagcctgaaagtccttggacttctctgaccagaaagggaattgttcgagttgtatttttcccctttttcttccggtggtggttacaagtaacatcaaaggtcatctttttctggcttcttgtcctttatcttcttcaagttgctgcaatagtattattctgctccacttctagcccacacagcatacctctgacagaggtgattgggccgatatggctgatgctgctcctgggaactgtgcattgccagattgtttccacaagaacacccaaacctcctctaagtacagggggtaaaagaagaaggaaattaagaaaagcagcccatttggaagtacatagggaaggagatggttctagtaccacagataacacacaagagggagcagttcagaaccacggtacaagcacctctcacagcgttggcactgtcttcagagatctctggcatgctgctttctttttatcaggatcaaagaaagcaaagaattcaattgataaatcaactgaaactgacaatggctatgtatcccttgatgggaagaagactgttaaaagcggtgaagatggaatacaaaaccatgaacctcagtgtgaaactattcgaccagaagagacagcctggaacacaggaacactgaggaatggtcctagcaaagatacccaaaggacaataacaaatgtctctgatgaagtctccagtgaggaaggtcctgaaacaggatactcattacgtcgtcatgtggacaggacttctgaaggtgttcttcggaatagaaagtcacaccattataagaaacattaccctaatgaggtatatactttgtccttaagtgtatacatacgtatctattttatatgttactaatttataacttctttcaacaattaaaaattgttgaaataaatatttcacattattatcaatatttattattgttgtatgatctggatttataaaatagcagttttaggtttacgtattgcacatgtattgatagatagccacacatttgagctcattttatgcattatctttgaagactcatacattgtttgttgtttgcttttaaagaagaacattctggagagagaatctgcaaactcctgtgttcactttttccacaatttgaaaggctttatacatttgatcatagcaaagttattttaagtaacttccttcatattgctgtcaccagttattaagtccccatacttcaaaattcagttcttttttctttgtttctatttttccttattaatctttattttctctaaacccttttcaactatatcatatctcttgagcttcaaattgtttaaataaagaatttcattcaattgtattttcagtttctaatctaagggtagaacatttggctttaaggcaaataaattacactgtttatcacttttttataaacattaccttctactctttttgagctatgttagtaattttttccttgatggttttgggttaaacttgtaaaacaaacacatgttacgctgtgctggaatatgattgccttcagagtattaagattagaagagttactattctttgcacactcttctttgtggttgtgtctctggttaatctttctggtgattgtggttttgtttcttttcccagtggttgccatacagacactaatgccagtgtgtctgctctattgcctcttcacccatgtcatttgatgtagtgtttcttgttcctaagccagataaccaagcttgtaaaattttgtcttactgtatgtactgttagaagtcagttggtgctggaagggagacggagggctgtttgacccctctcccagaataaattatttagcagtagcagtatttttctcactccatgatcttggcttttgttggtttgcaactgtattttaaacgattgagtttcttgaagcgcagaacattattctacctattaacttttaaattaaaaggttgtttaaaatcttgatttccagctaagtaaggctgatagtaagcattgatttacatcttttttaatgatataagaaattacataaatataaaatatggctataaaattcttcgtctataaagtgaagaatgtagactaggtgatattttaaaagctgcattcagttctcaaaaatttttactcttaaaccagctttaaagggcgtttctaaaaaaaagcaaaataaagcctcctttgaataaataaaatggaaacagaagatttgtagtgctcttttgcgtttttatttataaatttaaatttattttataaattactgtactctctccaattgctagtaatgttttttctttaagagtgaggcatgaaaaaatcatttggacccactcaaacacaatgagcaagcatctctagtacctagattgtgccatttatcactaaataaccaaaacc

SEQ ID NO: 17143 - protein, 356 aa, Homo sapiens
MASKVTDAIVWYQKKIGAYDQQIWEKSVEQREIKFIKLGLRNKPKKTAHVKPDLIDVDLVRGSAFAKAKPESPWTSLTRKGIVRVVFFPFFFRWWLQVTSKVIFFWLLVLYLLQVAAIVLFCSTSSPHSIPLTEVIGPIWLMLLLGTVHCQIVSTRTPKPPLSTGGKRRRKLRKAAHLEVHREGDGSSTTDNTQEGAVQNHGTSTSHSVGTVFRDLWHAAFFLSGSKKAKNSIDKSTETDNGYVSLDGKKTVKSGEDGIQNHEPQCETIRPEETAWNTGTLRNGPSKDTQRTITNVSDEVSSEEGPETGYSLRRHVDRTSEGVLRNRKSHHYKKHYPNEVYTLSLSVYIRIYFICY

SEQ ID NO: 17144 - DNA, 4822 bp, Homo sapiens
agagtgctatgtctgcatgctgttcagtctccttttggaaggtgggaaataaagtcatttgtatgtttttctctcttgcacagcctaaaatgaccaatgtgtgatttcagtggaataaatggcgtccaaagtcacagatgctatagtctggtatcaaaagaaggagtttctctctgtggccaccaccgccccaggcccacagcaagtactgcctggctactgccagtgttcactcaaggaccaagggctcttcattcagtgtttgattggagcatatgatcaacaaatatgggaaaaatctgttgaacagagagaaatcaagtttattaaactggggctaaggaataaaccaaagaaaacagcacatgtgaaaccagacctcatagatgttgatcttgtaagagggtctgcatttgcaaaggcaaagcctgaaagtccttggacttctctgaccagaaagggaattgttcgagttgtatttttcccctttttcttccggtggtggttacaagtaacatcaaaggtcatctttttctggcttcttgtcctttatcttcttcaagttgctgcaatagtattattctgctccacttctagcccacacagcatacctctgacagaggtgattgggccgatatggctgatgctgctcctgggaactgtgcattgccagattgtttccacaagaacacccaaacctcctctaagtacagggggtaaaagaagaaggaaattaagaaaagcagcccatttggaagtacatagggaaggagatggttctagtaccacagataacacacaagagggagcagttcagaaccacggtacaagcacctctcacagcgttggcactgtcttcagagatctctggcatgctgctttctttttatcaggatcaaagaaagcaaagaattcaattgataaatcaactgaaactgacaatggctatgtatcccttgatgggaagaagactgttaaaagcggtgaagatggaatacaaaaccatgaacctcagtgtgaaactattcgaccagaagagacagcctggaacacaggaacactgaggaatggtcctagcaaagatacccaaaggacaataacaaatgtctctgatgaagtctccagtgaggaaggtcctgaaacaggatactcattacgtcgtcatgtggacaggacttctgaaggtgttcttcggaatagaaagtcacaccattataagaaacattaccctaatgaggacgcccctaaatcgggtactagttgcagctctcgctgttcaagttccagacaggattctgagagtgcaaggccagaatctgaaacagaagatgtgttatgggaagacttgttacattgtgcagaatgccattcatcttgtaccagtgagacagatgtggaaaatcatcagattaatccatgtgtgaaaaaagaatatagagatgacccttttcatcagagtcatttgccctggctccatagttcccacccaggattagaaaaaataagtgctatagtatgggaaggtaatgattgtaagaaagcagacatgtctgtacttgaaatcagtggaatgataatgaacagagtgaacagccatataccaggaataggataccagatttttggaaatgcagtctctctcatactgggtttaactccatttgttttccgactttctcaagctacagacttggaacaactcacagcacattctgcttcagaactttatgtgattgcatttggttctaatgaagatgtcatagttctttctatggttataataagttttgtggttcgcgtgtctcttgtgtggattttcttttttttgctctgtgtagcagaaagaacttataaacagcgattactttttgcaaaactctttggacatttaacatctgcaaggagggctcgaaaatctgaggttcctcatttccggttgaagaaagtacagaatataaaaatgtggctatctctccgttcctatcttaagcgtcgaggtcctcagcgatcagttgatgtaatagtttcatctgctttcttattgactatctcagttgtatttatctgttgtgcccagctacttcatgtacacgagatcttccttgattgtcactacaattgggaattggtaatctggtgcatctcgttaacactttttctcctaagatttgttacccttggatcagaaacaagtaaaaaatatagtaatacctcaatattacttactgaacagataaacctctacttgaaaatggagaaaaaacctaacaaaaaggaggaactgacactagtgaataatgttttaaaactggctactaaactgctaaaggagttggacagtccttttagattatatgggcttacaatgaatccgctgctttataacatcacccaggttgttatcctgtcagctgtttctggtgttatcagtgacttgcttggatttaatttaaagctatggaagattaagtcatgacaattcaaagaaaagaagatgtagcctcttttccagaataagagtactgactaagctgcctgaaagcttgtcactgattctttgcttcaggagtctcagctagggagttgaagtgtttacatcagactgtcttgtgcaattcttatatttattttactggttcacttttttttacatttattttagtctttatatttttatttttaagcattgatgtacttagttgttgaaagggtgatgaaactgatatccagatacttgagatcctggtaattggtcataaataattggcaaaataacaaattgtgaaaatagaagccattgctcagcaccgtttctccatcaatgccgtgaacttgccttacttgaggaaaaattctttaactttggaatattgcattgaactcagctatacacataaaacattttctttggtaaatcaagatccagtcagggtttctcttgaattattttggaacaatgccaggatccaaactgattaagttacagtttaagcacccttcagtattaatatatacggtattatataacaggtcaacaagtgctctttgatgataaaacttgtaatagagcaataattgtaaatggttaccatactgtaagatattttgataaaaattaactagtaatacttgtatttatttgaaacactgggctgtttgcacagctccaactgtgcatgctcaaaatgtgcactttttaaaattgttacttttaatgcgtatctttatatgggatctgttatagtatactagggcatgatatggtatccttttgagtgaggtatatactcatctcacaagtgaagtgcctactgatattactaaagtacattatgtttactcaagtaaataattttctccccatggtacactctagtgtaggctattcataccacactgaaatgaacaactgaagaataaggctaagaaccaataaaatatttctctaattgctagttgtaaaactgtatccaaattttcagaaaagacagcttcagcttgcaaattctatcctctaaacttatctggtgcattctccccaccccacccccattatataagggctattttagatgcttttaacctccccaacaaataatttgccaagtgtccaatgagaacttatcatgttggtgtgttaggtaaatcgggcaaatatgatagtgtcttacattgggccttgattttaagttgttatatttgtacaatcgagtattttagaaattacatgaaacatgaaacagtttttgcaattttttttaaactgggcatctggtttctaaaaatttatttgaaacaatctagaattttcttggtgcaaagtgtatcatgtggaatatcctcatatttttaccatattttaagaactttaagacgattaattgtaaataatttatttgattggtgcagttctaatccctaaatcataatcttaaaatcaggaatgtgtggagaacagagccatgtcatatcactttgctcttaccattccttttgatcagcctcaattcagcctcattgtgtagtatgttttttctttctatgaaaaacaacagaaagcatttcattttatttgcctatgttcaaatatgtttaataatgaccaaagtgcattctgagttttttcaaggaatgtaatactggagctttaagaacatacttagtttctcatgtgaaaacttaggctttgtctgatgtttttccttcctctattgtctaatgttgaggttgtttttaggaattatgttttataaactttttcaatataaggtacatgcctatacagaacttaacattttgcacagaatatatcaaatatattttgagaaaaaaagtacggcatgagttctgttaggaataaaagatgaaactattgtatctcacaaaaaatcttatttcagaatggaaatatttttgagaaaagtagctgagtatactggtttaagaaaatgcttgttttagattgaggttaacttagagttgggagttgatttattaagtacagtatacctctcaacagtttataaataatatgttgaattatgtcagtgtgggcagcagtagaatactaaaaggaaaatgtcatgttaagcaatttcagaacattaactgaactattttcaaagcagaaaaattgacattgctgcctttaagaataccatgaatgtaagaaattgaaagaaattgtaaaatatcacataatatagaaatggcagttcaaagagaattgtggcagatgttgtgtgtgaactgttgtttctttgccacatgtgttgtatttgaaagttttacagtaagtttaaaataaaacattctgtgactg

SEQ ID NO: 17145 - protein, 785 aa, Homo sapiens
MASKVTDAIVWYQKKEFLSVATTAPGPQQVLPGYCQCSLKDQGLFIQCLIGAYDQQIWEKSVEQREIKFIKLGLRNKPKKTAHVKPDLIDVDLVRGSAFAKAKPESPWTSLTRKGIVRVVFFPFFFRWWLQVTSKVIFFWLLVLYLLQVAAIVLFCSTSSPHSIPLTEVIGPIWLMLLLGTVHCQIVSTRTPKPPLSTGGKRRRKLRKAAHLEVHREGDGSSTTDNTQEGAVQNHGTSTSHSVGTVFRDLWHAAFFLSGSKKAKNSIDKSTETDNGYVSLDGKKTVKSGEDGIQNHEPQCETIRPEETAWNTGTLRNGPSKDTQRTITNVSDEVSSEEGPETGYSLRRHVDRTSEGVLRNRKSHHYKKHYPNEDAPKSGTSCSSRCSSSRQDSESARPESETEDVLWEDLLHCAECHSSCTSETDVENHQINPCVKKEYRDDPFHQSHLPWLHSSHPGLEKISAIVWEGNDCKKADMSVLEISGMIMNRVNSHIPGIGYQIFGNAVSLILGLTPFVFRLSQATDLEQLTAHSASELYVIAFGSNEDVIVLSMVIISFVVRVSLVWIFFFLLCVAERTYKQRLLFAKLFGHLTSARRARKSEVPHFRLKKVQNIKMWLSLRSYLKRRGPQRSVDVIVSSAFLLTISVVFICCAQLLHVHEIFLDCHYNWELVIWCISLTLFLLRFVTLGSETSKKYSNTSILLTEQINLYLKMEKKPNKKEELTLVNNVLKLATKLLKELDSPFRLYGLTMNPLLYNITQVVILSAVSGVISDLLGFNLKLWKIKS

SEQ ID NO: 17146 - DNA, 5102 bp, Homo sapiens
agagtgctatgtctgcatgctgttcagtctccttttggaaggtgggaaataaagtcatttgtatgtttttctctcttgcacagcctaaaatgaccaatgtgtgatttcagtggaataaatggcgtccaaagtcacagatgctatagtctggtatcaaaagaaggagtttctctctgtggccaccaccgccccaggcccacagcaagtactgcctggctactgccagtgttcactcaaggaccaagggctcttcattcagtgtttgattggagcatatgatcaacaaatatgggaaaaatctgttgaacagagagaaatcaagtttattaaactggggctaaggaataaaccaaagaaaacagcacatgtgaaaccagacctcatagatgttgatcttgtaagagggtctgcatttgcaaaggcaaagcctgaaagtccttggacttctctgaccagaaagggaattgttcgagttgtatttttcccctttttcttccggtggtggttacaagtaacatcaaaggtcatctttttctggcttcttgtcctttatcttcttcaagttgctgcaatagtattattctgctccacttctagcccacacagcatacctctgacagaggtgattgggccgatatggctgatgctgctcctgggaactgtgcattgccagattgtttccacaagaacacccaaacctcctctaagtacagggggtaaaagaagaaggaaattaagaaaagcagcccatttggaagtacatagggaaggagatggttctagtaccacagataacacacaagagggagcagttcagaaccacggtacaagcacctctcacagcgttggcactgtcttcagagatctctggcatgctgctttctttttatcaggatcaaagaaagcaaagaattcaattgataaatcaactgaaactgacaatggctatgtatcccttgatgggaagaagactgttaaaagcggtgaagatggaatacaaaaccatgaacctcagtgtgaaactattcgaccagaagagacagcctggaacacaggaacactgaggaatggtcctagcaaagatacccaaaggacaataacaaatgtctctgatgaagtctccagtgaggaaggtcctgaaacaggatactcattacgtcgtcatgtggacaggacttctgaaggtgttcttcggaatagaaagtcacaccattataagaaacattaccctaatgaggacgcccctaaatcgggtactagttgcagctctcgctgttcaagttccagacaggattctgagagtgcaaggccagaatctgaaacagaagatgtgttatgggaagacttgttacattgtgcagaatgccattcatcttgtaccagtgagacagatgtggaaaatcatcagattaatccatgtgtgaaaaaagaatatagagatgacccttttcatcagagtcatttgccctggctccatagttcccacccaggattagaaaaaataagtgctatagtatgggaaggtaatgattgtaagaaagcagacatgtctgtacttgaaatcagtggaatgataatgaacagagtgaacagccatataccaggaataggataccagatttttggaaatgcagtctctctcatactgggtttaactccatttgttttccgactttctcaagctacagacttggaacaactcacagcacattctgcttcagaactttatgtgattgcatttggttctaatgaagatgtcatagttctttctatggttataataagttttgtggttcgcgtgtctcttgtgtggattttcttttttttgctctgtgtagcagaaagaacttataaacagcgattactttttgcaaaactctttggacatttaacatctgcaaggagggctcgaaaatctgaggttcctcatttccggttgaagaaagtacagaatataaaaatgtggctatctctccgttcctatcttaagcgtcgaggtcctcagcgatcagttgatgtaatagtttcatctgctttcttattgactatctcagttgtatttatctgttgtgcccagctacttcatgtacacgagatcttccttgattgtcactacaattgggaattggtaatctggtgcatctcgttaacactttttctcctaagatttgttacccttggatcagaaacaagtaaaaaatatagtaatacctcaatattacttactgaacagataaacctctacttgaaaatggagaaaaaacctaacaaaaaggaggaactgacactagtgaataatgttttaaaactggctactaaactgctaaaggagttggacagtccttttagattatatgggcttacaatgaatccgctgctttataacatcacccaggttgttatcctgtcagctgtttctggtgttatcagtgacttgcttggatttaatttaaagctatggaagattaagtcatgacaattcaaagaaaagaagatgtagcctcttttccagaataagagtactgactaagctgcctgaaagcttgtcactgattctttgcttcaggagtctcagctagggagttgaagtgtttacatcagactgtcttgtgcaattcttatatttattttactggttcacttttttttacatttattttagtctttatatttttatttttaagcattgatgtacttagttgttgaaagggtgatgaaactgatatccagatacttgagatcctggtaattggtcataaataattggcaaaataacaaattgtgaaaatagaagccattgctcagcaccgtttctccatcaatgccgtgaacttgccttacttgaggaaaaattctttaactttggaatattgcattgaactcagctatacacataaaacattttctttggtaaatcaagatccagtcagggtttctcttgaattattttggaacaatgccaggatccaaactgattaagttacagtttaagcacccttcagtattaatatatacggtattatataacaggtcaacaagtgctctttgatgataaaacttgtaatagagcaataattgtaaatggttaccatactgtaagatattttgataaaaattaactagtaatacttgtatttatttgaaacactgggctgtttgcacagctccaactgtgcatgctcaaaatgtgcactttttaaaattgttacttttaatgcgtatctttatatgggatctgttatagtatactagggcatgatatggtatccttttgagtgaggtatatactcatctcacaagtgaagtgcctactgatattactaaagtacattatgtttactcaagtaaataattttctccccatggtacactctagtgtaggctattcataccacactgaaatgaacaactgaagaataaggctaagaaccaataaaatatttctctaattgctagttgtaaaactgtatccaaattttcagaaaagacagcttcagcttgcaaattctatcctctaaacttatctggtgcattctccccaccccacccccattatataagggctattttagatgcttttaacctccccaacaaataatttgccaagtgtccaatgagaacttatcatgttggtgtgttaggtaaatcgggcaaatatgatagtgtcttacattgggccttgattttaagttgttatatttgtacaatcgagtattttagaaattacatgaaacatgaaacagtttttgcaattttttttaaactgggcatctggtttctaaaaatttatttgaaacaatctagaattttcttggtgcaaagtgtatcatgtggaatatcctcatatttttaccatattttaagaactttaagacgattaattgtaaataatttatttgattggtgcagttctaatccctaaatcataatcttaaaatcaggaatgtgtggagaacagagccatgtcatatcactttgctcttaccattccttttgatcagcctcaattcagcctcattgtgtagtatgttttttctttctatgaaaaacaacagaaagcatttcattttatttgcctatgttcaaatatgtttaataatgaccaaagtgcattctgagttttttcaaggaatgtaatactggagctttaagaacatacttagtttctcatgtgaaaacttaggctttgtctgatgtttttccttcctctattgtctaatgttgaggttgtttttaggaattatgttttataaactttttcaatataaggtacatgcctatacagaacttaacattttgcacagaatatatcaaatatattttgagaaaaaaagtacggcatgagttctgttaggaataaaagatgaaactattgtatctcacaaaaaatcttatttcagaatggaaatatttttgagaaaagtagctgagtatactggtttaagaaaatgcttgttttagattgaggttaacttagagttgggagttgatttattaagtacagtatacctctcaacagtttataaataatatgttgaattatgtcagtgtgggcagcagtagaatactaaaaggaaaatgtcatgttaagcaatttcagaacattaactgaactattttcaaagcagaaaaattgacattgctgcctttaagaataccatgaatgtaagaaattgaaagaaattgtaaaatatcacataatatagaaatggcagttcaaagagaattgtggcagatgttgtgtgtgaactgttgtttctttgccacatgtgttgtatttgaaagttttacagtaagtttaaaataaaacattctgtgactgacggtgtttttttttttaattttcaggtcatatacatttctatggtaattttgtgtttacttaacataaaatttagttagatttggggggagtgaaaataaattttttataactttccaacattttagattttgttatgattcttagaacatgaaagaataatacacaggtttttcatcaccaaaatgatattatatcattaatgtttgtttgcttctttgtttttgaatacagcaaactggctgtggcctgaaatattaaagctcattgtgaaaagata

SEQ ID NO: 17147 - protein, 785 aa, Homo sapiens; identical to SEQ ID NO: 17145

SEQ ID NO: 17148 - DNA, 1560 bp, Homo sapiens
caggcaggagctaccacgcccggctctccatatatcttctaaaccttaacttgagaggaaaacaaaaaggggaagtgataccagagttacggaggaaaagctactgtctcaggaactgagaccatgggagggacatgatcacttttagaaagatacagtcagaagaaagaaggaaaaagagaggaagaaagtggctcctcctcctttttctaatgccttgtcgtcagaatttcacagtactccttggccctggattcaggcatggctggattgagaggctcggataatatcttcacttctttttgctgtagactttggtcttgctggtcacattcttaggttggctctttctaggtggtggctaagttgctgcaatagtattattctgctccacttctagcccacacagcatacctctgacagaggtgattgggccgatatggctgatgctgctcctgggaactgtgcattgccagattgtttccacaagaacacccaaacctcctctaagtacagggggtaaaagaagaaggaaattaagaaaagcagcccatttggaagtacatagggaaggagatggttctagtaccacagataacacacaagagggagcagttcagaaccacggtacaagcacctctcacagcgttggcactgtcttcagagatctctggcatgctgctttctttttatcaggatcaaagaaagcaaagaattcaattgataaatcaactgaaactgacaatggctatgtatcccttgatgggaagaagactgttaaaagcggtgaagatggaatacaaaaccatgaacctcagtgtgaaactattcgaccagaagagacagcctggaacacaggaacactgaggaatggtcctagcaaagatacccaaaggacaataacaaatgtctctgatgaagtctccagtgaggaaggtcctgaaacaggatactcattacgtcgtcatgtggacaggacttctgaaggtgttcttcggaatagaaagtcacaccattataagaaacattaccctaatgaggacgcccctaaatcgggtactagttgcagctctcgctgttcaagttccagacaggattctgagagtgcaaggccagaatctgaaacagaagatgtgttatgggaagacttgttacattgtgcagaatgccattcatcttgtaccagtgagacagatgtggaaaatcatcagattaatccatgtgtgaaaaaagaatatagagatgacccttttcatcagagtcatttgccctggctccatagttcccacccaggattagaaaaaataagtgctatagtatgggaaggtaatgattgtaagaaagcagacatgtctgtacttgaaatcagtggaatgataatgaacagagtgagtttttaaattttattcttgtagttcaagggtaagacttagtaattatatataagataattactggaatattatattagtaaccttctgacctcatttcttcaccctgaaaaaaaagttacatgtgtgtatttgtttctgtctgtaatttaaacagtgatttgtcacc

SEQ ID NO: 17149 - protein, 317 aa, Homo sapiens
MLLLGTVHCQIVSTRTPKPPLSTGGKRRRKLRKAAHLEVHREGDGSSTTDNTQEGAVQNHGTSTSHSVGTVFRDLWHAAFFLSGSKKAKNSIDKSTETDNGYVSLDGKKTVKSGEDGIQNHEPQCETIRPEETAWNTGTLRNGPSKDTQRTITNVSDEVSSEEGPETGYSLRRHVDRTSEGVLRNRKSHHYKKHYPNEDAPKSGTSCSSRCSSSRQDSESARPESETEDVLWEDLLHCAECHSSCTSETDVENHQINPCVKKEYRDDPFHQSHLPWLHSSHPGLEKISAIVWEGNDCKKADMSVLEISGMIMNRVSF

SEQ ID NO: 17150 - DNA, 2924 bp, Homo sapiens
cccatggatattaattaccttatactctatacttttgatatgcttaaaatatttcataattaatgtagaatgtttctaaaatgtaatactaaatttatgaacaatctatgtttatttcttttgaaaagaaattgtttgaatcacattgctgctttatgttacctttttcatacttttagctacttcatgtacacgagatcttccttgattgtcactacaattgggaattggtaatctggtgcatctcgttaacactttttctcctaagatttgttacccttggatcagaaacaagtaaaaaatatagtaatacctcaatattacttactgaacagataaacctctacttgaaaatggagaaaaaacctaacaaaaaggaggaactgacactagtgaataatgttttaaaactggctactaaactgctaaaggagttggacagtccttttagattatatgggcttacaatgaatccgctgctttataacatcacccaggttgttatcctgtcagctgtttctggtgttatcagtgacttgcttggatttaatttaaagctatggaagattaagtcatgacaattcaaagaaaagaagatgtagcctcttttccagaataagagtactgactaagctgcctgaaagcttgtcactgattctttgcttcaggagtctcagctagggagttgaagtgtttacatcagactgtcttgtgcaattcttatatttattttactggttcacttttttttacatttattttagtctttatatttttatttttaagcattgatgtacttagttgttgaaagggtgatgaaactgatatccagatacttgagatcctggtaattggtcataaataattggcaaaataacaaattgtgaaaatagaagccattgctcagcaccgtttctccatcaatgccgtgaacttgccttacttgaggaaaaattctttaactttggaatattgcattgaactcagctatacacataaaacattttctttggtaaatcaagatccagtcagggtttctcttgaattattttggaacaatgccaggatccaaactgattaagttacagtttaagcacccttcagtattaatatatacggtattatataacaggtcaacaagtgctctttgatgataaaacttgtaatagagcaataattgtaaatggttaccatactgtaagatattttgataaaaattaactagtaatacttgtatttatttgaaacactgggctgtttgcacagctccaactgtgcatgctcaaaatgtgcactttttaaaattgttacttttaatgcgtatctttatatgggatctgttatagtatactagggcatgatatggtatccttttgagtgaggtatatactcatctcacaagtgaagtgcctactgatattactaaagtacattatgtttactcaagtaaataattttctccccatggtacactctagtgtaggctattcataccacactgaaatgaacaactgaagaataaggctaagaaccaataaaatatttctctaattgctagttgtaaaactgtatccaaattttcagaaaagacagcttcagcttgcaaattctatcctctaaacttatctggtgcattctccccaccccacccccattatataagggctattttagatgcttttaacctccccaacaaataatttgccaagtgtccaatgagaacttatcatgttggtgtgttaggtaaatcgggcaaatatgatagtgtcttacattgggccttgattttaagttgttatatttgtacaatcgagtattttagaaattacatgaaacatgaaacagtttttgcaattttttttaaactgggcatctggtttctaaaaatttatttgaaacaatctagaattttcttggtgcaaagtgtatcatgtggaatatcctcatatttttaccatattttaagaactttaagacgattaattgtaaataatttatttgattggtgcagttctaatccctaaatcataatcttaaaatcaggaatgtgtggagaacagagccatgtcatatcactttgctcttaccattccttttgatcagcctcaattcagcctcattgtgtagtatgttttttctttctatgaaaaacaacagaaagcatttcattttatttgcctatgttcaaatatgtttaataatgaccaaagtgcattctgagttttttcaaggaatgtaatactggagctttaagaacatacttagtttctcatgtgaaaacttaggctttgtctgatgtttttccttcctctattgtctaatgttgaggttgtttttaggaattatgttttataaactttttcaatataaggtacatgcctatacagaacttaacattttgcacagaatatatcaaatatattttgagaaaaaaagtacggcatgagttctgttaggaataaaagatgaaactattgtatctcacaaaaaatcttatttcagaatggaaatatttttgagaaaagtagctgagtatactggtttaagaaaatgcttgttttagattgaggttaacttagagttgggagttgatttattaagtacagtatacctctcaacagtttataaataatatgttgaattatgtcagtgtgggcagcagtagaatactaaaaggaaaatgtcatgttaagcaatttcagaacattaactgaactattttcaaagcagaaaaattgacattgctgcctttaagaataccatgaatgtaagaaattgaaagaaattgtaaaatatcacataatatagaaatggcagttcaaagagaattgtggcagatgttgtgtgtgaactgttgtttctttgccacatgtgttgtatttgaaagttttacagtaagtttaaaataaaacattctgtgactg

SEQ ID NO: 17151 - protein, 74 aa, Homo sapiens
MEKKPNKKEELTLVNNVLKLATKLLKELDSPFRLYGLTMNPLLYNITQVVILSAVSGVISDLLGFNLKLWKIKS

SEQ ID NO: 17152 - DNA, 3204 bp, Homo sapiens
cccatggatattaattaccttatactctatacttttgatatgcttaaaatatttcataattaatgtagaatgtttctaaaatgtaatactaaatttatgaacaatctatgtttatttcttttgaaaagaaattgtttgaatcacattgctgctttatgttacctttttcatacttttagctacttcatgtacacgagatcttccttgattgtcactacaattgggaattggtaatctggtgcatctcgttaacactttttctcctaagatttgttacccttggatcagaaacaagtaaaaaatatagtaatacctcaatattacttactgaacagataaacctctacttgaaaatggagaaaaaacctaacaaaaaggaggaactgacactagtgaataatgttttaaaactggctactaaactgctaaaggagttggacagtccttttagattatatgggcttacaatgaatccgctgctttataacatcacccaggttgttatcctgtcagctgtttctggtgttatcagtgacttgcttggatttaatttaaagctatggaagattaagtcatgacaattcaaagaaaagaagatgtagcctcttttccagaataagagtactgactaagctgcctgaaagcttgtcactgattctttgcttcaggagtctcagctagggagttgaagtgtttacatcagactgtcttgtgcaattcttatatttattttactggttcacttttttttacatttattttagtctttatatttttatttttaagcattgatgtacttagttgttgaaagggtgatgaaactgatatccagatacttgagatcctggtaattggtcataaataattggcaaaataacaaattgtgaaaatagaagccattgctcagcaccgtttctccatcaatgccgtgaacttgccttacttgaggaaaaattctttaactttggaatattgcattgaactcagctatacacataaaacattttctttggtaaatcaagatccagtcagggtttctcttgaattattttggaacaatgccaggatccaaactgattaagttacagtttaagcacccttcagtattaatatatacggtattatataacaggtcaacaagtgctctttgatgataaaacttgtaatagagcaataattgtaaatggttaccatactgtaagatattttgataaaaattaactagtaatacttgtatttatttgaaacactgggctgtttgcacagctccaactgtgcatgctcaaaatgtgcactttttaaaattgttacttttaatgcgtatctttatatgggatctgttatagtatactagggcatgatatggtatccttttgagtgaggtatatactcatctcacaagtgaagtgcctactgatattactaaagtacattatgtttactcaagtaaataattttctccccatggtacactctagtgtaggctattcataccacactgaaatgaacaactgaagaataaggctaagaaccaataaaatatttctctaattgctagttgtaaaactgtatccaaattttcagaaaagacagcttcagcttgcaaattctatcctctaaacttatctggtgcattctccccaccccacccccattatataagggctattttagatgcttttaacctccccaacaaataatttgccaagtgtccaatgagaacttatcatgttggtgtgttaggtaaatcgggcaaatatgatagtgtcttacattgggccttgattttaagttgttatatttgtacaatcgagtattttagaaattacatgaaacatgaaacagtttttgcaattttttttaaactgggcatctggtttctaaaaatttatttgaaacaatctagaattttcttggtgcaaagtgtatcatgtggaatatcctcatatttttaccatattttaagaactttaagacgattaattgtaaataatttatttgattggtgcagttctaatccctaaatcataatcttaaaatcaggaatgtgtggagaacagagccatgtcatatcactttgctcttaccattccttttgatcagcctcaattcagcctcattgtgtagtatgttttttctttctatgaaaaacaacagaaagcatttcattttatttgcctatgttcaaatatgtttaataatgaccaaagtgcattctgagttttttcaaggaatgtaatactggagctttaagaacatacttagtttctcatgtgaaaacttaggctttgtctgatgtttttccttcctctattgtctaatgttgaggttgtttttaggaattatgttttataaactttttcaatataaggtacatgcctatacagaacttaacattttgcacagaatatatcaaatatattttgagaaaaaaagtacggcatgagttctgttaggaataaaagatgaaactattgtatctcacaaaaaatcttatttcagaatggaaatatttttgagaaaagtagctgagtatactggtttaagaaaatgcttgttttagattgaggttaacttagagttgggagttgatttattaagtacagtatacctctcaacagtttataaataatatgttgaattatgtcagtgtgggcagcagtagaatactaaaaggaaaatgtcatgttaagcaatttcagaacattaactgaactattttcaaagcagaaaaattgacattgctgcctttaagaataccatgaatgtaagaaattgaaagaaattgtaaaatatcacataatatagaaatggcagttcaaagagaattgtggcagatgttgtgtgtgaactgttgtttctttgccacatgtgttgtatttgaaagttttacagtaagtttaaaataaaacattctgtgactgacggtgtttttttttttaattttcaggtcatatacatttctatggtaattttgtgtttacttaacataaaatttagttagatttggggggagtgaaaataaattttttataactttccaacattttagattttgttatgattcttagaacatgaaagaataatacacaggtttttcatcaccaaaatgatattatatcattaatgtttgtttgcttctttgtttttgaatacagcaaactggctgtggcctgaaatattaaagctcattgtgaaaagata

SEQ ID NO: 17153 - protein, 74 aa, Homo sapiens; identical to SEQ ID NO: 17151

SEQ ID NO: 17154 - DNA, 1965 bp, Homo sapiens
accaaatctgtttccaggcagtgggcaagcagggctgagaattgccccagactacccacctcccagctgcaaaggaaaagggctcagttcttcccccacctgtggagtctgcatgctggattcccgttctccccagagttctggccaggaggcttcttgcctggttcaaattgttatgaagttcagctggagacttccttctccctgtggcattttccccacacctctagctgccctcctgaaggatcctggtggtgccaggagcagtctgcttccttcaagagggtctgtgggtcctctcggcattcctggtttattcctgcagttgttctggagctaaaattcatgatgtgagcctccgtatgctgctctgtctgtccaagtcggagctgcaatctggttctgcctcctgtctgccgtggtgatccctgttgtagtttctgtgtgtcttcttttgagaaatgccttgcgccctcccgctcttccaggataactcagggcctccatctcctcctttgaaaactgtaagtgacatctacctccaggtcatatttaatacctttcacaactggtatgtcccaggccactgagaatagaagtggattataaataattcattaggacttaccggtgccaaccatctgaatatcagccctcttggggttaaattaagtgagttaagtgagaattaagtgaggtaatgtgcttggcacagtaatatgaagtggctatagggttatcctcatggtcctggatgcccagaacgtgaatggtctcactgagattacatgaggtgccagtgggcagcagcctgcgatgagactctgtgaacacacccaaggccttaaaggagagagaatgctgtggcactctcagagaagaaacccaggatgctttggggaagaggctggcagcctggtcttgttttctgcacgtggaggcctctggaccatgcacctgactatcaagcctgtacagaaggcagaggcgaggcaggagttaagcggtctgtgaaggaggagacctgctctatttctcagctgttgttctgttgaaacaggtggatgagtttgagcctgaaaggtaataagtaaaggagaaagactgggagcactaggctctgggatgccctctgcatgagaaagatgggcactaaacctgtctgaggggaaggtgtagacagaaataaacacgccacagcctggagtccagaaccttgaaagtttaatgagaacagttagtgaagcactgccctgtgattcatctcctcacaaacaacacttaaatcacgtaggatcagggtagacaacgatcatttcatttagctacttaaaggttatttggaactcttaatagcatgttgtcaataggacctggcttctaaatccaggcagataaaagtccattcgttccccagagtggaggacttaggatctaagccaactccataagcctgatgcacctgaatacgtgagaaaaggcaaaaggagatgggagtgaagggagttgaagggagttgctgtggttttgtggggttttttttttttttacttttaaaaaattattttattttttcatgatcgcctcccaataagtcttagaaaagtaatattgaggccagtgttattttattttttcatgatcgcctcccaataagtcttagaaaagtaatattgaggccaggcgcagtggctcacgcctgcaatcccagcactttgggaggccaaggcgggcagatcacttgaggtcaggagtttgagacctgttcgagcctggccaacatggcaaaacctcatctctactaaaaatacaaaaattagctgggcatggttgtgggtgcctgcagacccagctactcaggaggctgaggcaggaggatcacttgaacccaggaggcagatgttgtagtgagctgagatcgtgcctgtgcactccagcctaggtgacagagtgagactccatctc

SEQ ID NO: 17155 - protein, 75 aa, Homo sapiens
MLDSRSPQSSGQEASCLVQIVMKFSWRLPSPCGIFPTPLAALLKDPGGARSSLLPSRGSVGPLGIPGLFLQLFWS

SEQ ID NO: 17156 - DNA, 6849 bp, Homo sapiens
gctcaccagctcggctactgctcgctccggctgccgccgccgccgccgccgacgccaccaccactgcttcctctgctgcggggccacagccttgagtgtcattcaagggacagcacaacctcatccaagctctcctacctctgcccagccgtccctctcatcctccccattcctcgtccacactccatccaaagaagagggaaagcaccgaatagaggggggcgaaggcaaagtctgctgttcttccccctgggcccccttgctcctccatcctcattctctcaccaccagcccccctaaccccaaggagcccaggaactgaggcgactcgccccactgccatgtccaaaagcttgaaaaagaaaagccactggactagcaaagtccatgagagtgtcattggcaggaacccggagggccagctgggctttgaactgaaggggggcgccgagaatggacagttcccctacctgggggaggtgaagcccggcaaggtggcctatgagagcggcagcaaattggtgtcggaggagctgctgctggaggtgaacgagacccccgtggcggggctcaccatcagggacgtgctggccgtgatcaaacactgcaaggaccccctccggctcaagtgtgtcaagcaagggcaccacaaggccacataaggagggtgaggtccctggagtggattatattttcatcactgttgaagattttatggaattggagaaaagtggtgctctcctagaaagtgggacttatgaagacaattactacggtaccccaaagccgccagcagaaccagcaccattattgttaaatgtaacagaccagatacttccaggagccactccaagtgctgaaggaaaacggaagaggaataaatcagtgagcaacatggagaaagccagtatagagcctcctgaggaggaagaggaagagaggcctgtggtcaatggaaatggagtagtagtaacaccagaatccagtgaacatgaagacaaaagtgcaggtgcctcaggggagatgccctcccagccttatcctgcaccagtgtacagtcagcctgaggagctgaaggagcagatggatgacacaaagccaactaaacctgaagacaatgaggaaccagacccattgcctgataactgggaaatggcctatacagagaagggcgaagtctacttcattgaccataacacaaagacaacatcatggctggatccacgacttgcgaaaaaggctaaacctccagaagagtgcaaagaaaatgagcttccatatggctgggaaaaaatcgatgatcccatttatggcacttattatgttgaccacataaatagaagaacacagtttgaaaatcctgtcctggaagcaaaaaggaagctacagcaacataacatgccccacacagaacttggaacaaagcccctgcaggccccaggtttccgagaaaaaccactcttcacccgggatgcatcccagttgaagggaacattcctcagcaccaccctaaaaaagagcaacatgggctttggatttaccatcattggtggagacgagcctgatgagtttctgcaggtgaaaagtgtgattccggatgggcctgcagcacaggatggaaaaatggaaacaggtgatgtcattgtctatattaatgaagtttgtgtccttggacacactcatgcagatgttgtcaaacttttccagtctgttcctattggtcagagtgtcaacctggtgttgtgtcgtggctaccctttgccctttgatcctgaagaccctgctaacagcatggtgccaccccttgcaataatggagaggccacctccagtgatggtcaatggaagacacaactatgaaacatatttggagtacatttctcggacctcacagtcagttccagatataacagatcggccgcctcattctctgcactccatgccaactgatggtcagctagacggcacgtatccaccgcccgtccatgatgacaatgtgtctatggcttcatctggggccacccaagctgaacttatgaccttaaccattgtgaaaggtgcccagggcttcggcttcactattgccgacagtcctacaggacagcgggtgaaacaaatacttgacattcagggatgccctggcctgtgtgaaggcgacctcattgttgagatcaaccagcagaatgtacagaacctgagccatacagaagtagtggatatacttaaggactgtcccattggaagtgaaacttctttgattatccatcgaggaggtttcttttctccatggaaaactccaaagcctataatggaccgatgggagaatcaaggcagtcctcaaacgagtttatctgctccggccataccgcagaacctgcccttcccacctgcccttcacaggagctcctttcctgactcaacagaggcctttgacccacggaagcctgatccatatgagctctacgagaaatctagggccatttatgaaagtaggcaacaagtgccacccaggaccagttttcgaatggattcctctggcaaattataaggaattggatgttcatcttcggaggatggagtctggatttggcttcagaatcctcgggggagatgagcctggacagcctattttgattggagctgtcattgccatgggctcagccgacagagatggccgccttcacccaggagatgagcttgtgtatgttgatgggattccagtagccggcaaaacccaccgctatgtcatcgacctcatgcaccacgcagcccgcaatgggcaggtcaacctcactgtgagaagaaaggtgctatgtggaggggagccctgcccagagaacgggagaagtccaggctctgtatccacccaccacagctctccacgcagtgactacgcaacctacaccaacagcaaccacgctgcccccagtagcaatgcctctccccctgaaggcttcgcctcccacagcctgcagaccagtgatgtggtcattcaccgcaaagagaatgagggcttcggctttgtcatcatcagctccctgaacaggcctgagtctggatccactataactgtgccccataaaatcggacgcatcattgatgggagtcctgcagatcgctgtgcaaaactaaaagtgggagaccggatcctagcagtgaatggccagtctatcatcaacatgcctcacgctgacatcgtgaagctcatcaaggatgcaggtcttagtgtcacccttcgcatcattcctcaggaggagctcaacagccccacctcggcacccagctcagagaagcagagtcccatggcgcagcagagtcccctggcacagcagagtcccctggcccagccaagcccagccacccccaacagccccatcgcccagccagcaccacctcaaccacttcagctgcaaggacacgaaaatagttacaggtcggaagtgaaagcaaggcaagatgtgaaaccagacatccgacagcctccattcacagactacaggcagcccccgctggattacaggcaacccccaggaggggactaccagcagcccccacccttggactacaggcagcctcccctactggactacaggcagcactcccccgacaccaggcagtaccctctgtcggactacagacaaccccaggattttgattatttcactgtggacatggagaaaggagccaaaggatttggattcagcattcgtggaggaagggaatacaaaatggatttgtatgtgttgagactggcagaagatggaccagcaataaggaatgggaggatgagggtaggagatcaaatcattgaaatcaatggggaaagcacaagggacatgacacatgccagagcaatagaactcatcaaatctggaggaagacgagtgaggctgctgctcaagagaggcacgggacaggtcccagaatatgacgaacccgccccctggagttctcccgctgccgccgccccaggtctgccggaagtaggcgtctccctggacgacggcctcgctccattctctccatcacatccagccccaccctccgacccttcccaccagataagcccaggcccaacttgggatatcaaacgggaacacgacgttaggaaaccaaaggagctttcagcctgcggccagaagaagcagcgcctcggggagcagagggagcgctcggcgagtccgcagagggccgcgcggccgaggctcgaggaggcgcccggcggccaggggcggcccgaggccggcaggcccgcctcggaggccagggcgcccgggctcgcggcggcagacgcggcggacgcggcgcgggcgggcgggaaggaggcgccccgtgcggcggcgggctccgagctctgccggcgcgaaggcccgggggctgcgccggcgtttgccggcccgggcggcggcggcagcggcgcgctggaggccgagggcagggcgggtgcgcgcgcgggtccccggccgggcccgcgacccccggggggcgccccggcgcgcaaggccgccgtcgcgccggggccctggaaggtgccgggttctgacaagctgcccagcgtcctcaaacccggcgcctcggccgccagcagatgagccgcgcggccacggccaacccgcccgccccggcgcaggcagttcttcttaggttccgtctcacggcgttttaatttattttcactgtcacacgcatagatccacgaggcaccaaggcctgggagcatcgacgtgaagtcccacgtgtccggtgtgcttgggcggcatcgcatcaacgcgcagacctaaactgatcctaaagcccccggttcccttgtgggggctttggcagctatggaagaaccaaaataacgtgaagaacatcacagagagacagtgcagtgtagctttagtttaagaaaaaaaaatattcctccccactgcatgaaggacttggatgtcatccaaactttatatcaagaaacaggacaaagttaagagcaatcacaaactggaatatcgccttaaaaatcaaactgcacggagcaagctgaaactgagacaagattatatcttttaattgatctaaagcgttgtaaataaattgttctcgacatatctagacaggggttaaagggtttctttgacacattcggaaccgttcacccatgacatgtttccatggctcacccttggcatccatcctcggtgttagcagcagcgttccctgcctcctgcaggatgacttagaaatctagtgagtttcttggtgtgatgccatttttattgccctttctgtgatcaaatcatatttctgtacattttcagtggtagaaaaaaaaggttttaaaaattgtatcctagggaacagtttgccataagtcagaattttgcagtttagctcatagatcttaattggtttttctctaaaatatgaattttataattgaaggaccacaatttgtttaatcaagataggcaacgctgcagttcctttatgaagaggcttttctgtcgtcccaggctagcagagatggatagcttctttgtcagcaatgtgatttcacttattttattgtcttattttaaaccctgtctccatgacttcatttgcactttgacagagcagaggcagagtatttgtcttatatttctcagattataatattaaaaaattacaatcaatttattttcattaaagaacgtgagtctttttagcattcctttctgcttatccttctttccttaccctttgtccttttgtttccattagttttctttcgtcttgtattccttgccactttattttgttagcaacttctagatgtttatcttcatggatctatgattgacctcctagtaaaattctaagtcttgcctttcttccctgctgttttagcatttctttgtaaaatgttagcttcaattaattagccattggtacttactgtagctacacatattaaaaggcaaagtgtttctgaaggcaatttctttttaatatgcccgaatgaatgaggcttcatcctttccatattcttactctttacaggagttcaaatgcaaataagctccacctccctgcacttgtagtctaaaaagtaaaaggggcgatcaggtccatctcaaaggtcacacgtaatagcctccctgggctgatcattccctctccttgtaattgcagtatcctgagtagcagtttaattttcatcaaacatcggagtagtttagttgtttgacaggaggagaataaggctgaaagcctcaagtgaaggatcttgcagcttgtaaaagcaatttccaaaaatgaaacccattcatcgtaaacaaaagcacaaacacttgtagcagtttataatgcttttggtttaatctcaattagtctttctcccctggactagaaatccagtatagtttgccattaatttattgaatctggttttggacaatgcttctgtagtgtagctgcacgtcctggtactgtatcctctgactttattttccatgtattacaaaaggaaaaaaaaattgagattacactggcataaactctagtttgcacagttcacagctactacttgtgcagtaattgctttatgcggctgtaatccataacctgtgaagacagcacatcatctaaatcccattccaaataatatttgtgtagtgttagctgtgaatttaccctgtacagctgtatctctataaatataattccatgtattaatagtcacagaaagactgtaagtgagcaactatttttatgaaacgtaccactatggataaattaacttttacagaaatcttgtttactgtatgatattctaaaacactgtcaaataaaatatatatccaaaaatcttttctttttccaacta

SEQ ID NO: 17157 - protein, 712 aa, Homo sapiens
MSSTRNLGPFMKVGNKCHPGPVFEWIPLANYKELDVHLRRMESGFGFRILGGDEPGQPILIGAVIAMGSADRDGRLHPGDELVYVDGIPVAGKTHRYVIDLMHHAARNGQVNLTVRRKVLCGGEPCPENGRSPGSVSTHHSSPRSDYATYTNSNHAAPSSNASPPEGFASHSLQTSDVVIHRKENEGFGFVIISSLNRPESGSTITVPHKIGRIIDGSPADRCAKLKVGDRILAVNGQSIINMPHADIVKLIKDAGLSVTLRIIPQEELNSPTSAPSSEKQSPMAQQSPLAQQSPLAQPSPATPNSPIAQPAPPQPLQLQGHENSYRSEVKARQDVKPDIRQPPFTDYRQPPLDYRQPPGGDYQQPPPLDYRQPPLLDYRQHSPDTRQYPLSDYRQPQDFDYFTVDMEKGAKGFGFSIRGGREYKMDLYVLRLAEDGPAIRNGRMRVGDQIIEINGESTRDMTHARAIELIKSGGRRVRLLLKRGTGQVPEYDEPAPWSSPAAAAPGLPEVGVSLDDGLAPFSPSHPAPPSDPSHQISPGPTWDIKREHDVRKPKELSACGQKKQRLGEQRERSASPQRAARPRLEEAPGGQGRPEAGRPASEARAPGLAAADAADAARAGGKEAPRAAAGSELCRREGPGAAPAFAGPGGGGSGALEAEGRAGARAGPRPGPRPPGGAPARKAAVAPGPWKVPGSDKLPSVLKPGASAASR

SEQ ID NO: 17158 - DNA, 6925 bp, Homo sapiens
gctcaccagctcggctactgctcgctccggctgccgccgccgccgccgccgacgccaccaccactgcttcctctgctgcggggccacagccttgagtgtcattcaagggacagcacaacctcatccaagctctcctacctctgcccagccgtccctctcatcctccccattcctcgtccacactccatccaaagaagagggaaagcaccgaatagaggggggcgaaggcaaagtctgctgttcttccccctgggcccccttgctcctccatcctcattctctcaccaccagcccccctaaccccaaggagcccaggaactgaggcgactcgccccactgccatgtccaaaagcttgaaaaagaaaagccactggactagcaaagtccatgagagtgtcattggcaggaacccggagggccagctgggctttgaactgaaggggggcgccgagaatggacagttcccctacctgggggaggtgaagcccggcaaggtggcctatgagagcggcagcaaattggtgtcggaggagctgctgctggaggtgaacgagacccccgtggcggggctcaccatcagggacgtgctggccgtgatcaaacactgcaaggaccccctccggctcaagtgtgtcaagcaaggaggaattgttgataaagaccttcgtcactacctcaacttacgatttcaaaagggttctgtggaccatgagcttcagcaaatcattcgtgacaacctctacctccgcacggtgccatgcaccacaaggccacataaggagggtgaggtccctggagtggattatattttcatcactgttgaagattttatggaattggagaaaagtggtgctctcctagaaagtgggacttatgaagacaattactacggtaccccaaagccgccagcagaaccagcaccattattgttaaatgtaacagaccagatacttccaggagccactccaagtgctgaaggaaaacggaagaggaataaatcagtgagcaacatggagaaagccagtatagagcctcctgaggaggaagaggaagagaggcctgtggtcaatggaaatggagtagtagtaacaccagaatccagtgaacatgaagacaaaagtgcaggtgcctcaggggagatgccctcccagccttatcctgcaccagtgtacagtcagcctgaggagctgaaggagcagatggatgacacaaagccaactaaacctgaagacaatgaggaaccagacccattgcctgataactgggaaatggcctatacagagaagggcgaagtctacttcattgaccataacacaaagacaacatcatggctggatccacgacttgcgaaaaaggctaaacctccagaagagtgcaaagaaaatgagcttccatatggctgggaaaaaatcgatgatcccatttatggcacttattatgttgaccacataaatagaagaacacagtttgaaaatcctgtcctggaagcaaaaaggaagctacagcaacataacatgccccacacagaacttggaacaaagcccctgcaggccccaggtttccgagaaaaaccactcttcacccgggatgcatcccagttgaagggaacattcctcagcaccaccctaaaaaagagcaacatgggctttggatttaccatcattggtggagacgagcctgatgagtttctgcaggtgaaaagtgtgattccggatgggcctgcagcacaggatggaaaaatggaaacaggtgatgtcattgtctatattaatgaagtttgtgtccttggacacactcatgcagatgttgtcaaacttttccagtctgttcctattggtcagagtgtcaacctggtgttgtgtcgtggctaccctttgccctttgatcctgaagaccctgctaacagcatggtgccaccccttgcaataatggagaggccacctccagtgatggtcaatggaagacacaactatgaaacatatttggagtacatttctcggacctcacagtcagttccagatataacagatcggccgcctcattctctgcactccatgccaactgatggtcagctagacggcacgtatccaccgcccgtccatgatgacaatgtgtctatggcttcatctggggccacccaagctgaacttatgaccttaaccattgtgaaaggtgcccagggcttcggcttcactattgccgacagtcctacaggacagcgggtgaaacaaatacttgacattcagggatgccctggcctgtgtgaaggcgacctcattgttgagatcaaccagcagaatgtacagaacctgagccatacagaagtagtggatatacttaaggactgtcccattggaagtgaaacttctttgattatccatcgaggaggtttcttttctccatggaaaactccaaagcctataatggaccgatgggagaatcaaggcagtcctcaaacgagtttatctgctccggccataccgcagaacctgcccttcccacctgcccttcacaggagctcctttcctgactcaacagaggcctttgacccacggaagcctgatccatatgagctctacgagaaatctagggccatttatgaaagtaggcgtccagattataaggaattggatgttcatcttcggaggatggagtctggatttggcttcagaatcctcgggggagatgagcctggacagcctattttgattggagctgtcattgccatgggctcagccgacagagatggccgccttcacccaggagatgagcttgtgtatgttgatgggattccagtagccggcaaaacccaccgctatgtcatcgacctcatgcaccacgcagcccgcaatgggcaggtcaacctcactgtgagaagaaaggtgctatgtggaggggagccctgcccagagaacgggagaagtccaggctctgtatccacccaccacagctctccacgcagtgactacgcaacctacaccaacagcaaccacgctgcccccagtagcaatgcctctccccctgaaggcttcgcctcccacagcctgcagaccagtgatgtggtcattcaccgcaaagagaatgagggcttcggctttgtcatcatcagctccctgaacaggcctgagtctggatccactataactgtgccccataaaatcggacgcatcattgatgggagtcctgcagatcgctgtgcaaaactaaaagtgggagaccggatcctagcagtgaatggccagtctatcatcaacatgcctcacgctgacatcgtgaagctcatcaaggatgcaggtcttagtgtcacccttcgcatcattcctcaggaggagctcaacagccccacctcggcacccagctcagagaagcagagtcccatggcgcagcagagtcccctggcacagcagagtcccctggcccagccaagcccagccacccccaacagccccatcgcccagccagcaccacctcaaccacttcagctgcaaggacacgaaaatagttacaggtcggaagtgaaagcaaggcaagatgtgaaaccagacatccgacagcctccattcacagactacaggcagcccccgctggattacaggcaacccccaggaggggactaccagcagcccccacccttggactacaggcagcctcccctactggactacaggcagcactcccccgacaccaggcagtaccctctgtcggactacagacaaccccaggattttgattatttcactgtggacatggagaaaggagccaaaggatttggattcagcattcgtggaggaagggaatacaaaatggatttgtatgtgttgagactggcagaagatggaccagcaataaggaatgggaggatgagggtaggagatcaaatcattgaaatcaatggggaaagcacaagggacatgacacatgccagagcaatagaactcatcaaatctggaggaagacgagtgaggctgctgctcaagagaggcacgggacaggtcccagaatatgacgaacccgccccctggagttctcccgctgccgccgccccaggtctgccggaagtaggcgtctccctggacgacggcctcgctccattctctccatcacatccagccccaccctccgacccttcccaccagataagcccaggcccaacttgggatatcaaacgggaacacgacgttaggaaaccaaaggagctttcagcctgcggccagaagaagcagcgcctcggggagcagagggagcgctcggcgagtccgcagagggccgcgcggccgaggctcgaggaggcgcccggcggccaggggcggcccgaggccggcaggcccgcctcggaggccagggcgcccgggctcgcggcggcagacgcggcggacgcggcgcgggcgggcgggaaggaggcgccccgtgcggcggcgggctccgagctctgccggcgcgaaggcccgggggctgcgccggcgtttgccggcccgggcggcggcggcagcggcgcgctggaggccgagggcagggcgggtgcgcgcgcgggtccccggccgggcccgcgacccccggggggcgccccggcgcgcaaggccgccgtcgcgccggggccctggaaggtgccgggttctgacaagctgcccagcgtcctcaaacccggcgcctcggccgccagcagatgagccgcgcggccacggccaacccgcccgccccggcgcaggcagttcttcttaggttccgtctcacggcgttttaatttattttcactgtcacacgcatagatccacgaggcaccaaggcctgggagcatcgacgtgaagtcccacgtgtccggtgtgcttgggcggcatcgcatcaacgcgcagacctaaactgatcctaaagcccccggttcccttgtgggggctttggcagctatggaagaaccaaaataacgtgaagaacatcacagagagacagtgcagtgtagctttagtttaagaaaaaaaaatattcctccccactgcatgaaggacttggatgtcatccaaactttatatcaagaaacaggacaaagttaagagcaatcacaaactggaatatcgccttaaaaatcaaactgcacggagcaagctgaaactgagacaagattatatcttttaattgatctaaagcgttgtaaataaattgttctcgacatatctagacaggggttaaagggtttctttgacacattcggaaccgttcacccatgacatgtttccatggctcacccttggcatccatcctcggtgttagcagcagcgttccctgcctcctgcaggatgacttagaaatctagtgagtttcttggtgtgatgccatttttattgccctttctgtgatcaaatcatatttctgtacattttcagtggtagaaaaaaaaggttttaaaaattgtatcctagggaacagtttgccataagtcagaattttgcagtttagctcatagatcttaattggtttttctctaaaatatgaattttataattgaaggaccacaatttgtttaatcaagataggcaacgctgcagttcctttatgaagaggcttttctgtcgtcccaggctagcagagatggatagcttctttgtcagcaatgtgatttcacttattttattgtcttattttaaaccctgtctccatgacttcatttgcactttgacagagcagaggcagagtatttgtcttatatttctcagattataatattaaaaaattacaatcaatttattttcattaaagaacgtgagtctttttagcattcctttctgcttatccttctttccttaccctttgtccttttgtttccattagttttctttcgtcttgtattccttgccactttattttgttagcaacttctagatgtttatcttcatggatctatgattgacctcctagtaaaattctaagtcttgcctttcttccctgctgttttagcatttctttgtaaaatgttagcttcaattaattagccattggtacttactgtagctacacatattaaaaggcaaagtgtttctgaaggcaatttctttttaatatgcccgaatgaatgaggcttcatcctttccatattcttactctttacaggagttcaaatgcaaataagctccacctccctgcacttgtagtctaaaaagtaaaaggggcgatcaggtccatctcaaaggtcacacgtaatagcctccctgggctgatcattccctctccttgtaattgcagtatcctgagtagcagtttaattttcatcaaacatcggagtagtttagttgtttgacaggaggagaataaggctgaaagcctcaagtgaaggatcttgcagcttgtaaaagcaatttccaaaaatgaaacccattcatcgtaaacaaaagcacaaacacttgtagcagtttataatgcttttggtttaatctcaattagtctttctcccctggactagaaatccagtatagtttgccattaatttattgaatctggttttggacaatgcttctgtagtgtagctgcacgtcctggtactgtatcctctgactttattttccatgtattacaaaaggaaaaaaaaattgagattacactggcataaactctagtttgcacagttcacagctactacttgtgcagtaattgctttatgcggctgtaatccataacctgtgaagacagcacatcatctaaatcccattccaaataatatttgtgtagtgttagctgtgaatttaccctgtacagctgtatctctataaatataattccatgtattaatagtcacagaaagactgtaagtgagcaactatttttatgaaacgtaccactatggataaattaacttttacagaaatcttgtttactgtatgatattctaaaacactgtcaaataaaatatatatccaaaaatcttttctttttccaacta

SEQ ID NO: 17159 - protein, 1441 aa, Homo sapiens
MSKSLKKKSHWTSKVHESVIGRNPEGQLGFELKGGAENGQFPYLGEVKPGKVAYESGSKLVSEELLLEVNETPVAGLTIRDVLAVIKHCKDPLRLKCVKQGGIVDKDLRHYLNLRFQKGSVDHELQQIIRDNLYLRTVPCTTRPHKEGEVPGVDYIFITVEDFMELEKSGALLESGTYEDNYYGTPKPPAEPAPLLLNVTDQILPGATPSAEGKRKRNKSVSNMEKASIEPPEEEEEERPVVNGNGVVVTPESSEHEDKSAGASGEMPSQPYPAPVYSQPEELKEQMDDTKPTKPEDNEEPDPLPDNWEMAYTEKGEVYFIDHNTKTTSWLDPRLAKKAKPPEECKENELPYGWEKIDDPIYGTYYVDHINRRTQFENPVLEAKRKLQQHNMPHTELGTKPLQAPGFREKPLFTRDASQLKGTFLSTTLKKSNMGFGFTIIGGDEPDEFLQVKSVIPDGPAAQDGKMETGDVIVYINEVCVLGHTHADVVKLFQSVPIGQSVNLVLCRGYPLPFDPEDPANSMVPPLAIMERPPPVMVNGRHNYETYLEYISRTSQSVPDITDRPPHSLHSMPTDGQLDGTYPPPVHDDNVSMASSGATQAELMTLTIVKGAQGFGFTIADSPTGQRVKQILDIQGCPGLCEGDLIVEINQQNVQNLSHTEVVDILKDCPIGSETSLIIHRGGFFSPWKTPKPIMDRWENQGSPQTSLSAPAIPQNLPFPPALHRSSFPDSTEAFDPRKPDPYELYEKSRAIYESRRPDYKELDVHLRRMESGFGFRILGGDEPGQPILIGAVIAMGSADRDGRLHPGDELVYVDGIPVAGKTHRYVIDLMHHAARNGQVNLTVRRKVLCGGEPCPENGRSPGSVSTHHSSPRSDYATYTNSNHAAPSSNASPPEGFASHSLQTSDVVIHRKENEGFGFVIISSLNRPESGSTITVPHKIGRIIDGSPADRCAKLKVGDRILAVNGQSIINMPHADIVKLIKDAGLSVTLRIIPQEELNSPTSAPSSEKQSPMAQQSPLAQQSPLAQPSPATPNSPIAQPAPPQPLQLQGHENSYRSEVKARQDVKPDIRQPPFTDYRQPPLDYRQPPGGDYQQPPPLDYRQPPLLDYRQHSPDTRQYPLSDYRQPQDFDYFTVDMEKGAKGFGFSIRGGREYKMDLYVLRLAEDGPAIRNGRMRVGDQIIEINGESTRDMTHARAIELIKSGGRRVRLLLKRGTGQVPEYDEPAPWSSPAAAAPGLPEVGVSLDDGLAPFSPSHPAPPSDPSHQISPGPTWDIKREHDVRKPKELSACGQKKQRLGEQRERSASPQRAARPRLEEAPGGQGRPEAGRPASEARAPGLAAADAADAARAGGKEAPRAAAGSELCRREGPGAAPAFAGPGGGGSGALEAEGRAGARAGPRPGPRPPGGAPARKAAVAPGPWKVPGSDKLPSVLKPGASAASR

SEQ ID NO: 17160 - DNA, 330 bp, Homo sapiens
taggagatcaaatcattgaaatcaatggggaaagcacaagggacatgacacatgccagagcaatagaactcatcaaatctggaggaagacgagtgaggctgctgctcaagagaggcacgggacaggtcccagaatatggaatggtaccttccagtctctccatgtgcatgaaaagtgacaagcatgggtccccatatttctacttattgggccaccctaaagacacgacgaacccgccccctggagttctcccgctgccgccgccccaggtctgccggaagtaggcgtctccctggacgacggcctcgctccattctctccatcacatcc

SEQ ID NO: 17161 - protein, 79 aa, Homo sapiens
MTHARAIELIKSGGRRVRLLLKRGTGQVPEYGMVPSSLSMCMKSDKHGSPYFYLLGHPKDTTNPPPGVLPLPPPQVCRK

SEQ ID NO: 17162 - DNA, 5991 bp, Homo sapiens
gaggaaaggagggggctggaagagagtaaagggctgttgttaaacagtttcttaccgtaagagggagttcagacctagatctttccagttaatcacacaacaaacttagctcatcgcaataaaaagcagctcagagccgactggctcttttaggcactgactccgaacaggattctttcacccaggcatctcctccagagggatccgccagcccgtccagcagcaccatgtgggtgaccaaactcctgccagccctgctgctgcagcatgtcctcctgcatctcctcctgctccccatcgccatcccctatgcagagggacaaaggaaaagaagaaatacaattcatgaattcaaaaaatcagcaaagactaccctaatcaaaatagatccagcactgaagataaaaaccaaaaaagtgaatactgcagaccaatgtgctaatagatgtactaggaataaaggacttccattcacttgcaaggcttttgtttttgataaagcaagaaaacaatgcctctggttccccttcaatagcatgtcaagtggagtgaaaaaagaatttggccatgaatttgacctctatgaaaacaaagactacattagaaactgcatcattggtaaaggacgcagctacaagggaacagtatctatcactaagagtggcatcaaatgtcagccctggagttccatgataccacacgaacacagctttttgccttcgagctatcggggtaaagacctacaggaaaactactgtcgaaatcctcgaggggaagaagggggaccctggtgtttcacaagcaatccagaggtacgctacgaagtctgtgacattcctcagtgttcagaagttgaatgcatgacctgcaatggggagagttatcgaggtctcatggatcatacagaatcaggcaagatttgtcagcgctgggatcatcagacaccacaccggcacaaattcttgcctgaaagatatcccgacaagggctttgatgataattattgccgcaatcccgatggccagccgaggccatggtgctatactcttgaccctcacacccgctgggagtactgtgcaattaaaacatgcgctgacaatactatgaatgacactgatgttcctttggaaacaactgaatgcatccaaggtcaaggagaaggctacaggggcactgtcaataccatttggaatggaattccatgtcagcgttgggattctcagtatcctcacgagcatgacatgactcctgaaaatttcaagtgcaaggacctacgagaaaattactgccgaaatccagatgggtctgaatcaccctggtgttttaccactgatccaaacatccgagttggctactgctcccaaattccaaactgtgatatgtcacatggacaagattgttatcgtgggaatggcaaaaattatatgggcaacttatcccaaacaagatctggactaacatgttcaatgtgggacaagaacatggaagacttacatcgtcatatcttctgggaaccagatgcaagtaagctgaatgagaattactgccgaaatccagatgatgatgctcatggaccctggtgctacacgggaaatccactcattccttgggattattgccctatttctcgttgtgaaggtgataccacacctacaatagtcaatttagaccatcccgtaatatcttgtgccaaaacgaaacaattgcgagttgtaaatgggattccaacacgaacaaacataggatggatggttagtttgagatacagaaataaacatatctgcggaggatcattgataaaggagagttgggttcttactgcacgacagtgtttcccttctcgagacttgaaagattatgaagcttggcttggaattcatgatgtccacggaagaggagatgagaaatgcaaacaggttctcaatgtttcccagctggtatatggccctgaaggatcagatctggttttaatgaagcttgccaggcctgctgtcctggatgattttgttagtacgattgatttacctaattatggatgcacaattcctgaaaagaccagttgcagtgtttatggctggggctacactggattgatcaactatgatggcctattacgagtggcacatctctatataatgggaaatgagaaatgcagccagcatcatcgagggaaggtgactctgaatgagtctgaaatatgtgctggggctgaaaagattggatcaggaccatgtgagggggattatggtggcccacttgtttgtgagcaacataaaatgagaatggttcttggtgtcattgttcctggtcgtggatgtgccattccaaatcgtcctggtatttttgtccgagtagcatattatgcaaaatggatacacaaaattattttaacatataaggtaccacagtcatagctgaagtaagtgtgtctgaagcacccaccaatacaactgtcttttacatgaagatttcagagaatgtggaatttaaaatgtcacttacaacaatcctaagacaactactggagagtcatgtttgttgaaattctcattaatgtttatgggtgttttctgttgttttgtttgtcagtgttattttgtcaatgttgaagtgaattaaggtacatgcaagtgtaataacatatctcctgaagatacttgaatggattaaaaaaacacacaggtatatttgctggatgataaagatttcatgggaaaaaaaatcaattaatctgtctaagctgctttctgatgttggtttcttaataatgagtaaaccacaaattaaatgttattttaacctcaccaaaacaatttataccttgtgtccctaaattgtagccctatattaaattatattacatttcatatgctatatgttatagttcattcatttctcttcaccatgtatcctgcaatactggtacacgaacacactttttacaaaaccacatacccatgtacacatgcctaggtacacatgtgcatgcactacagtttaaattatggtgtacctaatgtaacccctaaatattttagaagtatgtacctatagttttacctcaaaaaaaccagaaatctctaaagaccagtagaaatattaaaaaatgatgcaagatcaaaatgattagctaattctccatacataatctgcagatgatcttctttggttggcatttcaggtgtggccatcacccagagttaaataacacctaatctaggtgtttacatgtattcattatcctagttatttcatgtagtttctaattcttaaaggaaagagggtaatagttctatttgtgtaatttgtttcctccaaacttaaggccacttatttacacaagatatttgtagatctattttcctaaagcatttcttaagtgctcagatcagtatctaattgaagaagtttaaaagtgttttggtcattaaaaatgtacttaaataggttaaatctaagccttgctgctgtgattggcttctagctcactgcctttaaattttaaaaaatttaagaggaaaatttccaagtctccaaagttttataaatacccttcatcaagtcatgcattaaagtatatattggagaaaaaaataaaaatacttttctcaacctggaagattttagcctaataaagcttttttgaagtaaaagacaacttgtaaaaggaaagaaactagtttgtctcaactctgtattcatttattttttttttgaagtagagtggaatctgttgaatcagatattttatcaagatatgtttattttttcttatttcattttacaaagttcactcctaatgccatatgtaacagacatttaaattttgtgttctgtataacagccaaattatcatatttatcattgtatttgtcatgcttagctaaagatcatgtatttgttgagaaatagaataacaaaaagtaataggataggctttgaatttttgcagaaatcttcctgtacaaaacacctttaaaaataattttttgaatggtgtgaatccagtagtcccatttctctgacttagttttcttgagtgatttttatcaaggccaagtccccaaacaattccctaccagctctttagagtactgttcaatctggactaaaatggttttaagtttatggagagcttagtccacagaatatagggcggcgagtccagaaatgcttatacaatttttttttcataataagatatgtgctggcatcaagaaacttaaagtggaagcaaaaagacatccaactagttgctggtctctatcatcttatctgatggtatttctattttccttatataatacaccattttagtaagaactcctagaaatttcaagagcatattgccaaaatataaagtatatttcatagtttcttctggctgaaccagtgaaattttattattgcatattaatgatatttgtaaaacttttataaaaattgtcataattttaaatactcacattttaaaaatacttctttaatgactcttcctctaaatttcctggaaatacagataaagattagctagatacaagatacagctaagtatttagacattttgaggctagtatttttcattttattaaaggctaaaaacaataccaccaataaatcatcaaacaaaccgtacaaagtaattctctctttgggaggctcctttcgtgatagagggacatgggtggaattgacaatgaaacttagatgaacaaggtccatgttattttaggtggtagaacagggtagagtcatgtcattatttgctggtggaagacactatttaccaggtgttctttgctgaataaatcattaaacatttttaaaaatccaacaatccactttattttgtgtcattgacaaaaggatcttttaaatcagaaggtttcaatgcaatttttggtttggctgtttgaataatggttatgtactgttataattgtagacattttctcacgtctaccaggaattgaagtgtaaaactaaaatatttttcataatgcctctgccgtgcagaaggaatgataatccttttgtatacttctttaattttattgtaaaatgtgtaatgacttttacctatatgctgtgggcaggtcctcagtaaaatctattgagtcaatttctagtattaacaggcttttgcttgctatctaagtgtttcaaattatgggaagtgtgagacactggaaggcaagaaaattaacaataatggcatgtgatagcaaaattgtatttcacttattcctgtgaatatttcttgttggtaccaatggtactgtacaaagtgaatgttatagccacaacattctcttgaaaagaacactgtcaagaagtgggaaattgctgtcaggcatttcattgttgtttttaaacttttttaaaagaaatactggttttgcaatatagagatcatgtggtaaagaattttaataagatcttatactaaaaagccttaaatcaatttattgagattcaaaaaatactattataattaattacatcccatacatataggcaaactcatttaaaaaataaaactaattttggtaaaagtacatggcctttgtttttaaaatacataattttaaaataaatcacttgtcatgataaagtccaaaaagaagttatcattcaacattcaactaaggttggagctaagaatttactaatacaaaaaaagttaaaattttttggaccatatatatcttgacagtgtaacttttaagtaggttcatttccatttgcacagaaagtttctgtctttaggaaactgaaaatgaaatactgtggatgctatgactgtttgtcttgtatgtaaataggaaattaataagctgcctattgagtggtatagctgtatgcttacccaaaaaagggaacactgtggttatgacttgtattataaactttctgtagttaataaagttgttatttttataaccatgattatattattattattaataaaatattttatcaaaatgctta

SEQ ID NO: 17163 - protein, 728 aa, Homo sapiens; identical to SEQ ID NO: 2036

SEQ ID NO: 17164 - DNA, 456 bp, Homo sapiens
cgggcagcgtctggggacagcgtgttgggctgtggggaggttaccgaaaggaaacgggccgagtccagttgtttgagcggttttctccttccacgagcgtgtgtgaaaaagcgcggagttcggtggagggcagctgccaggactgcctcctggactgggtaattgtacattttttcatcctacatctcaagagaccaagggacctaagtaaattgatctacttgccaatgactgtaagaaagacaaagaagttgtaaaaacatccaaatgatgttaaacataaattagctcagaatagtttgcagaagataaactaccagcgtcaaagcatgcattaaaaactggaaagaaattaaaagtgtggtattgaaagatgtacaactgactttggaaaaaggattcctctctaattggtgtttgtaagtgatcgaaataaacatttttaaactatcattt

SEQ ID NO: 17165 - protein, 53 aa, Homo sapiens
RAASGDSVLGCGEVTERKRAESSCLSGFLLPRACVKKRGVRWRAAARTASWTG

SEQ ID NO: 17166 - DNA, 455 bp, Homo sapiens
ctctattaaatggaacaagttcgagagacattcctaaatgtccagacaactccacagcgcgcatttctctccagcagcgggaagattcagagacctcgagactgaacacccaaatctcgctttccaggacccgaagtaccgaacaataggtcccaaggtaattgtacattttttcatcctacatctcaagagaccaagggacctaagtaaattgatctacttgccaatgactgtaagaaagacaaagaagttgtaaaaacatccaaatgatgttaaacataaattagctcagaatagtttgcagaagataaactaccagcgtcaaagcatgcattaaaaactggaaagaaattaaaagtgtggtattgaaagatgtacaactgactttggaaaaaggattcctctctaattggtgtttgtaagtgatcgaaataaacatttttaaactatcattt

SEQ ID NO: 17167 - protein, 72 aa, Homo sapiens
MSRQLHSAHFSPAAGRFRDLETEHPNLAFQDPKYRTIGPKVIVHFFILHLKRPRDLSKLIYLPMTVRKTKKL

SEQ ID NO: 17168 - DNA, 4997 bp, Homo sapiens
cgtcgcttcccggcccgccgaggaggtggtggaggaggaggcgccgctttccccgcggcgcgcgccctcgccgttgtctgagctgtgcctggaccagtttggggaagttgtcggggctccgcgtcgcccagatgtgtgacctcattgagccgcagccggccgagaagatcggcaagatgaagaagttgcggagaactttgtcggagagtttcagtcgcattgctttgaagaaagatgacaccacctttgatgagatatgtgtcacaaagatgtctacacggaactgccagggaatggactcagtgatcaaacccctggacacaattcctgaggataaaaaagtcagagttcagaggacacagagcacttttgacccatttgagaaaccagctaatcaagtaaagagggtgcattctgagaacaatgcttgcattaactttaagacctcctccactggcaaagagtcacctaaagttaggcggcactccagccccagctcgccaacaagtcccaaatttggaaaagctgactcatatgaaaagctggaaaaactaggggaaggatcttatgctacagtatacaaagggaaaagcaaggtaaatgggaagttggtagctctgaaggtgatcaggctgcaggaagaagaagggacacctttcacagctatcagggaagcttctcttttaaaaggactaaaacatgctaacatagtgctacttcatgacatcatccataccaaggagacgctgacacttgtgtttgaatatgtgcacactgatttatgtcagtacatggacaagcaccctggggggctgcatccagataatgtgaagttgtttttatttcagttgctgcgaggtctgtcttacatccaccagcgttatattttgcacagagacctgaaaccacagaaccttctgatcagtgacacgggggagttaaagctggcagatttcggtcttgcaagagcaaaatccgtccctagccacacatactccaacgaagtggttaccttgtggtacagacctccagatgtccttctaggctcaacagaatattccacctgccttgacatgtggggagtaggttgcatctttgttgaaatgatccaaggagttgctgcttttccaggaatgaaagacattcaggatcaacttgaacgaatatttctggttcttggaacaccaaatgaggacacatggcctggagttcattctttaccacattttaagccagaacgctttaccctgtacagctctaaaaaccttagacaagcatggaataagctcagctatgtgaaccatgcagaggacctggcctccaagctcctacaatgttccccaaagaacagactgtcggcacaggctgccttgagccacgagtattttagtgacctgccgccacggctatgggaactcaccgacatgtcttctatttttactgtcccaaatgtgagattgcaaccagaagctggagaaagcatgcgggcctttgggaaaaacaatagttatggcaaaagtctatcaaacagcaagcactgacaagcagcacattctcaagagcacacaggattaagttgtcatcattctgggaagaaaaaaaaaacattaatgaagaggccaataatatgaagggaatcatggatcagttttctttcgctccctgtggtggatttcacttacaagaaaattgaagctggcaagaccctgttttctctgcaatttatttaaaaccttgcacgcatttggataccttgtgatttccaagaactacgtgaagattaagctttgcttactgatacatggcatgtattcttttcagtcttttgtgtttgattttgtttgatttccctctgcagcacagcgtctctgtaaaggtttttatgctttcaccagccatgtcttaaatacattaagacaacacatttggtgttcacacttcttcagtaatgtctgaacttgaaagccacagagtggcataaaacaatgtgtgttttctttgagagcagtgcacattttgcaaccactaggaaggaaattttctgctaaagcaaacccctgttctctgacttgacaacttggccccggactgtggggccccacctgttgcttaccttttgaggtaattttgcaaatgtggtttttttacttggaaataactgcacatttatatataggatattggactctgcttagcattttcaagccacatagcatgactgttttttgaataggttggaattgaaaaaacaattatcaaacgttaagaacaaagacagggataaattgcttacatttcaacctctggagattgaggtaactttttgtgtctgggtcttgtcaacatctaatttttttccatccattctgttacactttgtattttctaactggagaaaagagtgaggaacagaatgttttaaatctggtgcaaaagaactatatctgctggatgagccttgaaagcagtcttggcctgttagggcttacaaagtaaattacaaagtgatccagttcaaagtttgcttagttacaacaaagcacctttaaaaaaaatacattttaaaaaaacattccaagccaattggaagacatcattgggttcttactttaagacatctcctggaataactgttcaaatgcaggttttagaaacaatgcaggaatcttgctttaaagatgaaaaagggaatgggccagcttcccttactcaaggagttgagggaccttggaggatgaaggcgagtatgtgacactggagaaaagtggaccaggcatgtcttttgctttgatctggagggagggctgcctgatgcaggccggctcccagtggggcaggcctcgctgcagaatgcccagtagtactgcggccaaggggacagttaggagacttcatctaaagcatgaaacctagctcctctacacacaaattcctatggaaatacctttgtgtacagtgtcttacattttcctattagtcagaaagaaggagagaatgagtgagtgcttgaaatgtgtcatactgttttaggatcaagactaggaattaggagccaggttgacaaggactttttctgagagttgggtgagggtaaagcttttctataatcaagctcaatacaccaaggaaactggatccagaattcctaaactttaaaatggtactgtctgcggagtggagtatggatggttatgtcaaagtcatagttcatcctatccagatgtagcattcatggtaaacttttaagtgctaagcaaggaattatttactgattggttttaaagagagcagaaaacacccaagtgtagaatgtctactgtttgctacctagaaatcttttccattcctctttcatacattccaacccactggaagtctttagaggtattttgatttaaagtatacttaaattaggatttcttaaagaaaacatagggagaaaactttacatgcaattaaaaatggactttcctgtgatttgtttttaatcattcatttggagaagaggcatgacctttgtatttcactaagtttaaagcaagagcaactgatgattaaatgttgctttttaataaggtttttaacttgaaaatttgaaaatatttaatgttgaaagacttcaattagggctattagagttatatctccctgtcgtaggcagcttcttcggagaagtgaaatataacattactcagtggacggagaaatctgttttgttacagagacatgcctctcagaaggtcaggaggttttgagtacctatccttgccacccatacaggaaatccaaagtttggtgtctctctctctctgtctctttctttctctttctccccccaaacccctctcactccctccctccctctctccttcccctatttgcaatcatattctccctctgcttcttttctcttctgccctccttgtgggcagtcatgaaaatcaattcagactgtgttgattagcagatttattattctattgagaaagcactggaatgttttgtgagattatttttatatgaaggaatagcctgaactcaaacagatggtaagaatagtacaaacaccttagcacatcactgcacacacagtattctgaaaggagatttgacacttaattcccattttcttaaaataacagttttgttgacttaaaaatatgagatacataggatgtgaaaaaaaatgtttgcagtactcagcaaaaaatagggtacataaagcagggtggctgtccatccactgattctggggtgagaagcgatttctacctcgcaagagtgactagaaagtttctaggagcacctccaggcttgcaaagaaagtgaggcctcttggtatcctttcctcagtgtgtatatgacagccagtataatcaataccctaggttatgcgtctatatgatactcatctgtgaatattattggttttgtaatctttgttatataagaggatgtttaggctgtatatactggggtagattattgcctgccccttatacataggaatatgctgcataattgcgcataacttccatctcccttactggcttgtaggcagaggaaactgtatatgttactgccttgtacttttctcatacaccaaaaacacaccaaaaaaatcaataaaataagcaatcttctattctcattccttttcccacagcagcatattttagaggcacatacaaaacctacattctctagttgggagtggatttttaaagttttccttttatcttttatttttttttgtatgatgcactgagatgtgtactttctaacaggggattggtacctaagaaatgtggtagcattattcagaaaactattatactttcaaatgacacatagtaaggagaatggaataatacatgttgcatatttgttaccagttgtaatttgtctgtattatgaaagatgtaatggtttgtcagctgtcactgttgttttcttgtaacatgatatggaataaagtatagcagaatctccgtaca

SEQ ID NO: 17169 - protein, 469 aa, Homo sapiens
MCDLIEPQPAEKIGKMKKLRRTLSESFSRIALKKDDTTFDEICVTKMSTRNCQGMDSVIKPLDTIPEDKKVRVQRTQSTFDPFEKPANQVKRVHSENNACINFKTSSTGKESPKVRRHSSPSSPTSPKFGKADSYEKLEKLGEGSYATVYKGKSKVNGKLVALKVIRLQEEEGTPFTAIREASLLKGLKHANIVLLHDIIHTKETLTLVFEYVHTDLCQYMDKHPGGLHPDNVKLFLFQLLRGLSYIHQRYILHRDLKPQNLLISDTGELKLADFGLARAKSVPSHTYSNEVVTLWYRPPDVLLGSTEYSTCLDMWGVGCIFVEMIQGVAAFPGMKDIQDQLERIFLVLGTPNEDTWPGVHSLPHFKPERFTLYSSKNLRQAWNKLSYVNHAEDLASKLLQCSPKNRLSAQAALSHEYFSDLPPRLWELTDMSSIFTVPNVRLQPEAGESMRAFGKNNSYGKSLSNSKH

SEQ ID NO: 17170 - DNA, 337 bp, Homo sapiens
agagtttgtgatcatgtgtttttcctctaacccagacatatacgtaggtctaaaactgcacagtgcaggatgtcaaatggcttaaaaggatttctgctgtgactgaaagagtggatctgtgcccttctgggggtgtaggctgaccacatgaataccaataattagacatatttccaaaccctcctcacccatcccccagcatgctacagaagcagcaggctggcagaggtccagatttcctaagtgatgggattgttcccccggccaggaatgagaggaatctgcctagattggagatggctttagctactttgcttttcttcgtactcgtagtctt

SEQ ID NO: 17171 - protein, 44 aa, Homo sapiens
MLQKQQAGRGPDFLSDGIVPPARNERNLPRLEMALATLLFFVLV

SEQ ID NO: 17172 - DNA, 4956 bp, Homo sapiens
gcatccccttgattaaatgtttttcctcctatgcaatcaccattagctgtttggctcccattctgtattcttctgaagcagccctgcattgcaaatcaatatctttctgaaaagacagtgtgttgtgaattgccttgacagcatatgcacggttactttggctgcaatgctgctgcagagcccggttactctgccttcgtgggaactccacagatatgtgtcacaaagatgtctacacggaactgccagggaatggactcagtgatcaaacccctggacacaattcctgaggataaaaaagtcagagttcagaggacacagagcacttttgacccatttgagaaaccagctaatcaagtaaagagggtgcattctgagaacaatgcttgcattaactttaagacctcctccactggcaaagagtcacctaaagttaggcggcactccagccccagctcgccaacaagtcccaaatttggaaaagctgactcatatgaaaagctggaaaaactaggggaaggatcttatgctacagtatacaaagggaaaagcaaggtaaatgggaagttggtagctctgaaggtgatcaggctgcaggaagaagaagggacacctttcacagctatcagggaagcttctcttttaaaaggactaaaacatgctaacatagtgctacttcatgacatcatccataccaaggagacgctgacacttgtgtttgaatatgtgcacactgatttatgtcagtacatggacaagcaccctggggggctgcatccagataatgtgaagttgtttttatttcagttgctgcgaggtctgtcttacatccaccagcgttatattttgcacagagacctgaaaccacagaaccttctgatcagtgacacgggggagttaaagctggcagatttcggtcttgcaagagcaaaatccgtccctagccacacatactccaacgaagtggttaccttgtggtacagacctccagatgtccttctaggctcaacagaatattccacctgccttgacatgtggggagtaggttgcatctttgttgaaatgatccaaggagttgctgcttttccaggaatgaaagacattcaggatcaacttgaacgaatatttctggttcttggaacaccaaatgaggacacatggcctggagttcattctttaccacattttaagccagaacgctttaccctgtacagctctaaaaaccttagacaagcatggaataagctcagctatgtgaaccatgcagaggacctggcctccaagctcctacaatgttccccaaagaacagactgtcggcacaggctgccttgagccacgagtattttagtgacctgccgccacggctatgggaactcaccgacatgtcttctatttttactgtcccaaatgtgagattgcaaccagaagctggagaaagcatgcgggcctttgggaaaaacaatagttatggcaaaagtctatcaaacagcaagcactgacaagcagcacattctcaagagcacacaggattaagttgtcatcattctgggaagaaaaaaaaaacattaatgaagaggccaataatatgaagggaatcatggatcagttttctttcgctccctgtggtggatttcacttacaagaaaattgaagctggcaagaccctgttttctctgcaatttatttaaaaccttgcacgcatttggataccttgtgatttccaagaactacgtgaagattaagctttgcttactgatacatggcatgtattcttttcagtcttttgtgtttgattttgtttgatttccctctgcagcacagcgtctctgtaaaggtttttatgctttcaccagccatgtcttaaatacattaagacaacacatttggtgttcacacttcttcagtaatgtctgaacttgaaagccacagagtggcataaaacaatgtgtgttttctttgagagcagtgcacattttgcaaccactaggaaggaaattttctgctaaagcaaacccctgttctctgacttgacaacttggccccggactgtggggccccacctgttgcttaccttttgaggtaattttgcaaatgtggtttttttacttggaaataactgcacatttatatataggatattggactctgcttagcattttcaagccacatagcatgactgttttttgaataggttggaattgaaaaaacaattatcaaacgttaagaacaaagacagggataaattgcttacatttcaacctctggagattgaggtaactttttgtgtctgggtcttgtcaacatctaatttttttccatccattctgttacactttgtattttctaactggagaaaagagtgaggaacagaatgttttaaatctggtgcaaaagaactatatctgctggatgagccttgaaagcagtcttggcctgttagggcttacaaagtaaattacaaagtgatccagttcaaagtttgcttagttacaacaaagcacctttaaaaaaaatacattttaaaaaaacattccaagccaattggaagacatcattgggttcttactttaagacatctcctggaataactgttcaaatgcaggttttagaaacaatgcaggaatcttgctttaaagatgaaaaagggaatgggccagcttcccttactcaaggagttgagggaccttggaggatgaaggcgagtatgtgacactggagaaaagtggaccaggcatgtcttttgctttgatctggagggagggctgcctgatgcaggccggctcccagtggggcaggcctcgctgcagaatgcccagtagtactgcggccaaggggacagttaggagacttcatctaaagcatgaaacctagctcctctacacacaaattcctatggaaatacctttgtgtacagtgtcttacattttcctattagtcagaaagaaggagagaatgagtgagtgcttgaaatgtgtcatactgttttaggatcaagactaggaattaggagccaggttgacaaggactttttctgagagttgggtgagggtaaagcttttctataatcaagctcaatacaccaaggaaactggatccagaattcctaaactttaaaatggtactgtctgcggagtggagtatggatggttatgtcaaagtcatagttcatcctatccagatgtagcattcatggtaaacttttaagtgctaagcaaggaattatttactgattggttttaaagagagcagaaaacacccaagtgtagaatgtctactgtttgctacctagaaatcttttccattcctctttcatacattccaacccactggaagtctttagaggtattttgatttaaagtatacttaaattaggatttcttaaagaaaacatagggagaaaactttacatgcaattaaaaatggactttcctgtgatttgtttttaatcattcatttggagaagaggcatgacctttgtatttcactaagtttaaagcaagagcaactgatgattaaatgttgctttttaataaggtttttaacttgaaaatttgaaaatatttaatgttgaaagacttcaattagggctattagagttatatctccctgtcgtaggcagcttcttcggagaagtgaaatataacattactcagtggacggagaaatctgttttgttacagagacatgcctctcagaaggtcaggaggttttgagtacctatccttgccacccatacaggaaatccaaagtttggtgtctctctctctctgtctctttctttctctttctccccccaaacccctctcactccctccctccctctctccttcccctatttgcaatcatattctccctctgcttcttttctcttctgccctccttgtgggcagtcatgaaaatcaattcagactgtgttgattagcagatttattattctattgagaaagcactggaatgttttgtgagattatttttatatgaaggaatagcctgaactcaaacagatggtaagaatagtacaaacaccttagcacatcactgcacacacagtattctgaaaggagatttgacacttaattcccattttcttaaaataacagttttgttgacttaaaaatatgagatacataggatgtgaaaaaaaatgtttgcagtactcagcaaaaaatagggtacataaagcagggtggctgtccatccactgattctggggtgagaagcgatttctacctcgcaagagtgactagaaagtttctaggagcacctccaggcttgcaaagaaagtgaggcctcttggtatcctttcctcagtgtgtatatgacagccagtataatcaataccctaggttatgcgtctatatgatactcatctgtgaatattattggttttgtaatctttgttatataagaggatgtttaggctgtatatactggggtagattattgcctgccccttatacataggaatatgctgcataattgcgcataacttccatctcccttactggcttgtaggcagaggaaactgtatatgttactgccttgtacttttctcatacaccaaaaacacaccaaaaaaatcaataaaataagcaatcttctattctcattccttttcccacagcagcatattttagaggcacatacaaaacctacattctctagttgggagtggatttttaaagttttccttttatcttttatttttttttgtatgatgcactgagatgtgtactttctaacaggggattggtacctaagaaatgtggtagcattattcagaaaactattatactttcaaatgacacatagtaaggagaatggaataatacatgttgcatatttgttaccagttgtaatttgtctgtattatgaaagatgtaatggtttgtcagctgtcactgttgttttcttgtaacatgatatggaataaagtatagcagaatctccgtaca

SEQ ID NO: 17173 - protein, 451 aa, Homo sapiens; identical to SEQ ID NO: 2046

SEQ ID NO: 17174 - DNA, 486 bp, Homo sapiens
agggtcttaggagagttggacacattcaaaacacaatatgtgattaagaagattaaagattaatacttattgatggattactatgtgccaaacttccaaccgaatcctgacaacaattccttaagatgtggaaactgcagttcactgaggttgacatttccgggttcatacaacaaggatgggcatgattgtgaggcctccccacccacatggaatgagttccccagctatcccccagtggcttggagattcccatttcaagagtgtagagttctacccagaaggtggctgcgtggacagtgactacattctcagctccatgcctatttggatggtctgaggccttcactcctcacccttcctggatgtggttgcgccagaggggatgatttagtgagcagatggtaccaggaaaaccaagggtattgcatccagctgtgtgtacacagattggtgaattcaagcctctgatctaggatctgaaat

SEQ ID NO: 17175 - protein, 76 aa, Homo sapiens
MDYYVPNFQPNPDNNSLRCGNCSSLRLTFPGSYNKDGHDCEASPPTWNEFPSYPPVAWRFPFQECRVLPRRWLRGQ

SEQ ID NO: 17176 - DNA, 1183 bp, Homo sapiens
atggagaaacacttaagggggctggaccttgctgttatggtcaagcaaaaagccactcctgggtattacattccaatctggccagtttcctctgcatctaagagcatggagacatgcttggcattcttcactcttaaagagacttcttctgtggggagctgcagggctttcacagcaagagagctggaacaagccaagactcctgtttccccctgcctggtgctgactgctgcagtagaagcagcggcgcagtgcaggttaattgttggactgttgaccaaggagaaatctcagcctagcctaagcaccatttccggaggaaatagcttgcctgccaaaagaactgcagaaactagttcaaatgatctgctatgtgaagattgtgcctgcttcctctttgccttccaccatgattggaagtttcctgagaccttcccagcagcagaagcctatacagtctgcagaactagttccccagctatcccccagtggcttggagattcccatttcaagagtgtagagttctacccagaaggtggctgcgtggacagtgactacattctcagctccatgcctatttgggtgaggccctgtgatgaatggtcatcagtggaatatgagcagaagtgttatgtgtcagaagaagacatgccttctccatcctttcttttcccctaccctctggtttgtgttggtttccagggtgtccttgggaggggtttgggccataatttcaaaagacacagtgctaaataccacaatcccaaatgttgaaatctggaaagatcaaaatctctaaaggaaggcacacatttaagatggcaaagccactgtgcctttgtccctaaataagagtggggcaactgtgcctttcaccactctgctgttaaccagttatacacacaatgaactgttacgttagcaaaaaaaatgtttcttgtaaaggccactgaaattgtggagtttgtctgttacagtaactagcagtactctaactaaaatgagcgtctttcataatagagatgagaattcagatttctactattctctgacaaatctccataacacttatttaccaaaccactgattttaattgtgctgaacggaaatgatcatggagagtcacttttccaatgacctctctgtcccttggttttccattgtttaaggtgaatgataattt

SEQ ID NO: 17177 - protein, 257 aa, Homo sapiens
MEKHLRGLDLAVMVKQKATPGYYIPIWPVSSASKSMETCLAFFTLKETSSVGSCRAFTARELEQAKTPVSPCLVLTAAVEAAAQCRLIVGLLTKEKSQPSLSTISGGNSLPAKRTAETSSNDLLCEDCACFLFAFHHDWKFPETFPAAEAYTVCRTSSPAIPQWLGDSHFKSVEFYPEGGCVDSDYILSSMPIWVRPCDEWSSVEYEQKCYVSEEDMPSPSFLFPYPLVCVGFQGVLGRGLGHNFKRHSAKYHNPKC

SEQ ID NO: 17178 - DNA, 669 bp, Homo sapiens
ctatgtgaagattgtgcctgcttcctctttgccttccaccatgattggaagtttcctgagaccttcccagcagcagaagcctatacagtctgcagaactgtgagcagattaaacctcttttcttaataaattacccagtctcagagttccccagctatcccccagtggcttggagattcccatttcaagagtgtagagttctacccagaaggtggctgcgtggacagtgactacattctcagctccatgcctatttgggtgaggccctgtgatgaatggtcatcagtggaatatgagcagaagtgttatgtgtcagaagaagacatgccttctccatcctttcttttcccctaccctctggtttgtgttggtttccagggtgtccttgggaggggtttgggccataatttcaaaagacacagtgctaaataccacaatcccaaatgttgaaatctggaaagatcaaaatctctaaaggaaggcacacatttaagatggcaaagccactgtgcctttgtccctaaataagagtggggcaactgtgcctttcaccactctgctgttaaccagttatacacacaatgaactgttacgttagcaaaaaaaatgtttcttgtaaaggccactgaaattgtggagtttgtctgttacagtaactagcagtactct

SEQ ID NO: 17179 - protein, 67 aa, Homo sapiens
MPIWVRPCDEWSSVEYEQKCYVSEEDMPSPSFLFPYPLVCVGFQGVLGRGLGHNFKRHSAKYHNPKC

SEQ ID NO: 17180 - DNA, 622 bp, Homo sapiens
aagattgtgcctgcttcctctttgccttccaccatgattggaagtttcctgagaccttcccagcagcagaagcctatacagtctgcagaactagttccccagctatcccccagtggcttggagattcccatttcaagagtgtagagttctacccagaaggtggctgcgtggacagtgactacattctcagctccatgcctatttggatggtctgaggccttcactcctcacccttcctggatgtggttgcgccagaggtgagtaggagaaagaatgcttttgagaaaggtaccttgagaatttatcttgacaactcctcctcatcctaggctttgcactttctctgtccctgaaacttcaaggtgttgttcctcttaatatttcaagtctaaaccctgaatccaagacccgaaaggaaaggaagttttgcccacaaagcagctcccacagcaaatgatgaatgctccaagtgctttctggggggaaaaaaaacgctgaaacagagtttagtcactagagtaaatccccacagaaaaagaaataaatctctgtgacatctgctaatgtctgccatttccttaaacacctctacctgtccagtttccgtacctcttttcccctt

SEQ ID NO: 17181 - protein, 36 aa, Homo sapiens
MIGSFLRPSQQQKPIQSAELVPQLSPSGLEIPISRV

SEQ ID NO: 17182 - DNA, 2104 bp, Homo sapiens
agaggcggaagtaaaagcgaactacagtggatgggtgcagttcaggcatttcaaaaggtttgaactacctaaccattatggcaccaggaaacctctggcatatgagaaataactttctctttggttcaagatgttggatgactcgattttcagcagaaaacatcttcaaatcagtttcatttaggctttttggtgtgaagtgtcataatacagacagtgagcctttgaaaaatgaggacctactgaaaaacttacttactatgggagtagatattgacatggcaaggaaacgacagcctggagtttttcataggatgattaccaatgagcaggacctgaagatgttccttctttccaaaggagctagcaaagaagtgatcgctagcatcatatcaagatatccacgagcaataacacgtactcccgagaatctttcaaaacggtgggatctgtggagaaagattgtgacatcagaccttgaaattgtaaatattttggaacgttctcctgaatccttttttcggtccaataacaacctaaacttagagaataatataaagttcctctactcagttggattgacccgtaaatgcctttgtcgattgttgaccaatgcccctcgtaccttctccaatagtcttgatctgaataaacagatggttgaatttttgcaggcagccggtttgtcattgggtcacaatgatcccgcagattttgtcagaaagataatttttaaaaacccttttatcttaattcagagcaccaagcgggtgaaagctaacattgaattcttacggtcaactttcaatttgaacagtgaggaactgctggttctgatatgtggtccaggagctgaaatcctagacctttccaatgactatgccagaagaagctacgcaaacatcaaagagaagctgttttctcttggatgtactgaagaagaggtacagaagtttgtcttaagctatccagatgtgatcttcttggcagagaaaaagtttaatgataaaatagactgcctcatggaagaaaacattagcatttcacaaataatcgaaaatcctcgggttctggattcaagcataagtactttaaaaagtcgaatcaaagaattggtaaatgctggctgtaacttgagtactttaaacatcactcttctatcttggagtaaaaaaagatatgaagctaaattgaaaaagttaagcagatttgcctaaggatgccaatgtttttaattctcaggaactgtgaatatgttatgccacattgcaaaagaattttgcagaagtgattaatttaaaatgttattaagggccttgagatggggagattatcctgaattactttggagggcctaatataattgtagggatctttaaaagttgaagagggaggcaaaagaggaggtcagagtgatcctgtataagaaagacaactacttttgaaggaagttaaaaggtggctttgaaggaggaagacaccttgagccaaggaatgaagggggcctgtaaaaaaagattgaaaaggcaaggaaacagattctccattagagtccccagaaaggaatgcagccttgctggcacctttttagcccagtgagatcaatgtcaaacttctgacccacagaaccataagatggtaaatttgtgttgttttaaaccactgagtcagtgataatttgctgaagaagcaaatagattaacatagcaactaagtagatgattagttgcattataggtgaagtcaaaaatacagtcctttagtaaagtctctatttcttccttttataagagtaattatatttaaaaaatctacctacccttctggaattgctaatgttagtgtttataaagtcttaaatgtgtgcataaaaaactaaatgtgaatataaaatctaaataaaggaatatgtttgcctaatatagtttaaggaaatgataatcatttctgtgcattttgttggcatttcagctaatattaaagagtaattttcagaggcattgacttaaaaaatggcaaatcagataatgtcggtattttcaagatacaatctagctctgacataaactgaaagacgtgagacaaattatatgaccttaatttt

SEQ ID NO: 17183 - protein, 379 aa, Homo sapiens
MAPGNLWHMRNNFLFGSRCWMTRFSAENIFKSVSFRLFGVKCHNTDSEPLKNEDLLKNLLTMGVDIDMARKRQPGVFHRMITNEQDLKMFLLSKGASKEVIASIISRYPRAITRTPENLSKRWDLWRKIVTSDLEIVNILERSPESFFRSNNNLNLENNIKFLYSVGLTRKCLCRLLTNAPRTFSNSLDLNKQMVEFLQAAGLSLGHNDPADFVRKIIFKNPFILIQSTKRVKANIEFLRSTFNLNSEELLVLICGPGAEILDLSNDYARRSYANIKEKLFSLGCTEEEVQKFVLSYPDVIFLAEKKFNDKIDCLMEENISISQIIENPRVLDSSISTLKSRIKELVNAGCNLSTLNITLLSWSKKRYEAKLKKLSRFA

SEQ ID NO: 17184 - DNA, 2181 bp, Homo sapiens
ctagccgctccggaccccagaggcggaagtaaaagcgaactacagtggatgggtgcagttcaggagatagctgttctccagcctttctggagggatgcagagcctttccttaggacaaacaagcatttcaaaaggtttgaactacctaaccattatggcaccaggaaacctctggcatatgagaaataactttctctttggttcaagatgttggatgactcgattttcagcagaaaacatcttcaaatcagtttcatttaggctttttggtgtgaagtgtcataatacagacagtgagcctttgaaaaatgaggacctactgaaaaacttacttactatgggagtagatattgacatggcaaggaaacgacagcctggagtttttcataggatgattaccaatgagcaggacctgaagatgttccttctttccaaaggagctagcaaagaagtgatcgctagcatcatatcaagatatccacgagcaataacacgtactcccgagaatctttcaaaacggtgggatctgtggagaaagattgtgacatcagaccttgaaattgtaaatattttggaacgttctcctgaatccttttttcggtccaataacaacctaaacttagagaataatataaagttcctctactcagttggattgacccgtaaatgcctttgtcgattgttgaccaatgcccctcgtaccttctccaatagtcttgatctgaataaacagatggttgaatttttgcaggcagccggtttgtcattgggtcacaatgatcccgcagattttgtcagaaagataatttttaaaaacccttttatcttaattcagagcaccaagcgggtgaaagctaacattgaattcttacggtcaactttcaatttgaacagtgaggaactgctggttctgatatgtggtccaggagctgaaatcctagacctttccaatgactatgccagaagaagctacgcaaacatcaaagagaagctgttttctcttggatgtactgaagaagaggtacagaagtttgtcttaagctatccagatgtgatcttcttggcagagaaaaagtttaatgataaaatagactgcctcatggaagaaaacattagcatttcacaaataatcgaaaatcctcgggttctggattcaagcataagtactttaaaaagtcgaatcaaagaattggtaaatgctggctgtaacttgagtactttaaacatcactcttctatcttggagtaaaaaaagatatgaagctaaattgaaaaagttaagcagatttgcctaaggatgccaatgtttttaattctcaggaactgtgaatatgttatgccacattgcaaaagaattttgcagaagtgattaatttaaaatgttattaagggccttgagatggggagattatcctgaattactttggagggcctaatataattgtagggatctttaaaagttgaagagggaggcaaaagaggaggtcagagtgatcctgtataagaaagacaactacttttgaaggaagttaaaaggtggctttgaaggaggaagacaccttgagccaaggaatgaagggggcctgtaaaaaaagattgaaaaggcaaggaaacagattctccattagagtccccagaaaggaatgcagccttgctggcacctttttagcccagtgagatcaatgtcaaacttctgacccacagaaccataagatggtaaatttgtgttgttttaaaccactgagtcagtgataatttgctgaagaagcaaatagattaacatagcaactaagtagatgattagttgcattataggtgaagtcaaaaatacagtcctttagtaaagtctctatttcttccttttataagagtaattatatttaaaaaatctacctacccttctggaattgctaatgttagtgtttataaagtcttaaatgtgtgcataaaaaactaaatgtgaatataaaatctaaataaaggaatatgtttgcctaatatagtttaaggaaatgataatcatttctgtgcattttgttggcatttcagctaatattaaagagtaattttcagaggcattgacttaaaaaatggcaaatcagataatgtcggtattttcaagatacaatctagctctgacataaactgaaagacgtgagacaaattatatgaccttaatttt

SEQ ID NO: 17185 - protein, 399 aa, Homo sapiens; identical to SEQ ID NO: 2048

SEQ ID NO: 17186 - DNA, 1932 bp, Homo sapiens
agaggcggaagtaaaagcgaactacagtggatgggtgcagttcaggcatttcaaaaggtttgaactacctaaccattatggcaccaggaaacctctggcatatgagaaataactttctctttggttcaagatgttggatgactcgattttcagcagaaaacatcttcaaatcagtttcatttaggctttttggtgtgaagtgtcataatacagacagtgagcctttgaaaaatgaggacctactgaaaaacttacttactatgggagtagatattgacatggcaaggaaacgacagcctggagtttttcataggatgattaccaatgagcaggacctgaagatgttccttctttccaaaggagctagcaaagaagtgatcgctagcatcatatcaagatatccacgagcaataacacgtactcccgagaatctttcaaaacggtgggatctgtggagaaagattgtgacatcagaccttgaaattgtaaatattttggaacgttctcctgaatccttttttcggtccaataacaacctaaacttagagaataatataaagttcctctactcagttggattgacccgtaaatgcctttgtcgattgttgaccaatgcccctcgtaccttctccaatagtcttgatctgaataaacagatggttgaatttttgcaggcagccggtttgtcattgggtcacaatgatcccgcagattttgtcagaaagataatttttaaaaacccttttatcttaattcagagcaccaagcgggtgaaagctaacattgaattcttacggtcaactttcaatttgaacagtgaggaactgctggttctgatatgtggtccaggagctgaaatcctagacctttccaatgactatgccagaagaagctacgcaaacatcaaagagaagctgttttctcttggatgtactgaagaagaggtacagaagtttgtcttaagctatccagatgtgatcttcttggcagagaaaaagtttaatgataaaatagactgcctcatggaagaaaacattagcatttcacaaataatcgaaaatcctcgggttctggattcaagcataagtactttaaaaagtcgaatcaaagaattggtaaatgctggctgtaacttgagtactttaaacatcactcttctatcttggagtaaaaaaagatatgaagctaaattgaaaaagttaagcagatttgcctaaggatgccaatgtttttaattctcaggaactgtgaatatgttatgccacattgcaaaagaattttgcagaagtgattaatttaaaatgttattaagggccttgagatggggagattatcctgaattactttggagggcctaatataattgtagggatctttaaaagttgaagagggaggcaaaagaggaggtcagagtgatcctgtataagaaagacaactacttttgaaggaagttaaaaggtggctttgaaggaggaagacaccttgagccaaggaatgaagggggcctgtaaaaaaagattgaaaaggcaaggaaacagattctccattagagtccccagaaaggaatgcagccttgctggcacctttttagcccagtgagatcaatgtcaaacttctgacccacagaaccataagatggtaaatttgtgttgttttaaaccactgagtcagtgataatttgctgaagaagcaaatagattaacatagcaactaagtagatgattagttgcattataggtgaagtcaaaaatacagtcctttagtaaagtctctatttcttccttttataagagtaattatatttaaaaaatctacctacccttctggaattgctaatgttagtgtttataaagtcttaaatgtgtgcataaaaaactaaatgtgaatataaaatctaaataaaggaatatgtttgcctaatatagtttaagg

SEQ ID NO: 17187 - protein, 379 aa, Homo sapiens; identical to SEQ ID NO: 17183

SEQ ID NO: 17188 - DNA, 2009 bp, Homo sapiens
ctagccgctccggaccccagaggcggaagtaaaagcgaactacagtggatgggtgcagttcaggagatagctgttctccagcctttctggagggatgcagagcctttccttaggacaaacaagcatttcaaaaggtttgaactacctaaccattatggcaccaggaaacctctggcatatgagaaataactttctctttggttcaagatgttggatgactcgattttcagcagaaaacatcttcaaatcagtttcatttaggctttttggtgtgaagtgtcataatacagacagtgagcctttgaaaaatgaggacctactgaaaaacttacttactatgggagtagatattgacatggcaaggaaacgacagcctggagtttttcataggatgattaccaatgagcaggacctgaagatgttccttctttccaaaggagctagcaaagaagtgatcgctagcatcatatcaagatatccacgagcaataacacgtactcccgagaatctttcaaaacggtgggatctgtggagaaagattgtgacatcagaccttgaaattgtaaatattttggaacgttctcctgaatccttttttcggtccaataacaacctaaacttagagaataatataaagttcctctactcagttggattgacccgtaaatgcctttgtcgattgttgaccaatgcccctcgtaccttctccaatagtcttgatctgaataaacagatggttgaatttttgcaggcagccggtttgtcattgggtcacaatgatcccgcagattttgtcagaaagataatttttaaaaacccttttatcttaattcagagcaccaagcgggtgaaagctaacattgaattcttacggtcaactttcaatttgaacagtgaggaactgctggttctgatatgtggtccaggagctgaaatcctagacctttccaatgactatgccagaagaagctacgcaaacatcaaagagaagctgttttctcttggatgtactgaagaagaggtacagaagtttgtcttaagctatccagatgtgatcttcttggcagagaaaaagtttaatgataaaatagactgcctcatggaagaaaacattagcatttcacaaataatcgaaaatcctcgggttctggattcaagcataagtactttaaaaagtcgaatcaaagaattggtaaatgctggctgtaacttgagtactttaaacatcactcttctatcttggagtaaaaaaagatatgaagctaaattgaaaaagttaagcagatttgcctaaggatgccaatgtttttaattctcaggaactgtgaatatgttatgccacattgcaaaagaattttgcagaagtgattaatttaaaatgttattaagggccttgagatggggagattatcctgaattactttggagggcctaatataattgtagggatctttaaaagttgaagagggaggcaaaagaggaggtcagagtgatcctgtataagaaagacaactacttttgaaggaagttaaaaggtggctttgaaggaggaagacaccttgagccaaggaatgaagggggcctgtaaaaaaagattgaaaaggcaaggaaacagattctccattagagtccccagaaaggaatgcagccttgctggcacctttttagcccagtgagatcaatgtcaaacttctgacccacagaaccataagatggtaaatttgtgttgttttaaaccactgagtcagtgataatttgctgaagaagcaaatagattaacatagcaactaagtagatgattagttgcattataggtgaagtcaaaaatacagtcctttagtaaagtctctatttcttccttttataagagtaattatatttaaaaaatctacctacccttctggaattgctaatgttagtgtttataaagtcttaaatgtgtgcataaaaaactaaatgtgaatataaaatctaaataaaggaatatgtttgcctaatatagtttaagg

SEQ ID NO: 17189 - protein, 399 aa, Homo sapiens; identical to SEQ ID NO: 2048

SEQ ID NO: 17190 - DNA, 609 bp, Homo sapiens
ggaaaagactaacttccggcctcgggtcgcgcgcagaggtgatgtcgttggtcctgcgccccctcgtggcggtacttcagcccttcgcagcccgacgctaggggcctggcagggggcagcaagagaccgcggattacctgaagctgagtaatttataaagaaaagaagttcaattggctcacagttctgcaggctgtacaggaagcatggcactgacatcttctcagcttctggtgagggcctcaggaagtttacaatcatggtggaaggcaaagggggagcaagcgtctcatgtggcaagagggaacaaacaggagacaggaggtgccacacacttttaaacaacaggatctcacaagagcttactcttacaaggacagcaccaagaatatgaggaatctgcccgcatgacccaaacacttccctccaggccccacctccaacactggggattacatctcaacactggatttggaggggacatccaaactatatcaaggctgtacaagaagcttggtgccagcatttgcttctacgcagagcctcaggctgcttctactcacagtaaaaggcaaaagggcatgcaaagatcatgtggcaagagaagaa

SEQ ID NO: 17191 - protein, 66 aa, Homo sapiens
MTQTLPSRPHLQHWGLHLNTGFGGDIQTISRLYKKLGASICFYAEPQAASTHSKRQKGMQRSCGKR

SEQ ID NO: 17192 - DNA, 603 bp, Homo sapiens
atggttcaatggtccctgcacctacagagtgccgtggaaacagggcccagtcaccctccaactgcactgcacagtcccatgaaaccagaaagacaacccagctggattgccaaacctaccctgcggtcctcgtcttcctggccccatagctcctcctcgccaagcatgtcttccccactgcagagagctgtgggagataccaagagggccttgtctgcatcttctagttcctctgccagtctacccttcgatgacagggactcaaaccatccctcagaggctgatgaaggcagtgactttgaagatagcttcaatcgcaatgtgaagaagaaagcagcaaaacgaccaccgaaaacaacaccgactgtgctgtggaatgggcagcgtggcaaacaacgaaagaaagggtcccgagtggtacatcgtcatagccggaaacagtcagagccaccagccaatgatcttttcaatgcggtgaaagctgccaaaagtgacatgcaggtctcatatcccacctcgctgctcctgcgcctgcagtcccccatgtctgcgacacccagtgtcacagctccagtaaagccccctcccgatcctaagccctaa

SEQ ID NO: 17193 - protein, 200 aa, Homo sapiens
MVQWSLHLQSAVETGPSHPPTALHSPMKPERQPSWIAKPTLRSSSSWPHSSSSPSMSSPLQRAVGDTKRALSASSSSSASLPFDDRDSNHPSEADEGSDFEDSFNRNVKKKAAKRPPKTTPTVLWNGQRGKQRKKGSRVVHRHSRKQSEPPANDLFNAVKAAKSDMQVSYPTSLLLRLQSPMSATPSVTAPVKPPPDPKP

SEQ ID NO: 17194 - DNA, 1778 bp, Homo sapiens
tctcccaggctggagtacagtggcgcgatctcggctcactgcaagctccgccccccgggttcatgccattctagcatgggtccatttttaataaatacataaatatttaaactttctagatctaaagcttaaggactatggagtggatctcattgaagtttcagacaatggatgtggggtagaagaagaaaactttgaaggcttaatctctttcagctctgaaacatcacacatgtaagattcaagagtttgccgacctaactgaggttgaaactttcggctttcagggggaagctctgagctcactgtgtgcactgagatgccaaaccttagattttatgatgactcctcaaccgtttagatcttggttatctcagagggatcatcagctttttaagaaagttttgagagaaaagcaagtgaagaaaagcgtagtcaatgctcaacatcacgggtctctcactgaacacaccacgcctggtattctctcacagcgatgtcaccatttctacctgccacgcatcggcgaaggttgggactcgactggtgtttgatcactatgggaaaatcatccagaaaaccccctacccccaccccagagggatgacagtcagcgtgaagcagttattttctacactacctgtgcgccataaggaatttcaaaggaatattaagaagacgtgcctgcttccccttcgccttctgccgtgattgtcagtttcctgaggcctccccagccacgcttcctgtacagcctgcagaactgtgagtcaattaaacctcttttcttcataaattacccagtttctcatagttctttatagcagtgtgaaaacagactaatggacccttctggttgaaggaatgcagccattctgcttgtttgactatgtcctttctattcatctctatttcctgggaggtgtttatccaagtgcaataggaggtattggtgactgcacagtcccctcagtgttctgctagtaaatagttgaaggttgatcattgatctcctgcgttttcagtctggcatggaaaagcccccatgcaactggtagtaaagatatcaataagcaccaggaggtatctaaatccaccaggagccataggcatcacgttgacgtccatttaccagtcttccctggcaagattcttctgaattgtgctgccttggccaaaagaggtgtgggaggggctgggcgcagtggcttgtgcctgtaatcccaacattttgggaaaccaattcaggtggatcattagaggtcaggggttcaagaccatcctggccaacatggtgacatcccatctctactaaaaatacaataagttagctgggtttggtgttgggtgcctgtaatcccagctactcgagaggctgaggcaggataatcgcttgaacctgggaggaggaggtggcagtgagctgagatcgtgccattgcactccagcgtgggcaacaagagtgaaacgtcgtctcaaaaaataaaaaaaaaagtccgggcgtgatggctcacacctgtaatcccagcactttgagaggccaagacgggtggatcacgaggtcaggagttcaagaccagcctggcctagatggtgaaaccctgtctctactaaaaatacaaatattagctgggcatggtggcatgcacctgtaatctcagctactcagaagtctgatgcaggagaattgctaaaacccaggagggggaggttatattgagctgagattgcaccactgcactctagcctgggcgacagagcaagactccatctcgaaa

SEQ ID NO: 17195 - protein, 90 aa, Homo sapiens
MLNITGLSLNTPRLVFSHSDVTISTCHASAKVGTRLVFDHYGKIIQKTPYPHPRGMTVSVKQLFSTLPVRHKEFQRNIKKTCLLPLRLLP

SEQ ID NO: 17196 - DNA, 3616 bp, Homo sapiens
attccctgaaactggggacaccattggaaatatgtgtgagctcaggggcagtttcctatgatttttaggcctcaaaatgtctcttggactcaaaattgccttagggcagaggacgtgtgtacccccagtatagaatctcggacagtgaatgtgagtaaacattcggcagaaaagctctgccaaactgagtgctctgatgtgactttttcatcaagtcagtattcctgggatctcttgtacgtgataatctcactcttgtacatgataatctcactcttgtacatgatactctcactcttataaggtttcatcgtttctgcttaccctagttttctttcccactctgttccctctcccaccagactggactctgaaatgggcatgtacagagacgaagagaccccaacatgcttcaggctttgagtggagaggacacagcctctgctgggacagggaatagagggatgtggagtccctgaagatgcttttggacaatggtctgaggttgggacagtggcaggagataccattcacccaggatctccaggacaagagatcagcctggcagttacatgtgttttttttcaaactggttgccaggttggcatgaacgatgacatcagagattccgaccttcctgattggagggaccggactccgtggtgcctggagatcagttggacaacagtatcttctcagagctgttctctactcctgacttctcctaggcttgagaattgataacatactcttctggatcctagaagtgtccagaagaaggccatggacagaacggagactaggttccgtaagaggggacagattacgggaaagatcacgaccagccgtcaaccgcacccccagaatgagcagagtccccagcggagcacctcggggtaccccctccaggaggtggtggatgatgaaatgttgggaccatcagcccctggggtagatcccagccccccatgtaggtcccttggctggaaaaggaagagggagtggtcagatgaatctgaggaggagccggagaaggagctcgcccctgagcctgaggagacctgggtagtggagatgctgtgtgggctcaagatgaagctgaagcaacagcgagtgtcatccatcctccctgagcaccacaaggacttcaacagtcagcttgcccctggggtagatcccagccccccgcataggtccttttgctggaaaaggaagatggagtggtgggacgaatctgaggagtcgttggaggaggagccacggaaggtgctcgcccctgagcctgaggagatctgggtggcggagatgctgtgtggcctcaagatgaagctgaagcgacggcgagtgtcgctcgtgctccctgagcaccacgaggccttcaacaggctgcttgaggatcctgtcattaaaagattcttggcctgggacaaagatctgagggtgtcggacaagtatctcctggctatggtcatagcgtatttcagccgggctggcttcccctcctggcaataccaacgcattcatttcttcctggctctctacctggccaatgacatggaggaggacgacgaggactccaaacaaaacatcttccacttcctgtataggaagaaccgctctcgcatacccttgctccgtaagccgtcggttccagttataccgttccacgaacccgagggccaggaagaaccgctctcgcatacccttgctccgtaagcgtcggttccagttataccgttccatgaactcgagggccaggaagaaccgctctcagatagtcctgttccagaaacgacggttccacttcttctgttccatgagctgcagggcttgggtttccccagaggagttggaggagatccaggcttatgacccagagcactgggtgtgggcgcgagatcgcgctcacctttcctagagctccagggaccggggaggcctgaggtcatcggcctgagagaagaacactggacccaggggagatgtggattttcagcaggaactttattccaatgctaatggcagacaccaggcaggaggagaggaaccatttgtgcagatcatctagaagaacctggaccattcttgatggagctgaatacagtgatcacgttgtcctcctaggagcaggggtggggggaggggggtggggtccttctaggagtccttggagaaaagtaagaaaccaggagcgtttccagttccaccctttcctgcggcaccaccaccctttttatattgctgaattccaacctccctggggcggaacctggaggtcctgtttcttacggacttgcagtccaggaggatttgaaggcacaatgcaggggctcagattgggacagaattcttttgtgaaatatcagtgccacagattgtaacagatagcttcatgcacactctgcattttattggtttgtttggaaaatgtcggccattgaattattcatagatttatttcaaatagtttggaaattgttgtacttttgaaaacatgctgttcctgtagttttttgatgagagttatagttgttatatatacataaagataattttcttttcatttttaagagacaattcttttatcctaaatattttattatctttaaatttgtttctgtattattatatgtgctcctgaagcgagcactctttttatctatgatacttccataataatctcttctatttatagctattggtagttccccaccagaaaaatacataattctggtgatagaaatttttatttgctgtttaggtttgtgactgaattgtgagaattcagttgtgatttttaacatgtctcagatatatatactaacacgtctaatatatactatctattttattggtttattttgaaaaacatgggtatagaattatttaaatattattttatttatttaaatatttattaaatatatttatttatttaaatattatttttacattaaatattattttaaatattttggaaatactggtatttttgaatagatgctgtttctacaaagctgtgtgatgggtattataactgttatatacacatacatataattttgttttcctttttaagagaggattcttttcatcctaaatcttttacctttcaatctttgtatctattattacacgtgctgctgaagggagcatggattttatctatgatacttagttaacatatatattacatttatagctatgtagtagttcccctaaattcttgtaaaaataaatttttatttgatatttcatatatgtttgaaatgtgagaattcagatgtaattttttaccttgttttggcatgtttgtatattactttaaagagaatgtgtgttctaaaggaggacatgagctgtgtgttttcaagagaacaatagagtgggtctcttggggaaacataataaaaatgaacttttctcaccttcacagcaattgtgatcatattggtctggattgattatttgctgcccagtgatatttttccttaatggggttgtggttatttgaacatatttattagctctggaagataatcctgtgctgttttttatgtagaaaaaaacataaggctgggtgcagtgctcacacctacaatccctgcggttttgg

SEQ ID NO: 17197 - protein, 310 aa, Homo sapiens
MDRTETRFRKRGQITGKITTSRQPHPQNEQSPQRSTSGYPLQEVVDDEMLGPSAPGVDPSPPCRSLGWKRKREWSDESEEEPEKELAPEPEETWVVEMLCGLKMKLKQQRVSSILPEHHKDFNSQLAPGVDPSPPHRSFCWKRKMEWWDESEESLEEEPRKVLAPEPEEIWVAEMLCGLKMKLKRRRVSLVLPEHHEAFNRLLEDPVIKRFLAWDKDLRVSDKYLLAMVIAYFSRAGFPSWQYQRIHFFLALYLANDMEEDDEDSKQNIFHFLYRKNRSRIPLLRKPSVPVIPFHEPEGQEEPLSHTLAP

SEQ ID NO: 17198 - DNA, 229 bp, Homo sapiens
gaattctgtcccaatctgagcccctgcattgtgccttcaaatcctcctggactgcaagtccgtaagaaagctcctggtttcttacttttctccaaggactcctagaaggaccccacccccctccccccacccctgctcctaggaggacaacgtgatcactgtattcagctccatcaagaatggtccaggttcttctagatgatctgcacaaatggttcctctcctcctg

SEQ ID NO: 17199 - protein, 40 aa, Homo sapiens [sequence omitted]

SEQ ID NO: 17200 - DNA, 236 bp, Homo sapiens
caatatccaatgccctgggacagcgggggaagtgggattccagcctttcatttattctttcacctatttgtcctctttactctgtgtacaaaaaagagaggattatactatcatagactgttgtttctaaacagaaactcaggctgggcacagtggaatacgcctgtaatcccagcactttgggaggccgaggcaggcaagagaaccctttgaacccaggaggtggaggttgcagt

SEQ ID NO: 17201 - protein, 67 aa, Homo sapiens [sequence omitted]

SEQ ID NO: 17202 - DNA, 1081 bp, Homo sapiens
cgtgtgcacctctccctgcgtgcgtgttcgcgcgtgcgtgcttgcacatgcgcgccacctccgcactgccctggcttcctgcgcctcttcaggtcatcgcttgctctcgttcccaggctttggcctctagtggacgagaatcaccgagtctgcggggctggacgctgactgcccgggccagcacctaggcgggcgggagctgtgcggcccagggttcacgcgggccgggtagaggctcgagccgggacccccgagcgtgaaccccggagccggcggcgctggggccagaggggccgggcgggaggtggtggcggaggcgaaggggcgacgggacctgggcctggcccgtgtgtgtcctcggcggcctggcgccggccgtcgctgtacggtgagccccagggaggcggatctgggccccgagaaggacccccgcctggatttgccccgtaggcccggcccgggcccctcgggagcagaacagctttggtgaggtggacaggaggtgacctcgcgagcagacgcgcgcgccagcgacagcagcccgccccggcctctcgggagccgtggggcagaggctgcggagccccaggagggccggagccctcatgacttcagtgacctgcttctgcccctctaggtctatcagccacagtctctgcaagtttccaagagcagcagaaaatgaacacattgcaggggccagtgtcattcaaagatgtggctgtggatttcacccaggaggagtggcagcaactggaccctgatgagaagatagcatacggggatgtgatgttggagaactacagccatctagtttctgtggggtatgattatcaccaagccaaacatcatcatggagtggaggtgaaggaagtggagcagggagaggagccgtggataatggaaggtgaatttccatgtcaacatagtccagctttcacagcattgaaaagatcattggctggtggctctgactgtttccggctatgacgatgtaccactcgggaccctttctctggatgtttgccatctaatatgtataaaaagatcagaaatatgaaaaaaaggtaacaatgacatt

SEQ ID NO: 17203 - protein, 102 aa, Homo sapiens
MNTLQGPVSFKDVAVDFTQEEWQQLDPDEKIAYGDVMLENYSHLVSVGYDYHQAKHHHGVEVKEVEQGEEPWIMEGEFPCQHSPAFTALKRSLAGGSDCFRL

SEQ ID NO: 17204 - DNA, 3495 bp, Homo sapiens
cgtgtgcacctctccctgcgtgcgtgttcgcgcgtgcgtgcttgcacatgcgcgccacctccgcactgccctggcttcctgcgcctcttcaggtcatcgcttgctctcgttcccaggctttggcctctagtggacgagaatcaccgagtctgcggggctggacgctgactgcccgggccagcacctaggcgggcgggagctgtgcggcccagggttcacgcgggccgggtagaggctcgagccgggacccccgagcgtgaaccccggagccggcggcgctggggccagaggggccgggcgggaggtggtggcggaggcgaaggggcgacgggacctgggcctggcccgtgtgtgtcctcggcggcctggcgccggccgtcgctgtacggtgagccccagggaggcggatctgggccccgagaaggacccccgcctggatttgccccgtaggcccggcccgggcccctcgggagcagaacagctttggtgaggtggacaggaggtgacctcgcgagcagacgcgcgcgccagcgacagcagcccgccccggcctctcgggagccgtggggcagaggctgcggagccccaggagggccggagccctcatgacttcagtgacctgcttctgcccctctaggtctatcagccacagtctctgcaagtttccaagagcagcagaaaatgaacacattgcaggggccagtgtcattcaaagatgtggctgtggatttcacccaggaggagtggcagcaactggaccctgatgagaagatagcatacggggatgtgatgttggagaactacagccatctagtttctgtggggtatgattatcaccaagccaaacatcatcatggagtggaggtgaaggaagtggagcagggagaggagccgtggataatggaaggtgaatttccatgtcaacatagtccaggagattgtcagaaatggaggagggggcaccagatccaaggaagtgcccggacaaagccgggaggcgaggagagccgacggggaggaggtgccgagagcatcagcggggctgctcggtggcacgaagacgcccgcggggactggagaggtcggctagggccaggctactcaggcacggagggccacctccccttcagggacgtgagcatctagctgcactgatttgttgttcaggaacaggaaatgaaaccccgcagctttgaacacaataacccacgccagcctcaggctcatgaatattcagcaggctgcttgcgccttgcaaccccgcctccgttcccctctgcggagactgcgtatgcgtcgccggcgcgcggctgtgtcgtcatacttgcgcgccgacgccgccgctcgcttgtgaaactggaaggctgccatggctagcccagccgcctcctcggtgcgaccaccgaggcccaagaaagagccgcagacgctcgtcatccccaagaatgcggcggaggagcagaagctcaagctggagcggctcatgaagaacccggacaaagcagttccaattccagagaaaatgagtgaatgggcacctcgacctcccccagaatttgtccgagatgtcatgggttcaagtgctggggccggcagtggagagttccacgtgtacagacatctgcgccggagagaatatcagcgacaggactacatggatgccatggctgagaagcaaaaattggatgcagagtttcagaaaagactggaaaagaataaaattgctgcagaggagcagaccgcaaagcgccggaagaagcgccagaagttaaaagagaagaaattactggcaaagaagatgaaacttgaacagaagaaacaagaaggacccggtcagcccaaggagcaggggtccagcagctctgcggaggcatctggaacagaggaggaggaggaagtgcccagtttcaccatggggcgatgacaatgtttgccacagcctctgcctggaacctggctcgtgctgtgaccagaagggaaaggcggctgtttggctctttctcccccgcaaggacccgctgacccgctggatggagagcaaaggagacccctcccgagccgctcacagtcctgtatttggcaggtttgggagcctgaggggccatctccctgacactcagaggcactgccttgcagacaccatccgtgctcctggtaaagggggacagagagcctcaccttgccacatatttgaacagtgatgagtttggggctggtttctgggaagggaacgtttatttagtaaagagcagaacacccttgcgttttgttgggacatgtggaccgtgagtcgcaaacactctggagaaggctgagatgccaccattcccacggggactgaagacacattacgtggacctggtcccaggctcagtgaggagatggcctcagctgtggggctggtccatgttgcccactcactccagtgggaagtggggaccacgccatagagggtctgctcccactgcagctcccggtgctctcgtgttctgggaaggcctgggtgtgtgcacaaggaggcccgggccagggacttcaccaggggctgggtcacaagggcacagggtgtgtggaaagcgctgtgggggaagagccggtcaccggagagtgagcaggcggagactccaagctgggctgagccagagcagaaggcgagggattcccagccggacgggggttctctcaccaacagctgtgatttcatcccgaagtggaagggggtctaaacagaacaggctgagagaggcgggactgggtcaagtgggtggagctcctccttgcatgactgcaactgtcggggctttccgccggctcacagcagttggggccagcggggagaagagaggcggaactgctgtgtcctcatgtggcgcagcctcaaactggcatccaggcactgggcccatgcagagaaggcacctgcagagagcagggcagcccggcgcaggggcatgcgcctagaatcccagctactcggaaggccaaggcaggaggaccgcttgagtccagggattcaaggccaacctgggcaatagagcgagaccctgtctcttaaaaaacgatgatgatgaacacagaggacggggcactgtgctgggagccagggggcctgggaggagccgagaccagccttttacctcggggttttgaggccaacagggacgacagagacagtttctagttagagccttggctccatttttggatgatttagccccgagttcctgagtctattttatgccccttacgtactttgatagaactaaggaaatagtggttttgagtgaagggaaaggaaacccagaaacattttacgttgcttttacttctgtagtgtagattgccccggcccctctctgagccctgtagcatctgtgatagcttctgtcccttcatcggttcatgtcacagggattttctttcccaggaagcggacacggagagtcagccctaataaatgagcacatgccctggctgtacattttgaaacctgtt

SEQ ID NO: 17205 - protein, 184 aa, Homo sapiens; identical to SEQ ID NO: 2050

SEQ ID NO: 17206 - DNA, 2162 bp, Homo sapiens
actgccctggcttcctgcgcctcttcaggtcatcgcttgctctcgttcccaggctttggcctctagtggacgagaatcaccgagtctgcggggctggacgctgactgcccgggccagcacctaggcgggcgggagctgtgcggcccagggttcacgcgggccgggtagaggctcgagccgggacccccgagcgcggatctgggccccgagaaggacccccgcctggatttgccccgtaggcccggcccgggcccctcgggagcagaacagctttggtgaggtggacaggaggtgacctcgcgagcagacgcgcgcgccagcgacagcagcccgccccggcctctcgggagccgtggggcagaggctgcggagccccaggagggccggagccctcatgacttcagtgacctgcttctgcccctctaggtctatcagccacagtctctgcaagtttccaagagcagcagaaaatgaacacattgcaggggccagtgtcattcaaagatgtggctgtggatttcacccaggaggagtggcagcaactggaccctgatgagaagatagcatacggggatgtgatgttggagaactacagccatctagtttctgtggggtatgattatcaccaagccaaacatcatcatggagtggaggtgaaggaagtggagcagggagaggagccgtggataatggaaggtgaatttccatgtcaacatagtccaggagattgtcagaaatggaggagggggcaccagatccaaggaagtgcccggacaaagccgggaggcgaggagagccgacggggaggaggtgccgagagcatcagcggggctgctcggtggcacgaagacgcccgcggggactggagaggtcggctagggccaggctactcaggcacggagggccacctccccttcagggacgtgagcatctagctgcactgatttgttgttcaggaacaggaaatgaaaccccgcagctttgaacacaataacccacgccagcctcaggctcatgaatattcagcaggctgcttgcgccttgcaaccccgcctccgttcccctctgcggagactgcgtatgcgtcgccggcgcgcggctgtgtcgtcatacttgcgcgccgacgccgccgctcgcttgtgaaactggaaggctgccatggctagcccagccgcctcctcggtgcgaccaccgaggcccaagaaagagccgcagacgctcgtcatccccaagaatgcggcggaggagcagaagctcaagctggagcggctcatgaagaacccggtgagacgaggcccaggctccacggcccgtccgaggcccacccccttcctctgcagcgcttcagggttcccgcaggtccaccttccccgcctccaaactcagaaactcagtatccgaccctccaagagcagtctttggggaggaggaggagaaggaggctgtcccggagatagtgaacttcccgtctgtccttgtgtgagagcccagcttgaatcaaagcacggtggagcggcttcccgtgctccaagaccccttctggtttaactttctgtgaacaaaaagcgttagactgaaaaggtagaatttgtgggttagcaaaagggtatactctaaacaacactgatcgttagagagacagtggccgagacgtttggagctggtcactcctctcccgctcacaccccctctgggcctcggtcccctcaatcataaaaacaattgaacgggaacgtcctttatacctttaactagaaaagcttgactcttcttatctagtagtgttaaagttggcggtttctagctggaaactatggcttaggtttttcagttctgctctggaaagcgtagccctgggaaggtgtggactgtgttatacccaagagtacataggatgaaaaaagccacgacagagggaagaacacaaaatcagctctgtgtccaagtagcaaagcagtcctgcttcattagtcaattaaaattctttggtcttaagagatgtaacttgggctgggtgctgtggcccctgcctgtaatttcagcgctttgggaggccaggcgggaggatggtccgaggccaggaaggagttcaagaccagcctgggcaacatagtgggtccctgtctttacaaaaataaaaaaattgcctggtgtggtggtgt

SEQ ID NO: 17207 - protein, 154 aa, Homo sapiens [sequence omitted]

SEQ ID NO: 17208 - DNA, 769 bp, Homo sapiens
ctgccctggcttcctgcgcctcttcaggtcatcgcttgctctcgttcccaggctttggcctctagtggacgagaatcaccgagtctgcggggctggacgctgactgcccgggccagcacctaggcgggcgggagctgtgcggcccagggttcacgcgggccgggtagaggctcgagccgggacccccgagcgtgaaccccggagccggcggcgctggggccagaggggccgggcgggaggtggtggcggaggcgaaggggcgacgggacctgggcctggcccgtgtgtgtcctcggcggcctggcgccggccgtcgctgtacggtctatcagccacagtctctgcaagtttccaagagcagcagaaaatgaacacattgcaggggccagtgtcattcaaagatgtggctgtggatttcacccaggaggagtggcagcaactggaccctgatgagaagatagcatacggggatgtgatgttggagaactacagccatctagtttctgtggggtatgattatcaccaagccaaacatcatcatggagtggaggtgaaggaagtggagcagggagaggagccgtggataatggaaggtgaatttccatgtcaacatagtccagctttcacagcattgaaaagatcattggctggtggctctgactgtttccggctatgacgatgtaccactcgggaccctttctctggatgtttgccatctaatatgtataaaaagatcagaaatatgaaaaaaaggtaacaatgacattaa

SEQ ID NO: 17209 - protein, 102 aa, Homo sapiens; identical to SEQ ID NO: 17203

SEQ ID NO: 17210 - DNA, 970 bp, Homo sapiens
ctgccctggcttcctgcgcctcttcaggtcatcgcttgctctcgttcccaggctttggcctctagtggacgagaatcaccgagtctgcggggctggacgctgactgcccgggccagcacctaggcgggcgggagctgtgcggcccagggttcacgcgggccgggtagaggctcgagccgggacccccgagcgtgaaccccggagccggcggcgctggggccagaggggccgggcgggaggtggtggcggaggcgaaggggcgacgggacctgggcctggcccgtgtgtgtcctcggcggcctggcgccggccgtcgctgtacggtgagccccagggaggcggatctgggccccgagaaggacccccgcctggatttgccccgtaggcccggcccgggcccctcgggagcagaacagctttggtgaggtggacaggaggtgacctcgcgagcagacgcgcgcgccagcgacagcagcccgccccggcctctcgggagccgtggggcagaggctgcggagccccaggagggccggagccctcatgacttcagtgacctgcttctgcccctctaggtctatcagccacagtctctgcaagtttccaagagcagcagaaaatgaacacattgcaggggccagtgtcattcaaagatgtggctgtggatttcacccaggaggagtggcagcaactggaccctgatgagaagatagcatacggggatgtgatgttggagaactacagccatctagtttctgtggggtatgattatcaccaagccaaacatcatcatggagtggaggtgaaggaagtggagcagggagaggagccgtggataatggaaggtgaatttccatgtcaacatagtccaggttcaagtgctggggccggcagtggagagttccacgtgtacagacatctgcgccggagagaatatcagcgacaggactacatggatgccatggctgagaag

SEQ ID NO: 17211 - protein, 117 aa, Homo sapiens
MNTLQGPVSFKDVAVDFTQEEWQQLDPDEKIAYGDVMLENYSHLVSVGYDYHQAKHHHGVEVKEVEQGEEPWIMEGEFPCQHSPGSSAGAGSGEFHVYRHLRRREYQRQDYMDAMAE

SEQ ID NO: 17212 - DNA, 1664 bp, Homo sapiens
gagagaatgggctcaaaaaaagaaataaaaggctgggcatggtggctcgcacctgtaatcccagcactttggaaggccgagacgggcggatcatgaggtcaagagatcaagaccatcctggccaaaatggtgaaaccccgtctctgctaaaaatacaaaaattagttgggtgtggtgcatgcacctgtaatccaagctactcagcctccccaagtgctgggatcaaaggtgtgagccactgtgcccagcccctacataaatttcaaacaccacattccctgaatacaacacaaaaaagttagaaatcaaataatgaaaatataactagcaaaattctgtatgtttgaaaattttaaatattttcccagaaactataaaactacatgttaatgtggataaatctcaaacaatcttaactgaaataattaaatcacagaagcctgaataatggattcatttacataattaaagaacacattcatagtggtaacactataatgaaagatgagaaagattaacacaaagttcaccctagtgtttacctatgggtaataaggggactgtgaggtagggtagaaagaaggtacacaaaggatctctacagcactattaatgtttcacttcttgagctggggctagagatctgggtaatcatttcatttttattttttaaactacatataagctttgtacacttttggatattagaacttcaataaaattataaaaaagagaaacagggaaaaaagtataattgtcaagatggagctaaaaaaataacatgggtgaacaaggtgccacccacatgcaagcttccttcccatgtcaggtaatgcctctcctcatctgctccatcaatcaataaaggcataatcactcctgtgatacctttaagaaaagaacacactctctcaaagctgggtgcagtggtgcacgcctgtaatcccagcctcctttgggaggccgaggcgggcagatcacctgaggtcaggagttggagaccagcgaaacccatctctactaaaaatacaaaaattagctgggcgtggtggtgcttgtctgtaatcccagctacttgggaggctgaggcatgagaatcgcttgaaaccaggaggcagaggctgcagtgagccgagactgtgccactgcactccagcctgggtgacagaaagagactctgtctcaaaaaaaaaaaaggaacatgctctctcattcaaggttacccttctatcactccaaggattcactccataatcttatctttcttgatatgttacattcactaaaacgttcacatcaaatcaagtttgtagacacttgtccttaccaccttacaaaaagtgagatggtatcaacagaggtgagacactgctttacctgcatgtcacttttggcagctttcacagcattgaaaagatcattggctggtggctctgactgtttccggctatgacgatgtaccactcgggaccctttctctggatgtttgccatctaatatgtataaaaagatcagaaatatgaaaaaaaggtaacaatgacattaacacttggtctcatcattatcacacaagtaggcttatgctgccacttccatggcagagtctgagttagtcctgaaataattgatttttatattatgaagtttattaacttttttccctt

SEQ ID NO: 17213 - protein, 87 aa, Homo sapiens
MVARTCNPSTLEGRDGRIMRSRDQDHPGQNGETPSLLKIQKLVGCGACTCNPSYSASPSAGIKGVSHCAQPLHKFQTPHSLNTTQKS

SEQ ID NO: 17214 - DNA, 959 bp, Homo sapiens
gccgaggcgggcagatcacctgaggtcaggagttggagaccagcgaaacccatctctactaaaaatacaaaaattagctgggcgtggtggtgcttgtctgtaatcccagctacttgggaggctgaggcatgagaatcgcttgaaaccaggaggcagaggctgcagtgagccgagactgtgccactgcactccagcctgggtgacagaaagagactctgtctcaaaaaaaaaaaaggaacatgctctctcattcaaggttacccttctatcactccaaggattcactccataatcttatctttcttgatatgttacattcactaaaacgttcacatcaaatcaagtttgtagacacttgtccttaccaccttacaaaaagtgagatggtatcaacagaggtgagacactgctttacctgcatgtcacttttggcagctttcacagcattgaaaagatcattggctggtggctctgactgtttccggctatgacgatgtaccactcgggaccctttctctggatgtttgccatctaatatgtataaaaagatcagaaatatgaaaaaaaggtaacaatgacattaacacttggtctcatcattatcacacaagtaggcttatgctgccacttccatggcagagtctgagttagtcctgaaataattgatttttatattatgaagtttattaacttttttcccttaaaaaaaaaaagtccttgagtccccttcctgtatccctatatcctaacgtccttttctcttcttttctcttcaaaatttctcttcttcctatttccgtcctgaaactgaataaaagtaatcatagattcatagattgttggcactctcaagcgctagcaatgtatatcctggcagaagccaaggtaaattctctccagaggcagttaatataatgctatattaaaaataaatatcaaggtttaaaggttaaaaaaaa

SEQ ID NO: 17215 - protein, 83 aa, Homo sapiens
MLSHSRLPFYHSKDSLHNLIFLDMLHSLKRSHQIKFVDTCPYHLTKSEMVSTEVRHCFTCMSLLAAFTALKRSLAGGSDCFRL

SEQ ID NO: 17216 - DNA, 1014 bp, Homo sapiens
ttttttttattttttgagacagagtctcaccttgtcacccaggctggagtacagtggtgcgatcatagctcactgcagccttgaactcctggactcaagcagtcctcccacctcagcctcctgaatagctgaatacaggcatgcgctaccatacctggctaattattattattgtttttgtagaaatggggtcttgctctatagcccaggctggtcttgaactcctgggctcaagccatcctcctgccctggcctcccaaagtgctgggattataggcatgagccacggtgcccagcctttgtcttagtttttggtccccctcacccgaccccagagttctagaaccattcccttgcaaagaaagggactgctcacggctggggatggagaagtgctgtggtaggagccctttcttctctttcttccccagctggattgccaaacctaccctgcggtcctcgtcttcctggccccatagctcctcctcaccaagcatgtcttccccactgcagagagctgcgggaggtaccaagagggccttgtctgcatcttctagttcctctgccagtctacccttcgatgacagggactcaaaccatccctcagaggctgatgaaggcaatgactttgaagacagcttgaatcacagtgtgaagaagaaagcagcaaaacgaccaccaaaagcaacaccggtgaatggcaaacatccagagaaagggtcccgagtggtacatcgtcatagccggaaacagtcagagccaccagccaatgatcttttcaatgctgtgaaagctgccaaaagtgacatgcaggtaaagcagtgtctcacctctgttgataccatctcactttttgtaaggtggtaaggacaagtgtctacaaacttgatttgatgtgaacgttttagtgaatgtaacatatcaagaaagataagattatggagtgaatccttggagtgatagaagggtaaccttgaatgagagagcatgttccttttttttttttgagacaga

SEQ ID NO: 17217 - protein, 160 aa, Homo sapiens
MEKCCGRSPFFSFFPSWIAKPTLRSSSSWPHSSSSPSMSSPLQRAAGGTKRALSASSSSSASLPFDDRDSNHPSEADEGNDFEDSLNHSVKKKAAKRPPKATPVNGKHPEKGSRVVHRHSRKQSEPPANDLFNAVKAAKSDMQVKQCLTSVDTISLFVRW

SEQ ID NO: 17218 - DNA, 549 bp, Homo sapiens
aaaaagctaatgtcatacagatctgctttatcccctggctgttttaattggctttctctgaatcatttctgtttctgtcagtgctgctgtggtgtacccgattatatcaatgttacacacttgaattgatatgacatgtggctgatgtttcatgggtgaaatttaactctaggtccatattactctcccatttatggatgagtgatggatgacttcctgggccatgattgtttttctctacaaagagcagtgatctctctacccgctaagtgagtagcatttgattctcttcttcggagagaatactaggaagggttgtccttcccgtgcctcatttcctcattcttcgtctccactgctttcatgtgaaagttttcctttaagactttgtcctggccgggtgtggtggcttacgcctgtaatcccaacactttgggaggccaaggcaggagaatcacttgaacctgggaggtggaggttgcagtgagccgtgatcacaccattgcactccagcctgggtgacaggagtgaaactctgtctcaaaaaaa

SEQ ID NO: 17219 - protein, 39 aa, Homo sapiens
MSYRSALSPGCFNWLSLNHFCFCQCCCGVPDYINVTHLN

SEQ ID NO: 17220 - DNA, 969 bp, Homo sapiens
cgcggctgtgtcgtcatacttgcgcgccgacgccgccgctcgcttgtgaaactggaaggctgccatggctagcccagccgcctcctcggtgcgaccaccgaggcccaagaaagagccgcagacgctcgtcatccccaagaatgcggcggaggagcagaagctcaagctggagcggctcatgaagaacccggacaaagcagttccaattccagagaaaatgagtgaatgggcacctcgacctcccccagaatttgtccgagatgtcatgggttcaagtgctggggccggcagtggagagttccacgtgtacagacatctgcgccggagagaatatcagcgacaggactacatggatgccatggctgagaagcaaaaattggatgcagagtttcagaaaagactggaaaagaataaaattgctgcagaggagcagaccgcaaagcgccggaagaagcgccagaagttaaaagagaagaaattactggcaaagaagatgaaacttgaacagaagaaacaagaaggacccggtcagcccaaggagcaggggtccagcagctctgcggaggcatctggaacagaggaggaggaggaagtgcccagtttcaccatggggcgatgacaatgtttgccacagcctctgcctggaacctggctcgtgctgtgaccagaagggaaaggcggctgtttggctctttctcccccgcaaggacccgctgacccgctggatggagagcaaaggagacccctcccgagccgctcacagtcctgtatttggcaggtttgggagcctgaggggccatctccctgacactcagaggcactgccttgcagacaccatccgtgctcctggtaaagggggacagagagcctcaccttgccacatatttgaacagtgatgagtttggggctggtttctgggaagggaacgtttatttagtaaagagcagaacacccttgcgttttgttggg

SEQ ID NO: 17221 - protein, 184 aa, Homo sapiens; identical to SEQ ID NO: 2050

SEQ ID NO: 17222 - DNA, 747 bp, Homo sapiens
gccgccgctcgcttgtgaaactggaaggctgccatggctagcccagccgcctcctcggtgcgaccaccgaggcccaagaaagagccgcagacgctcgtcatccccaagaatgcggcggaggagcagaagctcaagctggagcggctcatgaagaacccggacaaagcagttccaattccagagaaaatgagtgaatgggcacctcgacctcccccagaatttgtccgagatgtcatgggttcaagtgctggggccggcagtggagagttccacgtgtacagacatctgcgccggagagaatatcagcgacaggactacatggatgccatggctgagaagcaaaaattggatgcagagtttcagaaaagactggaaaagaataaaattgctgcagaggagcagaccgcaaagcgccggaagaagcgccagaagttaaaagagaagaaattactggcaaagaagatgaaacttgaacagaagaaacaagaagggtgtctcgtggcatcctagtgtctaccctcccgaggccaggagcacccaccttcccccagtcatcagcaattggatgtctccagacacgaccagatgcaccccagtgggggaggaggacggaattgttcctgtctgagagctcctgatctaggggcaggtatccagtgtccagaaggcactcagcatgtgtttggatcaaactgtttctttcagagccaaaatccttcaacataatatgttggaaaactacccacg

SEQ ID NO: 17223 - protein, 158 aa, Homo sapiens
MASPAASSVRPPRPKKEPQTLVIPKNAAEEQKLKLERLMKNPDKAVPIPEKMSEWAPRPPPEFVRDVMGSSAGAGSGEFHVYRHLRRREYQRQDYMDAMAEKQKLDAEFQKRLEKNKIAAEEQTAKRRKKRQKLKEKKLLAKKMKLEQKKQEGCLVAS

SEQ ID NO: 17224 - DNA, 2802 bp, Homo sapiens
cctcctgagtatcagcctcccaaagtactgggattacaggcatgagccattgtgcccaaacccttatttcattattgttcctaacagctctgggagagaggaattacaattttccccattttatagatgagtagactgaggcttggagacagaactgctgagaagaagtaatgcagtacttacaaatatctgtgtgggtgtgggtgtgtgcttagcagcaggtcatggcagcagatggcgtgtgttacgctgctttagaatcagtcatttggtggctgggcacagtggcctgtaatctcagcactttgggaggctgaggtgggaggatcctttcaggccaggaatttaaaaccagcctggacaacatagccagacctgtctctacaaaataaacataaaaattagccagatgtaatggcatgcacccatagtcccaagtactcaggagactgagacaggacgatctatcaagcccaggagttcaaggttgtagtgagctattgtgccactgcactccagcctaggcgacagagtaagaccttgtctcaaaacaaaaacaaaaaaactcagccatttggtaactatggttgggcttagggcttgaaaattccatggttctgaccctccggccattcattctgatgagctctgggcagtatccaaggccccggctgagcagatggtgagcgctgccctcagagtgtcctctgcactccctcctgtattgtctcctatattgtgctatgcatgagtggtgcctcagtcaactaaaagagttacttcgccatcggagacctatgtattgattacctgccctgcctctgggacagccttttaaagttaaaatggccctggggacccgggtagtgcctccgtcacccccagtggtgtgacttctagaactctcctactttgcctgagcaaaacctcccacagtctgcccagaccagagcgtgtctaaatgatgtgggttttgttgcagcaaaaattggatgcagagtttcagaaaagactggaaaagaataaaattgctgcagaggagcagaccgcaaagcgccggaagaagcgccagaagttaaaagagaagaaattactggcaaagaagatgaaacttgaacagaagaaacaagaaggacccggtcagcccaaggagcaggggtccagcagctctgcggaggcatctggaacagaggaggaggaggaagtgcccagtttcaccatggggcgatgacaatgtttgccacagcctctgcctggaacctggctcgtgctgtgaccagaagggaaaggcggctgtttggctctttctcccccgcaaggacccgctgacccgctggatggagagcaaaggagacccctcccgagccgctcacagtcctgtatttggcaggtttgggagcctgaggggccatctccctgacactcagaggcactgccttgcagacaccatccgtgctcctggtaaagggggacagagagcctcaccttgccacatatttgaacagtgatgagtttggggctggtttctgggaagggaacgtttatttagtaaagagcagaacacccttgcgttttgttgggacatgtggaccgtgagtcgcaaacactctggagaaggctgagatgccaccattcccacggggactgaagacacattacgtggacctggtcccaggctcagtgaggagatggcctcagctgtggggctggtccatgttgcccactcactccagtgggaagtggggaccacgccatagagggtctgctcccactgcagctcccggtgctctcgtgttctgggaaggcctgggtgtgtgcacaaggaggcccgggccagggacttcaccaggggctgggtcacaagggcacagggtgtgtggaaagcgctgtgggggaagagccggtcaccggagagtgagcaggcggagactccaagctgggctgagccagagcagaaggcgagggattcccagccggacgggggttctctcaccaacagctgtgatttcatcccgaagtggaagggggtctaaacagaacaggctgagagaggcgggactgggtcaagtgggtggagctcctccttgcatgactgcaactgtcggggctttccgccggctcacagcagttggggccagcggggagaagagaggcggaactgctgtgtcctcatgtggcgcagcctcaaactggcatccaggcactgggcccatgcagagaaggcacctgcagagagcagggcagcccggcgcaggggcatgcgcctagaatcccagctactcggaaggccaaggcaggaggaccgcttgagtccagggattcaaggccaacctgggcaatagagcgagaccctgtctcttaaaaaacgatgatgatgaacacagaggacggggcactgtgctgggagccagggggcctgggaggagccgagaccagccttttacctcggggttttgaggccaacagggacgacagagacagtttctagttagagccttggctccatttttggatgatttagccccgagttcctgagtctattttatgccccttacgtactttgatagaactaaggaaatagtggttttgagtgaagggaaaggaaacccagaaacattttacgttgcttttacttctgtagtgtagattgccccggcccctctctgagccctgtagcatctgtgatagcttctgtcccttcatcggttcatgtcacagggattttctttcccaggaagcggacacggagagtcagccctaataaatgagcacatgccctggctgtacattttgaaacctgtt

SEQ ID NO: 17225 - protein, 89 aa, Homo sapiens
MMWVLLQQKLDAEFQKRLEKNKIAAEEQTAKRRKKRQKLKEKKLLAKKMKLEQKKQEGPGQPKEQGSSSSAEASGTEEEEEVPSFTMGR

SEQ ID NO: 17226 - DNA, 1064 bp, Homo sapiens
caggaagtgcagcacatgaataattcacagacagacaagatgggttcctatcagcccggcggtgccagacggtcccttggagtccttcctccatgccggcctgttctgtttagacccccttccacttcgggatgaaatcacagctgttggtgagagaacccccgtccggctgggaatccctcgccttctgctctggctcagcccagcttggagtctccgcctgctcactctccggtgaccggctcttcccccacagcgctttccacacaccctgtgcccttgtgacccagcccctggtgaagtccctggcccgggcctccttgtgcacacacccaggccttcccagaacacgagagcaccgggagctgcagtgggagcagaccctctatggcgtggtccccacttcccactggagtgagtgggcaacatggaccagccccacagctgaggccatctcctcactgagcctgggaccaggtccacgtaatgtgtcttcagtccccgtgggaatggtggcatctcagccttctccagagtgtttgcgactcacggtccacatgtcccaacaaaacgcaagggtgttctgctctttactaaataaacgttcccttcccagaaaccagccccaaactcatcactgttcaaatatgtggcaaggtgaggctctctgtccccctttaccaggagcacggatggtgtctgcaaggcagtgcctctgagtgtcagggagatggcccctcaggctcccaaacctgccaaatacaggactgtgagcggctcgggaggggtctcctttgctctccatccagcgggtcagcgggtccttgcgggggagaaagagccaaacagccgcctttcccttctggtcacagcacgagccaggttccaggcagaggctgtggcaaacattgtcatcgccccatggtgaaactgggcacttcctcctcctcctctgttccagatgcctccgcagagctgctggacccctgctccttgggctgaccgggtcctgtaaccacacgacattcaaattacagacatgcaaaatcgttcagggtcaaggg

SEQ ID NO: 17227 - protein, 39 aa, Homo sapiens
MNNSQTDKMGSYQPGGARRSLGVLPPCRPVLFRPPSTSG

SEQ ID NO: 17228 - DNA, 987 bp, Homo sapiens
aggacccggtcagcccaaggagcaggggtccagcagctctgcggaggcatctggaacagaggaggaggaggaagtgcccagtttcaccatggggcgatgacaatgtttgccacagcctctgcctggaacctggctcgtgctgtgaccagaagggaaaggcggctgtttggctctttctcccccgcaaggacccgctgacccgctggatggagagcaaaggagacccctcccgagccgctcacagtcctgtatttggcaggtttgggagcctgaggggccatctccctgacactcagaggcactgccttgcagacaccatccgtgctcctggtaaagggggacagagagcctcaccttgccacatatttgaacagtgatgagtttggggctggtttctgggaagggaacgtttatttagtaaagagcagaacacccttgcgttttgttgggacatgtggaccgtgagtcgcaaacactctggagaaggctgagatgccaccattcccacggggactgaagacacattacgtggacctggtcccaggctcagtgaggagatggcctcagctgtggggctggtccatgttgcccactcactccagtgggaagtggggaccacgccatagagggtctgctcccactgcagctcccggtgctctcgtgttctgggaaggcctgggtgtgtgcacaaggaggcccgggccagggacttcaccaggggctgggtcacaagggcacagggtgtgtggaaagcgctgtgggggaagagccggtcaccggagagtgagcaggcggagactccaagctgggctgagccagagcagaaggcgagggattcccagccggacgggggttctctcaccaacagctccctgtagcatctgtgatagcttctgtcccttcatcggttcatgtcacagggattttctttcccaggaagcggacacggagagtcagccctaataaatgagcacatgccctggctgt

SEQ ID NO: 17229 - protein, 156 aa, Homo sapiens
MPPFPRGLKTHYVDLVPGSVRRWPQLWGWSMLPTHSSGKWGPRHRGSAPTAAPGALVFWEGLGVCTRRPGPGTSPGAGSQGHRVCGKRCGGRAGHRRVSRRRLQAGLSQSRRRGIPSRTGVLSPTAPCSICDSFCPFIGSCHRDFLSQEADTESQP

SEQ ID NO: 17230 - DNA, 1494 bp, Homo sapiens
agcccaaggagcaggggtccagcagctctgcggaggcatctggaacagaggaggaggaggaagtgcccagtttcaccatggggcgatgacaatgtttgccacagcctctgcctggaacctggctcgtgctgtgaccagaagggaaaggcggctgtttggctctttctcccccgcaaggacccgctgacccgctggatggagagcaaaggagacccctcccgagccgctcacagtcctgtatttggcaggtttgggagcctgaggggccatctccctgacactcagaggcactgccttgcagacaccatccgtgctcctggtaaagggggacagagagcctcaccttgccacatatttgaacagtgatgagtttggggctggtttctgggaagggaacgtttatttagtaaagagcagaacacccttgcgttttgttgggacatgtggaccgtgagtcgcaaacactctggagaaggctgagatgccaccattcccacggggactgaagacacattacgtggacctggtcccaggctcagtgaggagatggcctcagctgtggggctggtccatgttgcccactcactccagtgggaagtggggaccacgccatagagggtctgctcccactgcagctcccggtgctctcgtgttctgggaaggcctgggtgtgtgcacaaggaggcccgggccagggacttcaccaggggctgggtcacaagggcacagggtgtgtggaaagcgctgtgggggaagagccggtcaccggagagtgagcaggcggagactccaagctgggctgagccagagcagaaggcgagggattcccagccggacgggggttctctcaccaacagctgtgatttcatcccgaagtggaagggggtctaaacagaacaggctgagagaggcgggactgggtcaagtgggtggagctcctccttgcatgactgcaactgtcggggctttccgccggctcacagcagttggggccagcggggagaagagaggcggaactgctgtgtcctcatgtggcgcagcctcaaactggcatccaggcactgggcccatgcagagaaggcacctgcagagagcagggcaccagggggcctgggaggagccgagaccagccttttacctcggggttttgaggccaacagggacgacagagacagtttctagttagagccttggctccatttttggatgatttagccccgagttcctgagtctattttatgccccttacgtactttgatagaactaaggaaatagtggttttgagtgaagggaaaggaaacccagaaacattttacgttgcttttacttctgtagtgtagattgccccggcccctctctgagccctgtagcatctgtgatagcttctgtcccttcatcggttcatgtcacagggattttctttcccaggaagcggacacggagagtcagccctaataaatgagcacatgccctggctgtacattttgaaacctg

SEQ ID NO: 17231 - protein, 234 aa, Homo sapiens [sequence omitted]

SEQ ID NO: 17232 - DNA, 5642 bp, Homo sapiens
gcggaaggagggagggggccgcgctcggcgccccggccgggccactgggccacaggccacgcggccacgcagtccgagcgggagccgagccgggcggggcgagggcagctccgggaaggaacgtcccagggatggaagtgcttggatgcggtgctgctggctgcggatgtgcgcaaggagatgggatggagagcctgagttggcattcgtataaatgacctgcctggctcccaccatgagtgctgagcttaacgtgcctatcgacccctctgctcctgcctgccctgagcccggccataagggcatggattaccgggactgggtccgccgcagctacctggaactggtcacctctaaccaccactcggtacaggccctgtcgtggcggaagctctacctgagcagggccaagctgaaggcctccagcaggacctccgccctcctctccggctttgccatggtggccatggtggaggtgcagctggagacgcagtaccagtacccgcggccgctgctgattgccttcagcgcctgcaccacggtgctggtggccgtgcacctgttcgccctcctcatcagcacctgcatcctgcccaatgtggaggccgtgagcaacatccacaacctgaactccatcagcgagtccccgcatgagcgcatgcacccctacatcgagctggcctggggcttctccaccgtgcttggcatcctactcttcctggccgaggtggtgctgctctgctggatcaagttcctccccgtggatgcccggcgccagcctggccccccacctggccctgggagtcacacgggctggcaggccgccctggtgtccaccatcatcatggtgcccgtgggcctcatcttcgtggtcttcaccatccacttctaccgctccctggtgcgccacaaaacggagcgccacaaccgcgagatcgaggagctccacaagctcaaggtccagctggacgggcatgagcgcagcctgcaggtcttgtgaggggccgagggccggggctgggagcggccctgtgcccgggagtccgcagaggcggggatttgtcagatgcagacattttgcaaggctgccgggtagttcaagaccaaagttttcctcttgtcttaataccataaggactggatgacttctcctgagatagaaccgtttggttcaatgagggactgtgttgctaagagcgttgggggcaaagccaggctggttccttggcctcggggtttcctgggtcggggacacggtgaagaggctccagcgggacctgcccatcagtcctgggccaggaggggctccaagcagcacccagcggtccgggggagtctcagacccggcatgcgtggctggcagacctgggagagccagggcagggttttgcgttcagagaaggattgccccagagacccgtggtggacttcatgggtgctgagtggcccgtgtgacagtgatgacacgaaggcttcggcgtttgagtgggtgcaggtgcacgccagggcttggtgcttccctgcctggccctggagggagctgggtggcctggcttcaggggaagacaggagccaggacacacgtcagcccagcaggtgtggggggtgctgcagccctcggcagtggggtcaggccctgggggatgtttccaatggtgggcagcctggccaggccggagaagacatgttcacgggcatctatcagatgcccccttgaggaggctgagttatttgagggctgctgcaaagtacgctaggctcaaattctcttttcccagccagagccctggccacacggactcagaggggccaccggggtggggaaaggacccctcccccaccccccgcagccactggcctccagctctcggccacagaatggcctctaaggctgactcagccactcccttgggctgtggcagcaggaggcgggggctctggctcaggccccggagcctgtgcagcttgcccatggccctaggcagcgaggggacagcctgggggacttcctgcctaggcaaggtcattggccgggcctggcctgtggatagtggggccaggggccggcccaggccaaatgagtgccctccttgttatgacaccaagtgactacaagggaggcaagacccctccaggcctctcagccgacactgggtcccaccacacacagtgactgtgccgtgcagtgcaggttctggccttttccttgaaggcatctggtagacccgaagccacgctctcgggccgcacatgcacgccgcagcaccagctgccctgagctgcttgtacaaccaaacacctttcccctcttctccagctgtaacctggagagtcagccatgccttgtcttttgttctcataaatagtcactggggccgggcgcagtgactcacgcctgtaatcccagcactttgggaggcctaggtgggcggatcacttgaggtcaggagttcgagaccagcctggccaacatggtgaaaccctgtctctactaaaaaaatacagaaaattagctgggcgtggtggcgggcgcctgtagccccagctacttgggaggctgaggcgggagaatggcaatggcgtgaacccgggaggcagagcttgcagtgagctgagatggcgccactgcactccagcctgggcgacagagccagactccatctcaaaaaaaaaaaaaaaattagccgggcgtgatggcgggcacctgtagtcccagctactcaggaggctgaggcaagagaatcacttgaacccaggaggcagaggttgcagtgagctgagatcacgccattgcactacagcctgggcaacaagagcgaaactttgtctaaaaaaaaaaaaaaatcactgggcttcttcatgctctgatcacatctctcgtaaaagcttaagctctctccggggtccgggttggccgtgccgtggaattctgggtggcctggctggggtctctggaaatgtggctgcagcagagaacagagaccctgacatgcagttttccgtgctgaggggccctaggggagtcacaccaagggtccccacgagaaagttgtggcatccccgggggccggagaagagccccgtgtcttctgaggggttcgtcctttgtgtcccctgcagacatttgtctgcgacctttgccctccagcatgtatgtactttcctgcagcctgtagaaacgcctcttacggtttaatatgtgttcgctttgctaaagaatatcaacatcggccaggcgaggtggggcacgcctgtcatcccagcactttgggaggctgaggtgggaggatcacttgggcccaggggtgcaagaccagcctgggcaacatagcgagaccccatgtctaaaaaaattattttaaattagccaggccgggtgcaatggctcgcgcccgtaatcttagcactctgggaggccgaggcaggcagatcacttgagatcaggactttaagaccagcctcggcaacaacatggtgaaaccatctctagcaaaaatacaaaaaattagccgggtatggtggcgggtacctgtaatcccagctactcaggaggctgaggcaagagaatcgcttgaacgcaggaggcagaggttgcagtgagctgagatcgtgccactgcactccagcctggacaacagagcaaaactctgtctcaaaaaataataaataaaaataaattagctgggcgtggtggtgcatgcctgtagttccagctacttgggaggctgaggtgggaggattgcttgagcctgggaagtagaggctgcagtgaactataactgtgctagtggccgggcgcagtggctcacgcctataatcccagcactttgggaggccaaagcaggtggatcacttgaggtcaggagttcgagaccagcctggccaacatggtgaaactctgtgtctactaaaaatacaaaaaattagctgggtgtggtggcgctcgcctgtagtcccagctacttgggaggctgaggcaggagaatcacttgaacccagaaggcagaggtagcagtgagccaagatggtgccactgcactccagcctgggcgacagagggtgactcctcaaaaaaaagaaaaatagctaaaatatgattgtaccactgcactccagcctgggtgacagagtgagaccctgtctctaaaaaaaaaaaaaagaaaataaagaaaaaagaatgtcagcatgtcagcgttcctccaaggagtggctttgggtcaagaagacaggctggctctcctaaacaaacggctccccacggctgggagaggcagcaggcccttactctggcctgagtcttttgggaggggccctgctgggccttctcctgccacctaccttcctggaccatctgtgcccctgcccacgcagtaccacactccccagactgtggaacgcatctccagtgccatctgggggccagttactgtacctggtccccaggcagagctcttggcctggcagcatccaggcaggtattaagtgcccagtgatggtggcacatgggtggggacggagccacatccaagtctagccctctgattaggaggatgacagtcttggaatttcttgttctctttctcctagggttctcgttctcccagctccagcctttctagtttcgaggcatgaggcaaaccattgctgtgggaatagcagtgaccattggtagggccatggtggccgggagaggaaacctcagggtcaccccagagcctgtggggagacggagggtgagctgttgttggagctgcagaaacgccttgaagggcagcatgggcgatgaggaatgccattgcagcctagaaattcggtttctggaggtttagcctgattttgaagagtatttaagaacagagggctccagaccaggtgtggtggctcacatctgtaatcccagcactttgggaggcagaggtgggcggatcgcctgagatcaggagttcgagaccagcctggcccacatggtgaaaccctgtctctactaaaaatacaaaaattagccgggcgtagtgacacacgcctgtaatcccagctgctcgggaggcagaggcaggagaatggcgtgaacccgggaggcggaggttgcagtgagccgagatcacgccactgcactccagcctgggtaacagagcaagactctgtctcaaaaaaaaaaaaaaaagaacaggggcctctgcctcagtttgcccgggagccagccagggcccatcctaatttggagcacagtcttcctggtgcctagacatgccaaggcccctcccacgtggtacaccctctccgtttagtacctgaccacctgtttcaaaacgcaggtgtttctggtttagaaacttggaaggcggaatgtgttttcgtgtcttctaggaagggtctgctgaggaccagaccacgtaagcctgagtggatcctgactcagctgcagcccttacctgcctcgtgctgatgatctatgcatggcgttatgtagatcacgtgcggcagagacagccactgtcctgtgtgcgggtttttaaaacagctgccctggatgaaacggaataaaccagtgatgctattcaaagtctttctgttcttgggggatgctgtgggcagaggggataaattgcagcccctggccctcccgtggcatctgctgactg

SEQ ID NO: 17233 - protein, 261 aa, Homo sapiens
MTCLAPTMSAELNVPIDPSAPACPEPGHKGMDYRDWVRRSYLELVTSNHHSVQALSWRKLYLSRAKLKASSRTSALLSGFAMVAMVEVQLETQYQYPRPLLIAFSACTTVLVAVHLFALLISTCILPNVEAVSNIHNLNSISESPHERMHPYIELAWGFSTVLGILLFLAEVVLLCWIKFLPVDARRQPGPPPGPGSHTGWQAALVSTIIMVPVGLIFVVFTIHFYRSLVRHKTERHNREIEELHKLKVQLDGHERSLQVL

SEQ ID NO: 17234 - DNA, 5506 bp, Homo sapiens
gcgccccggccgggccactgggccacaggccacgcggccacgcagtccgagcgggagccgagccgggcggggcgagggcagctccgcctggctcccaccatgagtgctgagcttaacgtgcctatcgacccctctgctcctgcctgccctgagcccggccataagggcatggattaccgggactgggtccgccgcagctacctggaactggtcacctctaaccaccactcggtacaggccctgtcgtggcggaagctctacctgagcagggccaagctgaaggcctccagcaggacctccgccctcctctccggctttgccatggtggccatggtggaggtgcagctggagacgcagtaccagtacccgcggccgctgctgattgccttcagcgcctgcaccacggtgctggtggccgtgcacctgttcgccctcctcatcagcacctgcatcctgcccaatgtggaggccgtgagcaacatccacaacctgaactccatcagcgagtccccgcatgagcgcatgcacccctacatcgagctggcctggggcttctccaccgtgcttggcatcctactcttcctggccgaggtggtgctgctctgctggatcaagttcctccccgtggatgcccggcgccagcctggccccccacctggccctgggagtcacacgggctggcaggccgccctggtgtccaccatcatcatggtgcccgtgggcctcatcttcgtggtcttcaccatccacttctaccgctccctggtgcgccacaaaacggagcgccacaaccgcgagatcgaggagctccacaagctcaaggtccagctggacgggcatgagcgcagcctgcaggtcttgtgaggggccgagggccggggctgggagcggccctgtgcccgggagtccgcagaggcggggatttgtcagatgcagacattttgcaaggctgccgggtagttcaagaccaaagttttcctcttgtcttaataccataaggactggatgacttctcctgagatagaaccgtttggttcaatgagggactgtgttgctaagagcgttgggggcaaagccaggctggttccttggcctcggggtttcctgggtcggggacacggtgaagaggctccagcgggacctgcccatcagtcctgggccaggaggggctccaagcagcacccagcggtccgggggagtctcagacccggcatgcgtggctggcagacctgggagagccagggcagggttttgcgttcagagaaggattgccccagagacccgtggtggacttcatgggtgctgagtggcccgtgtgacagtgatgacacgaaggcttcggcgtttgagtgggtgcaggtgcacgccagggcttggtgcttccctgcctggccctggagggagctgggtggcctggcttcaggggaagacaggagccaggacacacgtcagcccagcaggtgtggggggtgctgcagccctcggcagtggggtcaggccctgggggatgtttccaatggtgggcagcctggccaggccggagaagacatgttcacgggcatctatcagatgcccccttgaggaggctgagttatttgagggctgctgcaaagtacgctaggctcaaattctcttttcccagccagagccctggccacacggactcagaggggccaccggggtggggaaaggacccctcccccaccccccgcagccactggcctccagctctcggccacagaatggcctctaaggctgactcagccactcccttgggctgtggcagcaggaggcgggggctctggctcaggccccggagcctgtgcagcttgcccatggccctaggcagcgaggggacagcctgggggacttcctgcctaggcaaggtcattggccgggcctggcctgtggatagtggggccaggggccggcccaggccaaatgagtgccctccttgttatgacaccaagtgactacaagggaggcaagacccctccaggcctctcagccgacactgggtcccaccacacacagtgactgtgccgtgcagtgcaggttctggccttttccttgaaggcatctggtagacccgaagccacgctctcgggccgcacatgcacgccgcagcaccagctgccctgagctgcttgtacaaccaaacacctttcccctcttctccagctgtaacctggagagtcagccatgccttgtcttttgttctcataaatagtcactggggccgggcgcagtgactcacgcctgtaatcccagcactttgggaggcctaggtgggcggatcacttgaggtcaggagttcgagaccagcctggccaacatggtgaaaccctgtctctactaaaaaaatacagaaaattagctgggcgtggtggcgggcgcctgtagccccagctacttgggaggctgaggcgggagaatggcaatggcgtgaacccgggaggcagagcttgcagtgagctgagatggcgccactgcactccagcctgggcgacagagccagactccatctcaaaaaaaaaaaaaaaattagccgggcgtgatggcgggcacctgtagtcccagctactcaggaggctgaggcaagagaatcacttgaacccaggaggcagaggttgcagtgagctgagatcacgccattgcactacagcctgggcaacaagagcgaaactttgtctaaaaaaaaaaaaaaatcactgggcttcttcatgctctgatcacatctctcgtaaaagcttaagctctctccggggtccgggttggccgtgccgtggaattctgggtggcctggctggggtctctggaaatgtggctgcagcagagaacagagaccctgacatgcagttttccgtgctgaggggccctaggggagtcacaccaagggtccccacgagaaagttgtggcatccccgggggccggagaagagccccgtgtcttctgaggggttcgtcctttgtgtcccctgcagacatttgtctgcgacctttgccctccagcatgtatgtactttcctgcagcctgtagaaacgcctcttacggtttaatatgtgttcgctttgctaaagaatatcaacatcggccaggcgaggtggggcacgcctgtcatcccagcactttgggaggctgaggtgggaggatcacttgggcccaggggtgcaagaccagcctgggcaacatagcgagaccccatgtctaaaaaaattattttaaattagccaggccgggtgcaatggctcgcgcccgtaatcttagcactctgggaggccgaggcaggcagatcacttgagatcaggactttaagaccagcctcggcaacaacatggtgaaaccatctctagcaaaaatacaaaaaattagccgggtatggtggcgggtacctgtaatcccagctactcaggaggctgaggcaagagaatcgcttgaacgcaggaggcagaggttgcagtgagctgagatcgtgccactgcactccagcctggacaacagagcaaaactctgtctcaaaaaataataaataaaaataaattagctgggcgtggtggtgcatgcctgtagttccagctacttgggaggctgaggtgggaggattgcttgagcctgggaagtagaggctgcagtgaactataactgtgctagtggccgggcgcagtggctcacgcctataatcccagcactttgggaggccaaagcaggtggatcacttgaggtcaggagttcgagaccagcctggccaacatggtgaaactctgtgtctactaaaaatacaaaaaattagctgggtgtggtggcgctcgcctgtagtcccagctacttgggaggctgaggcaggagaatcacttgaacccagaaggcagaggtagcagtgagccaagatggtgccactgcactccagcctgggcgacagagggtgactcctcaaaaaaaagaaaaatagctaaaatatgattgtaccactgcactccagcctgggtgacagagtgagaccctgtctctaaaaaaaaaaaaaagaaaataaagaaaaaagaatgtcagcatgtcagcgttcctccaaggagtggctttgggtcaagaagacaggctggctctcctaaacaaacggctccccacggctgggagaggcagcaggcccttactctggcctgagtcttttgggaggggccctgctgggccttctcctgccacctaccttcctggaccatctgtgcccctgcccacgcagtaccacactccccagactgtggaacgcatctccagtgccatctgggggccagttactgtacctggtccccaggcagagctcttggcctggcagcatccaggcaggtattaagtgcccagtgatggtggcacatgggtggggacggagccacatccaagtctagccctctgattaggaggatgacagtcttggaatttcttgttctctttctcctagggttctcgttctcccagctccagcctttctagtttcgaggcatgaggcaaaccattgctgtgggaatagcagtgaccattggtagggccatggtggccgggagaggaaacctcagggtcaccccagagcctgtggggagacggagggtgagctgttgttggagctgcagaaacgccttgaagggcagcatgggcgatgaggaatgccattgcagcctagaaattcggtttctggaggtttagcctgattttgaagagtatttaagaacagagggctccagaccaggtgtggtggctcacatctgtaatcccagcactttgggaggcagaggtgggcggatcgcctgagatcaggagttcgagaccagcctggcccacatggtgaaaccctgtctctactaaaaatacaaaaattagccgggcgtagtgacacacgcctgtaatcccagctgctcgggaggcagaggcaggagaatggcgtgaacccgggaggcggaggttgcagtgagccgagatcacgccactgcactccagcctgggtaacagagcaagactctgtctcaaaaaaaaaaaaaaaagaacaggggcctctgcctcagtttgcccgggagccagccagggcccatcctaatttggagcacagtcttcctggtgcctagacatgccaaggcccctcccacgtggtacaccctctccgtttagtacctgaccacctgtttcaaaacgcaggtgtttctggtttagaaacttggaaggcggaatgtgttttcgtgtcttctaggaagggtctgctgaggaccagaccacgtaagcctgagtggatcctgactcagctgcagcccttacctgcctcgtgctgatgatctatgcatggcgttatgtagatcacgtgcggcagagacagccactgtcctgtgtgcgggtttttaaaacagctgccctggatgaaacggaataaaccagtgatgctattcaaagtctttctgttcttgggggatgctgtgggcagaggggataaattgcagcccctggccctcccgtggcatctgctgactg

SEQ ID NO: 17235 - protein, 254 aa, Homo sapiens; identical to SEQ ID NO: 2052

SEQ ID NO: 17236 - DNA, 5614 bp, Homo sapiens
cagtccgagcgggagccgagccgggcggggcgagggcagctccgctaacctacggattgcagcgtttctctgaattctccccaagggaaggaacgtcccagggatggaagtgcttggatgcggtgctgctggctgcggatgtgcgcaaggagatgggatggagagcctgagttggcattcgtataaatgacctgcctggctcccaccatgagtgctgagcttaacgtgcctatcgacccctctgctcctgcctgccctgagcccggccataagggcatggattaccgggactgggtccgccgcagctacctggaactggtcacctctaaccaccactcggtacaggccctgtcgtggcggaagctctacctgagcagggccaagctgaaggcctccagcaggacctccgccctcctctccggctttgccatggtggccatggtggaggtgcagctggagacgcagtaccagtacccgcggccgctgctgattgccttcagcgcctgcaccacggtgctggtggccgtgcacctgttcgccctcctcatcagcacctgcatcctgcccaatgtggaggccgtgagcaacatccacaacctgaactccatcagcgagtccccgcatgagcgcatgcacccctacatcgagctggcctggggcttctccaccgtgcttggcatcctactcttcctggccgaggtggtgctgctctgctggatcaagttcctccccgtggatgcccggcgccagcctggccccccacctggccctgggagtcacacgggctggcaggccgccctggtgtccaccatcatcatggtgcccgtgggcctcatcttcgtggtcttcaccatccacttctaccgctccctggtgcgccacaaaacggagcgccacaaccgcgagatcgaggagctccacaagctcaaggtccagctggacgggcatgagcgcagcctgcaggtcttgtgaggggccgagggccggggctgggagcggccctgtgcccgggagtccgcagaggcggggatttgtcagatgcagacattttgcaaggctgccgggtagttcaagaccaaagttttcctcttgtcttaataccataaggactggatgacttctcctgagatagaaccgtttggttcaatgagggactgtgttgctaagagcgttgggggcaaagccaggctggttccttggcctcggggtttcctgggtcggggacacggtgaagaggctccagcgggacctgcccatcagtcctgggccaggaggggctccaagcagcacccagcggtccgggggagtctcagacccggcatgcgtggctggcagacctgggagagccagggcagggttttgcgttcagagaaggattgccccagagacccgtggtggacttcatgggtgctgagtggcccgtgtgacagtgatgacacgaaggcttcggcgtttgagtgggtgcaggtgcacgccagggcttggtgcttccctgcctggccctggagggagctgggtggcctggcttcaggggaagacaggagccaggacacacgtcagcccagcaggtgtggggggtgctgcagccctcggcagtggggtcaggccctgggggatgtttccaatggtgggcagcctggccaggccggagaagacatgttcacgggcatctatcagatgcccccttgaggaggctgagttatttgagggctgctgcaaagtacgctaggctcaaattctcttttcccagccagagccctggccacacggactcagaggggccaccggggtggggaaaggacccctcccccaccccccgcagccactggcctccagctctcggccacagaatggcctctaaggctgactcagccactcccttgggctgtggcagcaggaggcgggggctctggctcaggccccggagcctgtgcagcttgcccatggccctaggcagcgaggggacagcctgggggacttcctgcctaggcaaggtcattggccgggcctggcctgtggatagtggggccaggggccggcccaggccaaatgagtgccctccttgttatgacaccaagtgactacaagggaggcaagacccctccaggcctctcagccgacactgggtcccaccacacacagtgactgtgccgtgcagtgcaggttctggccttttccttgaaggcatctggtagacccgaagccacgctctcgggccgcacatgcacgccgcagcaccagctgccctgagctgcttgtacaaccaaacacctttcccctcttctccagctgtaacctggagagtcagccatgccttgtcttttgttctcataaatagtcactggggccgggcgcagtgactcacgcctgtaatcccagcactttgggaggcctaggtgggcggatcacttgaggtcaggagttcgagaccagcctggccaacatggtgaaaccctgtctctactaaaaaaatacagaaaattagctgggcgtggtggcgggcgcctgtagccccagctacttgggaggctgaggcgggagaatggcaatggcgtgaacccgggaggcagagcttgcagtgagctgagatggcgccactgcactccagcctgggcgacagagccagactccatctcaaaaaaaaaaaaaaaattagccgggcgtgatggcgggcacctgtagtcccagctactcaggaggctgaggcaagagaatcacttgaacccaggaggcagaggttgcagtgagctgagatcacgccattgcactacagcctgggcaacaagagcgaaactttgtctaaaaaaaaaaaaaaatcactgggcttcttcatgctctgatcacatctctcgtaaaagcttaagctctctccggggtccgggttggccgtgccgtggaattctgggtggcctggctggggtctctggaaatgtggctgcagcagagaacagagaccctgacatgcagttttccgtgctgaggggccctaggggagtcacaccaagggtccccacgagaaagttgtggcatccccgggggccggagaagagccccgtgtcttctgaggggttcgtcctttgtgtcccctgcagacatttgtctgcgacctttgccctccagcatgtatgtactttcctgcagcctgtagaaacgcctcttacggtttaatatgtgttcgctttgctaaagaatatcaacatcggccaggcgaggtggggcacgcctgtcatcccagcactttgggaggctgaggtgggaggatcacttgggcccaggggtgcaagaccagcctgggcaacatagcgagaccccatgtctaaaaaaattattttaaattagccaggccgggtgcaatggctcgcgcccgtaatcttagcactctgggaggccgaggcaggcagatcacttgagatcaggactttaagaccagcctcggcaacaacatggtgaaaccatctctagcaaaaatacaaaaaattagccgggtatggtggcgggtacctgtaatcccagctactcaggaggctgaggcaagagaatcgcttgaacgcaggaggcagaggttgcagtgagctgagatcgtgccactgcactccagcctggacaacagagcaaaactctgtctcaaaaaataataaataaaaataaattagctgggcgtggtggtgcatgcctgtagttccagctacttgggaggctgaggtgggaggattgcttgagcctgggaagtagaggctgcagtgaactataactgtgctagtggccgggcgcagtggctcacgcctataatcccagcactttgggaggccaaagcaggtggatcacttgaggtcaggagttcgagaccagcctggccaacatggtgaaactctgtgtctactaaaaatacaaaaaattagctgggtgtggtggcgctcgcctgtagtcccagctacttgggaggctgaggcaggagaatcacttgaacccagaaggcagaggtagcagtgagccaagatggtgccactgcactccagcctgggcgacagagggtgactcctcaaaaaaaagaaaaatagctaaaatatgattgtaccactgcactccagcctgggtgacagagtgagaccctgtctctaaaaaaaaaaaaaagaaaataaagaaaaaagaatgtcagcatgtcagcgttcctccaaggagtggctttgggtcaagaagacaggctggctctcctaaacaaacggctccccacggctgggagaggcagcaggcccttactctggcctgagtcttttgggaggggccctgctgggccttctcctgccacctaccttcctggaccatctgtgcccctgcccacgcagtaccacactccccagactgtggaacgcatctccagtgccatctgggggccagttactgtacctggtccccaggcagagctcttggcctggcagcatccaggcaggtattaagtgcccagtgatggtggcacatgggtggggacggagccacatccaagtctagccctctgattaggaggatgacagtcttggaatttcttgttctctttctcctagggttctcgttctcccagctccagcctttctagtttcgaggcatgaggcaaaccattgctgtgggaatagcagtgaccattggtagggccatggtggccgggagaggaaacctcagggtcaccccagagcctgtggggagacggagggtgagctgttgttggagctgcagaaacgccttgaagggcagcatgggcgatgaggaatgccattgcagcctagaaattcggtttctggaggtttagcctgattttgaagagtatttaagaacagagggctccagaccaggtgtggtggctcacatctgtaatcccagcactttgggaggcagaggtgggcggatcgcctgagatcaggagttcgagaccagcctggcccacatggtgaaaccctgtctctactaaaaatacaaaaattagccgggcgtagtgacacacgcctgtaatcccagctgctcgggaggcagaggcaggagaatggcgtgaacccgggaggcggaggttgcagtgagccgagatcacgccactgcactccagcctgggtaacagagcaagactctgtctcaaaaaaaaaaaaaaaagaacaggggcctctgcctcagtttgcccgggagccagccagggcccatcctaatttggagcacagtcttcctggtgcctagacatgccaaggcccctcccacgtggtacaccctctccgtttagtacctgaccacctgtttcaaaacgcaggtgtttctggtttagaaacttggaaggcggaatgtgttttcgtgtcttctaggaagggtctgctgaggaccagaccacgtaagcctgagtggatcctgactcagctgcagcccttacctgcctcgtgctgatgatctatgcatggcgttatgtagatcacgtgcggcagagacagccactgtcctgtgtgcgggtttttaaaacagctgccctggatgaaacggaataaaccagtgatgctattcaaagtctttctgttcttgggggatgctgtgggcagaggggataaattgcagcccctggccctcccgtggcatctgctgactg

SEQ ID NO: 17237 - protein, 261 aa, Homo sapiens; identical to SEQ ID NO: 17233

SEQ ID NO: 17238 - DNA, 2383 bp, Homo sapiens
acaagagcgaaactttgtctaaaaaaaaaaaaaaatcactgggcttcttcatgctctgatcacatctctcgtaaaagcttaagctctctccggggtccgggttggccgtgccgtggaattctgggtggcctggctggggtctctggaaatgtggctgcagcagagaacagagaccctgacatgcagttttccgtgctgaggggccctaggggagtcacaccaagggtccccacgagaaagttgtggcatccccgggggccggagaagagccccgtgtcttctgaggggttcgtcctttgtgtcccctgcagacatttgtctgcgacctttgccctccagcatgtatgtactttcctgcagcctgtagaaacgcctcttacggtttaatatgtgttcgctttgctaaagaatatcaacatcggccaggcgaggtggggcacgcctgtcatcccagcactttgggaggctgaggtgggaggattgcttgagcctgggaagtagaggctgcagtgaactataactgtgctagtggccgggcgcagtggctcacgcctataatcccagcactttgggaggccaaagcaggtggatcacttgaggtcaggagttcgagaccagcctggccaacatggtgaaactctgtgtctactaaaaatacaaaaaattagctgggtgtggtggcgctcgcctgtagtcccagctacttgggaggctgaggcaggagaatcacttgaacccagaaggcagaggtagcagtgagccaagatggtgccactgcactccagcctgggcgacagagggtgactcctcaaaaaaaagaaaaatagctaaaatatgattgtaccactgcactccagcctgggtgacagagtgagaccctgtctctaaaaaaaaaaaaaagaaaataaagaaaaaagaatgtcagcatgtcagcgttcctccaaggagtggctttgggtcaagaagacaggctggctctcctaaacaaacggctccccacggctgggagaggcagcaggcccttactctggcctgagtcttttgggaggggccctgctgggccttctcctgccacctaccttcctggaccatctgtgcccctgcccacgcagtaccacactccccagactgtggaacgcatctccagtgccatctgggggccagttactgtacctggtccccaggcagagctcttggcctggcagcatccaggcaggtattaagtgcccagtgatggtggcacatgggtggggacggagccacatccaagtctagccctctgattaggaggatgacagtcttggaatttcttgttctctttctcctagggttctcgttctcccagctccagcctttctagtttcgaggcatgaggcaaaccattgctgtgggaatagcagtgaccattggtagggccatggtggccgggagaggaaacctcagggtcaccccagagcctgtggggagacggagggtgagctgttgttggagctgcagaaacgccttgaagggcagcatgggcgatgaggaatgccattgcagcctagaaattcggtttctggaggtttagcctgattttgaagagtatttaagaacagagggctccagaccaggtgtggtggctcacatctgtaatcccagcactttgggaggcagaggtgggcggatcgcctgagatcaggagttcgagaccagcctggcccacatggtgaaaccctgtctctactaaaaatacaaaaattagccgggcgtagtgacacacgcctgtaatcccagctgctcgggaggcagaggcaggagaatggcgtgaacccgggaggcggaggttgcagtgagccgagatcacgccactgcactccagcctgggtaacagagcaagactctgtctcaaaaaaaaaaaaaaaagaacaggggcctctgcctcagtttgcccgggagccagccagggcccatcctaatttggagcacagtcttcctggtgcctagacatgccaaggcccctcccacgtggtacaccctctccgtttagtacctgaccacctgtttcaaaacgcaggtgtttctggtttagaaacttggaaggcggaatgtgttttcgtgtcttctaggaagggtctgctgaggaccagaccacgtaagcctgagtggatcctgactcagctgcagcccttacctgcctcgtgctgatgatctatgcatggcgttatgtagatcacgtgcggcagagacagccactgtcctgtgtgcgggtttttaaaacagctgccctggatgaaacggaataaaccagtgatgctattcaaagtctttctgttcttgggggatgctgtgggcagaggggataaattgcagcccctggccctcccgtggcatctgctgactg

SEQ ID NO: 17239 - protein, 98 aa, Homo sapiens [sequence omitted]

SEQ ID NO: 17240 - DNA, 1382 bp, Homo sapiens
gacatgcagttttccgtgctgaggggccctaggggagtcacaccaagggtccccacgagaaagttgtggcatccccgggggccggagaagagccccgtgtcttctgaggggttcgtcctttgtgtcccctgcagacatttgtctgcgacctttgccctccagcatgtatgtactttcctgcagcctgtagaaacgcctcttacggtttaatatgtgttcgctttgctaaagaatatcaacatcggccaggcgaggtggggcacgcctgtcatcccagcactttgggaggctgaggtgggaggatcacttgggcccaggggtgcaagaccagcctgggcaacatagcgagaccccatgtctaaaaaaattattttaaattagccaggccgggtgcaatggctcgcgcccgtaatcttagcactctgggaggccgaggcaggcagatcacttgagatcaggactttaagaccagcctcggcaacaacatggtgaaaccatctctagcaaaaatacaaaaaattagccgggtatggtggcgggtacctgtaatcccagctactcaggaggctgaggcaagagaatcgcttgaacgcaggaggcagaggttgcagtgagctgagatcgtgccactgcactccagcctggacaacagagcaaaactctgtctcaaaaaataataaataaaaataaattagctgggcgtggtggtgcatgcctgtagttccagctacttgggaggctgaggtgggaggattgcttgagcctgggaagtagaggctgcagtgaactataactgtgctagtggccgggcgcagtggctcacgcctataatcccagcactttgggaggccaaagcaggtggatcacttgaggtcaggagttcgagaccagcctggccaacatggtgaaactctgtgtctactaaaaatacaaaaaattagctgggtgtggtggcgctcgcctgtagtcccagctacttgggaggctgaggcaggagaatcacttgaacccagaaggcagaggtagcagtgagccaagatggtgccactgcactccagcctgggcgacagagggtgactcctcaaaaaaaagaaaaatagctaaaatatgattgtaccactgcactccagcctgggtgacagagtgagaccctgtctctaaaaaaaaaaaaaagaaaataaagaaaaaagaatgtcagcatgtcagcgttcctccaaggagtggctttgggtcaagaagacaggctggctctcctaaacaaacggctccccacggctgggagaggcagcaggcccttactctggcctgagtcttttgggaggggccctgctgggccttctcctgccacctactgtggaacgcatctccagtgccatctgggg

SEQ ID NO: 17241 - protein, 60 aa, Homo sapiens
MSAFLQGVALGQEDRLALLNKRLPTAGRGSRPLLWPESFGRGPAGPSPATYCGTHLQCHL

SEQ ID NO: 17242 - DNA, 7089 bp, Homo sapiens
gctgggcgtggtggtgcatgcctgtagttccagctacttgggaggctgaggtgggaggattgcttgagcctgggaagtagaggctgcagtgaactataactgtgctagtggccgggcgcagtggctcacgcctataatcccagcactttgggaggccaaagcaggtggatcacttgaggtcaggagttcgagaccagcctggccaacatggtgaaactctgtgtctactaaaaatacaaaaaattagctgggtgtggtggcgctcgcctgtagtcccagctacttgggaggctgaggcaggagaatcacttgaacccagaaggcagaggtagcagtgagccaagatggtgccactgcactccagcctgggcgacagagggtgactcctcaaaaaaaagaaaaatagctaaaatatgattgtaccactgcactccagcctgggtgacagagtgagaccctgtctctaaaaaaaaaaaaaagaaaataaagaaaaaagaatgtcagcatgtcagcgttcctccaaggagtggctttgggtcaagaagacaggctggctctcctaaacaaacggctccccacggctgggagaggcagcaggcccttactctggcctgagtcttttgggaggggccctgctgggccttctcctgccacctaccttcctggaccatctgtgcccctgcccacgcagtaccacactccccagactgtggaacgcatctccagtgccatctgggggccagttactgtacctggtccccaggcagagctcttggcctggcagcatccaggcaggtattaagtgcccagtgatggtggcacatgggtggggacggagccacatccaagtctagccctctgattaggaggatgacagtcttggaatttcttgttctctttctcctagggttctcgttctcccagctccagcctttctagtttcgaggcatgaggcaaaccattgctgtgggaatagcagtgaccattggtagggccatggtggccgggagaggaaacctcagggtcaccccagagcctgtggggagacggagggtgagctgttgttggagctgcagaaacgccttgaagggcagcatgggcgatgaggaatgccattgcagcctagaaattcggtttctggaggtttagcctgattttgaagagtatttaagaacagagggctccagaccaggtgtggtggctcacatctgtaatcccagcactttgggaggcagaggtgggcggatcgcctgagatcaggagttcgagaccagcctggcccacatggtgaaaccctgtctctactaaaaatacaaaaattagccgggcgtagtgacacacgcctgtaatcccagctgctcgggaggcagaggcaggagaatggcgtgaacccgggaggcggaggttgcagtgagccgagatcacgccactgcactccagcctgggtaacagagcaagactctgtctcaaaaaaaaaaaaaaaagaacaggggcctctgcctcagtttgcccgggagccagccagggcccatcctaatttggagcacagtcttcctggtgcctagacatgccaaggcccctcccacgtggtacaccctctccgtttagtacctgaccacctgtttcaaaacgcaggtgtttctggtttagaaacttggaaggcggaatgtgttttcgtgtcttctaggaagggtctgctgaggaccagaccacgtaagcctgagtggatcctgactcagctgcagcccttacctgcctcgtgctgatgatctatgcatggcgttatgtagatcacgtgcggcagagacagccactgtcctgtgtgcgggtttttaaaacagctgccctggatgaaacggaataaaccagtgatgctattcaaagtctttctgttcttgggggatgctgtgggcagaggggataaattgcagcccctggccctcccgtggcatctgctgactgggggacccacatcgtggcctgaaaaactcctggagcgccctctggcctcctgtcgctggtcactggccagtgtcctcccaggctgccccggcaagggggcgtggacatctctagaatggaggcagggtactcatgtccagacacgccgccatggggctccgccccgagagcgcagggtgcctctgcctggcgcttcccctcccagacagggccctctctttccagaaacaaaagaaggggcagccccagagggtggctgagcgacaacagagcccacctggacagggtcagcttggcgttccccccagtcccttgaggagaggagctaccagagcactggtcacctcaggacattctccagccccaagtccctgtggggcagcaggaacaggtgggtccctcctgcgggctggtggcactgctaaggaagcaccagacagccttttttttttttttgagacagagtcgctctgtcacccaagctggaatgcggtggcatgatcttggctcactgcaacctcctcctcccaggttcaagcgatcttgtgcctcagcctcccaagtagctgggattacaggcacgcaccaccatgcttggctaatttttgtatttttagtagagacgggggtttcaccatgttggccaggctggtctccaactcatgacctcgtgatctgcccacctcggcctcccaaagtgctgggattacaggtgtgagccagcttgcccagcttatgtttatagatttattttagagacagggttgggctctattgcccaggccagagctggagtgcagtggtgcaatcatagctctctgcaggctccagcttctgggcgcaagcaatcctcccacctcagtctcccaagtagctacacttgggagactacgggcgcacactaccatgcccagctaatgttttttttgtagagatgggatcttgctatgttgcccagtctggtcttgaacttctggcctcaagcgaccctcctgccttggcctcccaaagtgctgggattacaggtgcgagccaccatgcctggcccattctgttttttgtcggccactgaggtagaggccctcttctaggaaagaatttctgtttgttttgttttgttttgttttgtttttttgaaacagtctctctctgtctcccaggctggagtgcagtggcgtgatctcagctcgctgcaacctccacttcccaggttcaagcaattcttctgccaagctgggactacaggcatgcaccaccaccatgccctgctaatttttgttgttgtcgttggtttttgagatagagtttcgctcttgttgcccaggctggagtgcagtggcacgatctcagctcaccgcaacctccgcctcccaggttcaagcaattatcttgcctcagcctcccaagtagctgggattacaggcatgcgccaccacacctggcttatttttgtatttttagtagagatggggtttctccatgttagccaagctggtctcgaactcccgacctcagatgatccgcctgcctcagcctcccaaagtgctggggttacaggtgtgagccaccacacccagcctttctttttgcatttttaatagagactgagtttcatcacactggccaggctggtttcgaactcctggcctcaagtgatccgctggcctcagcctcctaaagtgctggattacaggcatgagccaccgtgccaggccttgttaatatttttaactctggcacttcaccctagaggctgctaggaatcaggtgtgccaagcaactggcaccactccatggaaagcgtctagggcagtgccttggttctgccaatcctgagaagccaggctgccccttgggctgggcagtggcctcagtaccgagccccaggccagcaagcccacaagcctcgagaaagactgcacttccggtggaggctgcagtttccttaaagggaaaatctgccccacccctgtcaagggcaggacacaagtcactggcattgaaggacccactccacacccagcagatcatcgacgcagactttttttttcccagatagagtctcactctgtcgtccaggctggactgcaatggtgtgatcttggctcactgtaacctccgcctcccgggctcaagtgattctcctgcctcagcctcctgagtagctaggattacaggcgcccaccatcacgcctggctaatttttgtatttttagtagagacggggttttgccatgttggccaggctggtcttgaactcctgacctcaagtgatcctcctgcctcagcctcccaaagtgctgggattataggcgtgagccacctcgtccggcccaagactttttgcctcagatgctgcagagccctggtggggcccaggagggcaaggcccacacaggagccgaaacccatgtagaacctgccaacctgtagctcacacctataatcccagcactttgggaggctgaggtgggcggatcgcttgagccaaggagttcgagaccagcctgggcaacattacgagaccctgtctctacaaaaatacaaaaattacccgggcttggtggctcgtgcctatagtcccagctactggggaggctgaggtgggagaatcatctgagcccagggaggttgagactgcagtgagccaagattgtgccactgcactccagcctgggtaaaatgagtgagaccacgtctcaacccctttcacagcccgtctgcggcccacccacccatgggtactgtgggatgggggacaggctggcttaacacaaatcgaggcaggaataaccccagagaatgggctttgcatggagcttggctcctgtccctgcctgtgagggaggaccagactcggcctcaccacctgccactctgagcaaacaggcaacggtgtttcctgaacatctttctgaagcggctgagggatgtcagctgagcccccgctgggcctgctctggagcgggatgtctccagaagccgcccttggagcgggcacttccctatttgggcgtgtcccagtcccatgcctcaccatccccttgcttgaagctccaagagcatgagagtgggcagcctggtctgctgaggaaagtgtctgatggatgcggaaatggccaccccaaacaccggtaagcagatgttaccctgcaggcggtggctcctggggcccagccctgcagaaacacatggggcaggctgggcagaggggctcacacccgttattcccagcgctttgggaggctgaggcgggaggatcgcttgagcccaggagtttgagaccagcctgggcaacatagcaagactctatctccactaaaaatcaaaacaaaacaattagctgggtatggtggcacacgcctgtagttccagctactggggaggctgagggggaggatcacttgagcccaggagttcaaggctgcagtgagccatgattgcgccactgcactccagcctgggcaacagagcaagaccctgccccgccgcctgaaagaaagaaaaaagaaagagaaaggaagagaaagaaaggaaaagaaaaaggaaacatacgaggctatggggccgtgtacgggggccaggctgtggcagaagcatcctggcgtggccttctccagccccatcctggttgggtaaggtgtcgccgtgggtcttcgtgtcacagcttcaaggacagacccaactctggtatcacaaacttaacaggtaatggagtttcctaaagtgtgctctgcaggagtgctggaagggccagcatggaaggaccccagggagggagatttctttgctccacagcatccccaagcctcacgaggcctctcccctccaagtctctatgtgcatcgttctccagatgttggagcatcctgcaggggccagcccagcctgtcaggggcagagaccctgcactggccccctcgagagtggacccctgggctggcttatctgctccagtgcagtgaggatcagctggagctccgacctgactcacatctggatgcgcagtgaggggcccgttggggccgtgatactgggaggaagccgggctctgtgctcttgctccaagtgagttgaccagggagccgaagttaaggtggcctgggagccacgtcctcccacctagcggctgggctctcacagccactagaaacccatcagcctttcccctgggtctatgcggggctcttcagccctcctgggagctcagtggctgggatgctgctttacagacagtgcacggctctgccatctgacagctcccagagggttctgggggtgactgtaaagagtggtgctggccccgaacctttcctgttcccctggatttagttcccagcaggtggtgaggaactgaacattttgtcccatagtggtgggagagagggctggccacatgggtccaggccaccccctcagcctccacagcctgccccgcacccagccacaggaacagcagagcagctcccccatccaggtaagcgcccccaccacagccccatcacaaaggaatagcctcctggtgtagtgggaggtgaggagctttttttgttttccttttatttattttagggacagggtcttgctctgttgccaagttaagtgcagtggtatgatcatgagctcactgcagccttgacatggtggtaaagccatcctcccgcctcagcctttcgagtagctgggactacaggtgtgtgccaccatgcccagacgcccagctaatgtttgtattttttgtagagatgggggtctcactatgttgcccaggctggcctcaagcaatcctcccacctgagccccgcaaagtactcggattacaggtgtgagtcaccgcgcctggccgggagctttaatttttcctacttgttaacagcgttatggggctggaaggaggctctcagatttccctgccctcctcacatcccccaaccctccctgggcgtgggggtgtcaagcatgagtcaggctgagcctgactctgaagctgttcccagctctttagtctaaacttcaaatcttcaaccctgttccctaatccaacacattccccaaatgaagggactggacagtgagatatcgggaaaccccatgaaaatagatgcataataaaggtgaaaatcattt

SEQ ID NO: 17243 - protein, 123 aa, Homo sapiens
MKRNKPVMLFKVFLFLGDAVGRGDKLQPLALPWHLLTGGPTSWPEKLLERPLASCRWSLASVLPGCPGKGAWTSLEWRQGTHVQTRRHGAPPRERRVPLPGASPPRQGPLFPETKEGAAPEGG

SEQ ID NO: 17244 - DNA, 473 bp, Homo sapiens
gcctggtctgctgaggaaagtgtctgatggatgcggaaatggccaccatgcccagacgcccagctaatgtttgtattttttgtagagatgggggtctcactatgttgcccaggctggcctcaagcaatcctcccacctgagccccgcaaagtactcggattacaggtgtgagtcaccgcgcctggccgggagctttaatttttcctacttgttaacagcgttatggggctggaaggaggctctcagatttccctgccctcctcacatcccccaaccctccctgggcgtgggggtgtcaagcatgagtcaggctgagcctgactctgaagctgttcccagctctttagtctaaacttcaaatcttcaaccctgttccctaatccaacacattccccaaatgaagggactggacagtgagatatcgggaaaccccatgaaaatagatgcataataaaggtgaaaatcatttaaaa

SEQ ID NO: 17245 - protein, 46 aa, Homo sapiens
MRKWPPCPDAQLMFVFFVEMGVSLCCPGWPQAILPPEPRKVLGLQV

SEQ ID NO: 17246 - DNA, 1464 bp, Homo sapiens
cagaagctaaagaccgagggcttctgcggcctccccagcttcagccgggaggtggtgcggaggatgggcctctacccggggctggagggcttccggcccgtcgagcagtgcaacctggactactgccccgagcggggctctgccattgacccccacctggacgacgcctggctgtggggggagcggctggtcagcctcaacctcctgtcccccaccgtgctgtccatgtgtcgggaggcgcccgggagcctgctcctctgctcggccccgtcggctgccccggaggccttggtggacagcgtgatagcacccagccggtcggtgctatgccaggaggtggaggtggccatccccttacccgcccgctccctgctggtcctcaccggggcggcacggcaccagtggaagcatgccatccaccgcagacacatcgaggcccgccgcgtctgcgtcactttccgggagctgtcggctgagtttggccctggagggaggcagcaagagctgggccaggaactgctgcggatcgccctctccttccagggaagacccgtgtgaaccgcctccttggctccagacttgactgatcccgggattgaaatgaggagtgggcggatcacttgatgccaggagttcgagaccagcctggccaacacggtgaaaacccgtctctacaaaaactacaaaaattagccgggtgtggtgactcacagccgtaatcccagctactcgggaggctaaggtgggagaattgcttgaacctgggaggcggaggttgcagtgagccaagatcacgccactgcactccagcctcggtgacagagcaagactgttttgaaaaaaaaaaaaaatgggaacattttaaatgattttcacctttattatgcatctattttcatggggtttcccgatatctcactgtccagtcccttcatttggggaatgtgttggattagggaacagggttgaagatttgaagtttagactaaagagctgggaacagcttcagagtcaggctcagcctgactcatgcttgacacccccacgcccagggagggttgggggatgtgaggagggcagggaaatctgagagcctccttccagccccataacgctgttaacaagtaggaaaaattaaagctcccggccaggcgcggtgactcacacctgtaatccgagtactttgcggggctcaggtgggaggattgcttgaggccagcctgggcaacatagtgagacccccatctctacaaaaaatacaaacattagctgggcgtctgggcatggtggcacacacctgtagtcccagctactcgaaaggctgaggcgggaggatggctttaccaccatgtcaaggctgcagtgagctcatgatcataccactgcacttaacttggcaacagagcaagaccctgtccctaaaataaataaaaggaaaacaaaaaaagctcctcacctcccact

SEQ ID NO: 17247 - protein, 164 aa, Homo sapiens
MGLYPGLEGFRPVEQCNLDYCPERGSAIDPHLDDAWLWGERLVSLNLLSPTVLSMCREAPGSLLLCSAPSAAPEALVDSVIAPSRSVLCQEVEVAIPLPARSLLVLTGAARHQWKHAIHRRHIEARRVCVTFRELSAEFGPGGRQQELGQELLRIALSFQGRPV

SEQ ID NO: 17248 - DNA, 2016 bp, Homo sapiens
gaggtccagcttggccatgataggggccgggatcgaagcctgtgagggacccttacgaaaacataccgtttcatttactgctccgacaccggctgggccgtgggcacagaggagtctgactttgagggctgggccttccccttcccaggagtgatgctgatcgaggactttgtgacccgggaggaagaagccgagttggtgcggctcatggaccgtgacccctggaagctctcccagtctggacggaggaagcaggactatggccccaaagtcaactttcggaaacagaagctaaagaccgagggcttctgcggcctccccagcttcagccgggaggtggtgcggaggatgggcctctacccggggctggagggcttccggcccgtcgagcagtgcaacctggactactgccccgagcggggctctgccattgacccccacctggacgacgcctggctgtggggggagcggctggtcagcctcaacctcctgtcccccaccgtgctgtccatgtgtcgggaggcgcccgggagcctgctcctctgctcggccccgtcggctgccccggaggccttggtggacagcgtgatagcacccagccggtcggtgctatgccaggaggtggaggtggccatccccttacccgcccgctccctgctggtcctcaccggggcggcacggcaccagtggaagcatgccatccaccgcagacacatcgaggcccgccgcgtctgcgtcactttccgggagctgtcggctgagtttggccctggagggaggcagcaagagctgggccaggaactgctgcggatcgccctctccttccagggaagacccgtgtgaaccgcctccttggctccagacttgactgatcccgggattgaaatgaggagcacagaacagggcctcctgcaactcacggggtttcaagagaagatggctgacccctgatgctgtgagcagtgtgagccctgcccaggagcaggttttgatgggaacgtacctccaggcagcccccttccacctggaccgtggccacacttttttggttatttagtttgtcacagtcttggggacatgggatcatttgagcttaaaaaatactgggggccgggcacagtggctcacacctgtaatcctaacactttgggaggctgaggtgggcggatcacttgatgccaggagttcgagaccagcctggccaacacggtgaaaacccgtctctacaaaaactacaaaaattagccgggtgtggtgactcacagccgtaatcccagctactcgggaggctaaggtgggagaattgcttgaacctgggaggcggaggttgcagtgagccaagatcacgccactgcactccagcctcggtgacagagcaagactgttttgaaaaaaaaaaaaaatgggaacattttaaatgattttcacctttattatgcatctattttcatggggtttcccgatatctcactgtccagtcccttcatttggggaatgtgttggattagggaacagggttgaagatttgaagtttagactaaagagctgggaacagcttcagagtcaggctcagcctgactcatgcttgacacccccacgcccagggagggttgggggatgtgaggagggcagggaaatctgagagcctccttccagccccataacgctgttaacaagtaggaaaaattaaagctcccggccaggcgcggtgactcacacctgtaatccgagtactttgcggggctcaggtgggaggattgcttgaggccagcctgggcaacatagtgagacccccatctctacaaaaaatacaaacattagctgggcgtctgggcatggtggcacacacctgtagtcccagctactcgaaaggctgaggcgggaggatggctttaccaccatgtcaaggctgcagtgagctcatgatcataccactgcacttaacttggcaacagagcaagaccctgtccctaaaataaataaaaggaaaacaaaaaaagctcctcacctcccact

SEQ ID NO: 17249 - protein, 229 aa, Homo sapiens
MLIEDFVTREEEAELVRLMDRDPWKLSQSGRRKQDYGPKVNFRKQKLKTEGFCGLPSFSREVVRRMGLYPGLEGFRPVEQCNLDYCPERGSAIDPHLDDAWLWGERLVSLNLLSPTVLSMCREAPGSLLLCSAPSAAPEALVDSVIAPSRSVLCQEVEVAIPLPARSLLVLTGAARHQWKHAIHRRHIEARRVCVTFRELSAEFGPGGRQQELGQELLRIALSFQGRPV

SEQ ID NO: 17250 - DNA, 1694 bp, Homo sapiens
ggccacgcggacggcgcgatggcggcggctgccgccgagacccccgaagtccttcgggaatgcggttgcaagggcatccggacctgtctgatctgcgagcggcagcgcggcagtgacccgccctgggagctgcccccagcggactatggccccaaagtcaactttcggaaacagaagctaaagaccgagggcttctgcggcctccccagcttcagccgggaggtggtgcggaggatgggcctctacccggggctggagggcttccggcccgtcgagcagtgcaacctggactactgccccgagcggggctctgccattgacccgcccgctccctgctggtcctcaccggggcggcacggcaccagtggaagcatgccatccaccgcagacacatcgaggcccgccgcgtctgcgtcactttccgggagctgtcggctgagtttggccctggagggaggcagcaagagctgggccaggaactgctgcggatcgccctctccttccagggaagacccgtgtgaaccgcctccttggctccagacttgactgatcccgggattgaaatgaggagcacagaacagggcctcctgcaactcacggggtttcaagagaagatggctgacccctgatgctgtgagcagtgtgagccctgcccaggagcaggttttgatgggaacgtacctccaggcagcccccttccacctggaccgtggccacacttttttggttatttagtttgtcacagtcttggggacatgggatcatttgagcttaaaaaatactgggggccgggcacagtggctcacacctgtaatcctaacactttgggaggctgaggtgggcggatcacttgatgccaggagttcgagaccagcctggccaacacggtgaaaacccgtctctacaaaaactacaaaaattagccgggtgtggtgactcacagccgtaatcccagctactcgggaggctaaggtgggagaattgcttgaacctgggaggcggaggttgcagtgagccaagatcacgccactgcactccagcctcggtgacagagcaagactgttttgaaaaaaaaaaaaaatgggaacattttaaatgattttcacctttattatgcatctattttcatggggtttcccgatatctcactgtccagtcccttcatttggggaatgtgttggattagggaacagggttgaagatttgaagtttagactaaagagctgggaacagcttcagagtcaggctcagcctgactcatgcttgacacccccacgcccagggagggttgggggatgtgaggagggcagggaaatctgagagcctccttccagccccataacgctgttaacaagtaggaaaaattaaagctcccggccaggcgcggtgactcacacctgtaatccgagtactttgcggggctcaggtgggaggattgcttgaggccagcctgggcaacatagtgagacccccatctctacaaaaaatacaaacattagctgggcgtctgggcatggtggcacacacctgtagtcccagctactcgaaaggctgaggcgggaggatggctttaccaccatgtcaaggctgcagtgagctcatgatcataccactgcacttaacttggcaacagagcaagaccctgtccctaaaataaataaaaggaaaacaaaaaaagctcctcacctcccact

SEQ ID NO: 17251 - protein, 175 aa, Homo sapiens
MAAAAAETPEVLRECGCKGIRTCLICERQRGSDPPWELPPADYGPKVNFRKQKLKTEGFCGLPSFSREVVRRMGLYPGLEGFRPVEQCNLDYCPERGSAIDPPAPCWSSPGRHGTSGSMPSTADTSRPAASASLSGSCRLSLALEGGSKSWARNCCGSPSPSREDPCEPPPWLQT

SEQ ID NO: 17252 - DNA, 2018 bp, Homo sapiens
ctgcgcactggccacgcggacggcgcgatggcggcggctgccgccgagacccccgaagtccttcgggaatgcggttgcaagggcatccggacctgtctgatctgcgagcggcagcgcggcagtgacccgccctgggagctgcccccagcggagtgatgctgatcgaggactttgtgacccgggaggaagaagccgagttggtgcggctcatggaccgtgacccctggaagctctcccagtctggacggaggaagcaggactatggccccaaagtcaactttcggaaacagaagctaaagaccgagggcttctgcggcctccccagcttcagccgggaggtggtgcggaggatgggcctctacccggggctggagggcttccggcccgtcgagcagtgcaacctggactactgccccgagcggggctctgccattgacccccacctggacgacgcctggctgtggggggagcggctggtcagcctcaacctcctgtcccccaccgtgctgtccatgtgtcgggaggcgcccgggagcctgctcctctgctcggccccgtcggctgccccggaggccttggtggacagcgtgatagcacccagccggtcggtgctatgccaggaggtggaggtggccatccccttacccgcccgctccctgctggtcctcaccggggcggcacggcaccagtggaagcatgccatccaccgcagacacatcgaggcccgccgcgtctgcgtcactttccgggagctgtcggctgagtttggccctggagggaggcagcaagagctgggccaggaactgctgcggatcgccctctccttccagggaagacccgtgtgaaccgcctccttggctccagacttgactgatcccgggattgaaatgaggagcacagaacagggcctcctgcaactcacggggtttcaagagaagatggctgacccctgatgctgtgagcagtgtgagccctgcccaggagcaggttttgatgggaacgtacctccaggcagcccccttccacctggaccgtggccacacttttttggttatttagtttgtcacagtcttggggacatgggatcatttgagcttaaaaaatactgggggccgggcacagtggctcacacctgtaatcctaacactttgggaggctgaggtgggcggatcacttgatgccaggagttcgagaccagcctggccaacacggtgaaaacccgtctctacaaaaactacaaaaattagccgggtgtggtgactcacagccgtaatcccagctactcgggaggctaaggtgggagaattgcttgaacctgggaggcggaggttgcagtgagccaagatcacgccactgcactccagcctcggtgacagagcaagactgttttgaaaaaaaaaaaaaatgggaacattttaaatgattttcacctttattatgcatctattttcatggggtttcccgatatctcactgtccagtcccttcatttggggaatgtgttggattagggaacagggttgaagatttgaagtttagactaaagagctgggaacagcttcagagtcaggctcagcctgactcatgcttgacacccccacgcccagggagggttgggggatgtgaggagggcagggaaatctgagagcctccttccagccccataacgctgttaacaagtaggaaaaattaaagctcccggccaggcgcggtgactcacacctgtaatccgagtactttgcggggctcaggtgggaggattgcttgaggccagcctgggcaacatagtgagacccccatctctacaaaaaatacaaacattagctgggcgtctgggcatggtggcacacacctgtagtcccagctactcgaaaggctgaggcgggaggatggctttaccaccatgtcaaggctgcagtgagctcatgatcataccactgcacttaacttggcaacagagcaagaccctgtccctaaaataaataaaaggaaaacaaaaaaagctcctcacctcccact

SEQ ID NO: 17253 - protein, 229 aa, Homo sapiens; identical to SEQ ID NO: 17249

SEQ ID NO: 17254 - DNA, 2122 bp, Homo sapiens
cccacggccgcgcctgcgcactggccacgcggacggcgcgatggcggcggctgccgccgagacccccgaagtccttcgggaatgcggttgcaagggcatccggacctgtctgatctgcgagcggcagcgcggcagtgacccgccctgggagctgcccccagcgaaaacataccgtttcatttactgctccgacaccggctgggccgtgggcacagaggagtctgactttgagggctgggccttccccttcccaggagtgatgctgatcgaggactttgtgacccgggaggaagaagccgagttggtgcggctcatggaccgtgacccctggaagctctcccagtctggacggaggaagcaggactatggccccaaagtcaactttcggaaacagaagctaaagaccgagggcttctgcggcctccccagcttcagccgggaggtggtgcggaggatgggcctctacccggggctggagggcttccggcccgtcgagcagtgcaacctggactactgccccgagcggggctctgccattgacccccacctggacgacgcctggctgtggggggagcggctggtcagcctcaacctcctgtcccccaccgtgctgtccatgtgtcgggaggcgcccgggagcctgctcctctgctcggccccgtcggctgccccggaggccttggtggacagcgtgatagcacccagccggtcggtgctatgccaggaggtggaggtggccatccccttacccgcccgctccctgctggtcctcaccggggcggcacggcaccagtggaagcatgccatccaccgcagacacatcgaggcccgccgcgtctgcgtcactttccgggagctgtcggctgagtttggccctggagggaggcagcaagagctgggccaggaactgctgcggatcgccctctccttccagggaagacccgtgtgaaccgcctccttggctccagacttgactgatcccgggattgaaatgaggagcacagaacagggcctcctgcaactcacggggtttcaagagaagatggctgacccctgatgctgtgagcagtgtgagccctgcccaggagcaggttttgatgggaacgtacctccaggcagcccccttccacctggaccgtggccacacttttttggttatttagtttgtcacagtcttggggacatgggatcatttgagcttaaaaaatactgggggccgggcacagtggctcacacctgtaatcctaacactttgggaggctgaggtgggcggatcacttgatgccaggagttcgagaccagcctggccaacacggtgaaaacccgtctctacaaaaactacaaaaattagccgggtgtggtgactcacagccgtaatcccagctactcgggaggctaaggtgggagaattgcttgaacctgggaggcggaggttgcagtgagccaagatcacgccactgcactccagcctcggtgacagagcaagactgttttgaaaaaaaaaaaaaatgggaacattttaaatgattttcacctttattatgcatctattttcatggggtttcccgatatctcactgtccagtcccttcatttggggaatgtgttggattagggaacagggttgaagatttgaagtttagactaaagagctgggaacagcttcagagtcaggctcagcctgactcatgcttgacacccccacgcccagggagggttgggggatgtgaggagggcagggaaatctgagagcctccttccagccccataacgctgttaacaagtaggaaaaattaaagctcccggccaggcgcggtgactcacacctgtaatccgagtactttgcggggctcaggtgggaggattgcttgaggccagcctgggcaacatagtgagacccccatctctacaaaaaatacaaacattagctgggcgtctgggcatggtggcacacacctgtagtcccagctactcgaaaggctgaggcgggaggatggctttaccaccatgtcaaggctgcagtgagctcatgatcataccactgcacttaacttggcaacagagcaagaccctgtccctaaaataaataaaaggaaaacaaaaaaagctcctcacctcccact

SEQ ID NO: 17255 - protein, 302 aa, Homo sapiens; identical to SEQ ID NO: 2054

SEQ ID NO: 17256 - DNA, 340 bp, Homo sapiens
gaggcgcccgggagcctgctcctctgctcggccccgtcggctgccccggaggccttggtggacagcgtgatagcacccagccggtcggtgctatgccaggaggtggaggattgcttgaggccagcctgggcaacatagtgagacccccatctctacaaaaaatacaaacattagctgggcgtctgggcatggtggcacacacctgtagtcccagctactcgaaaggctgaggcgggaggatggctttaccaccatgtcaaggctgcagtgagctcatgatcataccactgcacttaacttggcaacagagcaagaccctgtccctaaaataaataaaagg

SEQ ID NO: 17257 - protein, 45 aa, Homo sapiens [sequence omitted]

SEQ ID NO: 17258 - DNA, 1521 bp, Homo sapiens
cccacggccgcgcctgcgcactggccacgcggacggcgcgatggcggcggctgccgccgagacccccgaagtccttcgggaatgcggttgcaagggcatccggacctgtctgatctgcgagcggcagcgcggcagtgacccgccctgggagctgcccccagcgaaaacataccgtttcatttactgctccgacaccggctgggccgtgggcacagaggagtctgactttgagggctgggccttccccttcccaggagtgatgctgatcgaggactttgtgacccgggaggaagaagccgagttggtgcggctcatggaccgtgacccctggaagctctcccagtctggacggaggaagcaggactatggccccaaagtcaactttcggaaacagaagctaaagaccgagggcttctgcggcctccccagcttcagccgggaggtggtgcggaggatgggcctctacccggggctggagggcttccggcccgtcgagcagtgcaacctggactactgccccgagcggggctctgccattgacccccacctggacgacgcctggctgtggggggagcggctggtcagcctcaacctcctgtcccccaccgtgctgtccatgtgtcgggaggcgcccgggagcctgctcctctgctcggccccgtcggctgccccggaggccttggtggacagcgtgatagcacccagccggtcggtgctatgccaggaggtggaggtggccatccccttacccgcccgctccctgctggtcctcaccggggcggcacggcaccagtggaagcatgccatccaccgcagacacatcgaggcccgccgcgtctgcgtcactttccgggagctgtcggctgagtttggccctggagggaggcagcaagagctgggccaggaactgctgcggatcgccctctccttccagggaagacccgtgtgaaccgcctccttggctccagacttgactgatcccgggattgaaatgaggagcacagaacagggcctcctgcaactcacggggtttcaagagaagatggctgacccctgatgctgtgagcagtgtgagccctgcccaggagcaggttttgatgggaacgtacctccaggcagcccccttccacctggaccgtggccacacttttttggttatttagtttgtcacagtcttggggacatgggatcatttgagcttaaaaaatactgggggccgggcacagtggctcacacctgtaatcctaacactttgggaggctgaggtgggcggatcacttgatgccaggagttcgagaccagcctggccaacacggtgaaaacccgtctctacaaaaactacaaaaattagccgggtgtggtgactcacagccgtaatcccagctactcgggaggctaaggtgggagaattgcttgaacctgggaggcggaggttgcagtgagccaagatcacgccactgcactccagcctcggtgacagagcaagactgttttgaaaaaaaaaaaaaatgggaacatttt

SEQ ID NO: 17259 - protein, 302 aa, Homo sapiens; identical to SEQ ID NO: 2054

SEQ ID NO: 17260 - DNA, 756 bp, Homo sapiens
tccgcttccttccggtcgttaacgcccacgggctcgcgcggcgccgcctcctgggctcagttaccgcggacgccagtgccgggctccaggagacgcagggcgacgccacacgccggggtggccgactgggtcagcgcgggctgcgcctcctcgccatgggccccctctcggcgcggctgctaatgcagcgcgggcgccccaagagcgaccggctggggaagatccggagtctggatggtgtggagtcgggagtagtggcgcgcgcttctagtcccagctactcgagaggctgaggcgggaggatccctcagcccaggagttggaggcagctgtgagctatgatcgcgcctaggcgactgagtgacaccccgtctctaaaaataaagtaacggggggatgggcggggcggctacacttgtacgagaaatgtcaggtgaaaaagccttctgaggtacccggggcagattggtgtagggtgcaaagcctgcccgccccctaagccttctgcccccaactccagcctgtcaggattggagctgctttccgagcacctggaccccaaactcctgtgccgcctgacgcagctgcaggagcttgacctgtctaacaaccacctggagacgctgccggacaacctgggcctgtcccacctgcgtgtcctccgctgcgccaacaaccagctgggggatgttactgccttgtgccagttccccaagctcgaggaactcagcctggagggcaaccccttcctgacgg

SEQ ID NO: 17261 - protein, 45 aa, Homo sapiens
MGPLSARLLMQRGRPKSDRLGKIRSLDGVESGVVARASSPSYSRG

SEQ ID NO: 17262 - DNA, 2216 bp, Homo sapiens
tccgcttccttccggtcgttaacgcccacgggctcgcgcggcgccgcctcctgggctcagttaccgcggacgccagtgccgggctccaggagacgcagggcgacgccacacgccggggtggccgactgggtcagcgcgggctgcgcctcctcgccatgggccccctctcggcgcggctgctaatgcagcgcgggcgccccaagagcgaccggctggggaagatccggagtctggacctgtcaggattggagctgctttccgagcacctggaccccaaactcctgtgccgcctgacgcagctgcaggagcttgacctgtctaacaaccacctggagacgctgccggacaacctgggcctgtcccacctgcgtgtcctccgctgcgccaacaaccagctgggggatgttactgccttgtgccagttccccaagctcgaggaactcagcctggagggcaaccccttcctgacggtcaatgacaacctgaaagtctcctttctcctgcccacgctccgtaaggtcaatggcaaggatgcgtcctcaacttactctcaggtggagaacctgaatcgggagctgaccagcagggtcacagctcactgggagaagttcatggccacactgggtcctgaagaggaggctgagaaggcccaggcggactttgtgaagtcggctgtcagggatgtccgctacgggcccgagtccctcagcgagttcacccagtggcgggtgcggatgatctctgaggagctggtggccgccagtaggacccaggtgcaaaaggctaacagcccagagaagcccccagaagctggagctgcccacaagcccagggccagactggcggccttgaaacggccagacgacgtcccactcagcctctctcccagcaagcgggcgtgtgcctccccgtcggcccaggtggagggcagccctgtggcaggctccgatggcagccagcctgctgtgaagctggagcccctgcacttcctgcagtgccacagcaagaacaacagcccccaggacctcgagacccagctgtgggcctgtgccttcgagccggcctgggaggagggggccacatcccagaccgtggccacgtgcggcggggaggctgtgtgcgtaattgattgccagacgggcatcgtgctccacaagtacaaggcacccggcgaggagttcttttctgtggcctggaccgctctgatggtggtcacacaggctggccacaagaagcgctggagtgtgctggcggctgcaggcctacggggcctggtccggctgctgcacgtgcgtgccggcttctgctgcggggtcatccgagcccacaagaaggccatcgccaccctgtgcttcagccccgcccacgagacccatctcttcacggcctcctatgacaagcggatcatcctctgggacatcggggtgcccaaccaggactacgaattccaggccagccagctgctcacactggacaccacctctatccccctgcgcctctgccctgtcgcctcctgcccggacgcccgcctgctggccggctgcgagggcggctgctgctgctgggacgtgcggctggaccagccccaaaagaggagggtgtgtgaagtggaattcgtcttctctgagggctccgaggcatctggacggagagtggatgggctggcatttgtgaatgaggacatcgtggcctccaaggggagcggcctgggcaccatctgcctgtggagctggaggcagacgtgggggggccggggcagccagtccacggtggcagtggtggtcctggcgcggctgcaatggtcgtccaccgagttggcctacttctcgctcagcgcctgccctgataaggggattgtgctctgtggggatgaggagggcaacgtgtggctctacgacgtcagcaacatcctgaagcagccacccctgctgccggcagccctgcaggcccccacacagatcctgaagtggccccagccctgggcccttggccaggtggtgaccaagaccatggtgaacacagtggtggccaatgcctccttcacctacctcaccgccctgacggactccaacatcgtagccatctgggggaggatgtagcctcacaccatcgcaaaggaccagggacacagctaactaacttattcagctttgggccgatgggggtgggggggggtctttcagtgaatatttttattaaactctactgtggacaag

SEQ ID NO: 17263 - protein, 647 aa, Homo sapiens; identical to SEQ ID NO: 2056

SEQ ID NO: 17264 - DNA, 1082 bp, Homo sapiens
tcggggttttctcgcgcctgcgcaagatcctccagcccaacagggggcgatgagccgatccttgagcgggtttgccccgccggagtaatccggaagaggcctcttattagggctctggtggcggcggcggcggacccttggggtctggacgcaacggcggcgggagcatgaacgcccctccagccttcgagtcgttcttgctcttcgagggcgagaagaagatcaccattaacaaggacaccaaggtacccaatgcctgtttattcaccatcaacaaagaagaccacacactgggaaacatcattaaatcacaactcctaaaagacccgcaagtgctatttgctggctacaaagtcccccaccccttggagcacaagatcatcatccgagtgcagaccacgccggactacagcccccaggaagcctttaccaacgccatcaccgacctcatcagtgagctgtccctgctggaggagcgctttcgggtggccataaaagacaagcaggaaggaattgagtaggggccagagggggctctgctcggcctgtgagccccgttcctacctgtgcctgaccctccgctccaggtaccacaccgaggagagcggccggtcccagccatggcccgccttgtggccacccctcaccctgacaccgacgtgtcctgtacatagattaggttttatattcctaataaagtatagcgggagagacctggatgtggacttgagcagcggtgacttcgcaagcaaatggattgtcaggcttgatgcaggcagatgacctgtttcaggggcgtccggctggcagggatgaattcattctggaccaaagatccggggtccaggggctgctgcgggggctgtgctgagccggagagaagtgtgcaaacccatgagctcccaagagtctctgctctagaagcctcaactcctgggcctgcctgtcagtcaaagcaggaacacttcttcctgcataactcgaaacacctttccacaggcttcttgtccacagtagagtttaataaaaatattcactgaaagacccccccccacccccatcggcccaaagctgaataagtt

SEQ ID NO: 17265 - protein, 117 aa, Homo sapiens; identical to SEQ ID NO: 2058

SEQ ID NO: 17266 - DNA, 624 bp, Homo sapiens
agaggcctcttattagggctctggtggcggcggcggcggacccttggggtctggacgcaacggcggcgggagcatgaacgcccctccagccttcgagtcgttcttgctcttcgagggcgagaagaagatcaccattaacaaggacaccaaggtacccaatgcctgtttattcaccatcaacaaagaagaccacacactgggaaacatcattaaatcacaactcctaaaagacccgcaagtgctatttgctggctacaaagtcccccaccccttggagcacaagatcatcatccgagtgcagaccacgccggactacagcccccaggaagcctttaccaacgccatcaccgacctcatcagtgagctgtccctgctggaggagcgctttcgggtggccataaaagacaagcaggaaggaattgagtaggggccagagggggctctgctcggcctgtgagccccgttcctacctgtgcctgaccctccgctccaggtaccacaccgaggagagcggccggtcccagccatggcccgccttgtggccacccctcaccctgacaccgacgtgtcctgtacatagattaggttttatattcctaataaagtatagcgggagagacctgg

SEQ ID NO: 17267 - protein, 117 aa, Homo sapiens; identical to SEQ ID NO: 2058

SEQ ID NO: 17268 - DNA, 404 bp, Homo sapiens
aagtgttgggattacaggcacgagccaccacacccggctaatttttgtgtttttagtagagatggggattcactgtgttggccaggctggtctcgaactcctgacctcaggtgatccacctgccggcttcccaaagtgctgggattagagacgtgagctactgcgcccggccttacattcaccattaagtgcacattctgtaaatgaacgagcagcagattccagcacagtaggcctgtgtgttattcatgctgaggggcattgaaaagcagtcaagattagctcccctcatgccacccgtttgtgacctcagtgccacctgggcctctaagatgtatgtggcagagactagaacttctatttaacaagagaaagaagtaggagttctgtggctatccagtgcc

SEQ ID NO: 17269 - protein, 38 aa, Homo sapiens
MLRGIEKQSRLAPLMPPVCDLSATWASKMYVAETRTSI

SEQ ID NO: 17270 - DNA, 507 bp, Homo sapiens
cccttggggtctggacgcaacggcggcgggagcatgaacgcccctccagccttcgagtcgttcttgctcttcgagggcgagaagaagatcaccattaacaaggacaccaaggtacccaatgcctgtttattcaccatcaacaaagaagaccacacactgggaaacatcattaaatcgtaagtttcccgtcacaggctctcaggggctgtgtttaatgggcccccctgggcaaagcacaagttccaagtcttcctcagtctctctgagctacaggaagtccttctgggggcttgctctgggcattttataatcttggtacctttttatcaaaatgacaccgacctccatgtcttcacataagccacacttctgtagtggcttattctgtagatgaacatgtgcatttacattcactgtttgtttgtttgtttttgagatggaattttctctctttgttgcccaggctggagtgcaatggcacgatcttgctcactgcaacctccgcct

SEQ ID NO: 17271 - protein, 48 aa, Homo sapiens
MNAPPAFESFLLFEGEKKITINKDTKVPNACLFTINKEDHTLGNIIKS

SEQ ID NO: 17272 - DNA, 2171 bp, Homo sapiens
gttttcacgtctgcctgcatccattcattccttcattcctcacctttatcctgttatctctatttttttaagctaccaggaaggaaagggaagaagagatcacgaaactgggacccccagaagggaggagtgggctttgaacttagacatctacctcagagctcaaataggttgtttaaaatcacattcaattttcagatgaaggggaactttataattttttttttttttttttttgagacagagtctcactgtgttgcccaggctggagtgcaaatggcttgatcttggttcactgcaacctctgcctcccaggttcaagcaattctcttgcctcagcctcccgagtagctgggactaaaggcgtgtgccaccatgcccagctaattcttgtatttttagtagagacggagtttctccatgttggccagactggtctcgaactcctgacctcaggtgatctgaccgccttggcctccgaaagtgctgagattacagttgcgagccactgtgcgtggccagaactttataataagagacttgaagctgggtgtgacggtgcacacctctagtcccagctactcgggaggccaagacagaaggatcaccttgaggccaggagtttaaggccagcctgggcaacatagcaaaacctagtccctaaaattaaaaaaaaaaaaaaaaaaaagggaaaataaaggagacttgaaatttttgaactaaatagtggtgatggctacacattgtgaatgtaattaacaccactgagttaaacacttaaaatggttaaaatggcaaattgtatgttatacctattttactacaataaaaagtataaaaaagagaagatatttaaccaattgcaacaaaacaaaatgttaagaaatgatctttttatgaggcaattggaaatttgaacactaatcaactataggatgattggaattattaattttgtaaaggtgtgataagatactgcacttggctgggcacagtggcacatgcctgtaatcccagctacttggcaggctgaggtgggagaatcgcttgagctcaggagttcgagaccagcctgggcaacgtggcgaaatccccgtctttacaaaaacaaacaaacaaacaaaaaagatattgcagttgtgttgtaagcgtccttatctttcagagctacatagtggaatgtttatggaatatttaggataaatgatataggcatttgggatttgctgcaaaatgacccagaggcaggggtcagggggagaggtagagatgagacaagaggtagaggggagaggtagaggtagccacgagctgataattacagacaagagatgcggagtatgtgggggctcattatcctgcatagtctatctttgtatatctttgaacttttcaagaataaaaaagcttaaaaagtatacatggcctggtcctaccagagactcacccaatgccagcctccagccagggagagccaagtttgcattttcacacgcatctcacactcctctgcactctcaacttggagagctccaaacagggaaaccccaagccttgctggcttctgccaaccccctgagcagaagcatgggtccccctgatcaccacctcaccaccctcatcctgatctcactgtacactccctttcctggtctgctaagtagcgggtgtttttccttgacactaacgctacagctagaccacggtgggcttggcaacaggtgtcttcccagatgctggcgttaccgctagaccaaggagccctctggtggccctgtccgggcataacagaaagctcgcactcttgtcttctggtcactcctcattgtcccctcagctcctatctctgtatggcctggtgtttcctaggttatgattgtagagcgaggattattataatattggaataaagaataattactacaaactaatgattaatgattcatatataatcatatctaagatctatatctagtataactattcttattttatatattttattatactggaacagctcgtgccctcggtctcttgcctcggcacctgggtggcttgctgcccacatccaccaagtgcactttgggaggctgaggctggaggactgctggaggccaggagttcaataccagcctgggcaacatagggagacccccccccccaccatctcc

SEQ ID NO: 17273 - protein, 172 aa, Homo sapiens [sequence omitted]

SEQ ID NO: 17274 - DNA, 840 bp, Homo sapiens
atggggtttcaccatgttagtcaagctgctcttgttttgttgttgttgttgttttgtgttgtaagcgtccttatctttcagagctacatagtggaatgtttatggaatatttaggataaatgatataggcatttgggatttgctgcaaaatgacccagaggcaggggtcagggggagaggtagagatgagacaagaggtagaggggagaggtagaggtagccacgagctgataattacagacaagagatgcggagtatgtgggggctcattatcctgcatagtctatctttgtatatctttgaacttttcaagaataaaaaagcttaaaaagtatacatggcctggtcctaccagagactcacccaatgccagcctccagccagggagagccaagtttgcattttcacacgcatctcacactcctctgcactctcaacttggagagctccaaacagggaaaccccaagccttgctggcttctgccaaccccctgagcagaagcatgggtccccctgatcaccacctcaccaccctcatcctgatctcactgtacactccctttcctggtctgctaagtagcgggtgtttttccttgacactaacgctacagctagaccacggtgggcttggcaacaggtgtcttcccagatgctggcgttaccgctagaccaaggagccctctggtggccctgtccgggcataacagaaagctcgcactcttgtcttctggtcactcctcattgtcccctcagctcctatctctgtatggcctggtgtttcctaggttatgattgtagagcgaggattattataatattggaataaagaataattactac

SEQ ID NO: 17275 - protein, 37 aa, Homo sapiens [sequence omitted]

SEQ ID NO: 17276 - DNA, 444 bp, Homo sapiens
tgcctgcatccattcattccttcattcctcacctttatcctgttatctctatttttttaagctaccaggaaggaaagggaagaagagatcacgaaactgggacccccagaagggaggagtgggctttgaacttagacatctacctcagagctcaaataggttgtttaaaatcacattcaattttcagctactcgggaggccaagacagaaggatcaccttgaggccaggagtttaaggccagcctgggcaacatagcaaaacctagtccctaaaattaaaaaaaaaaaaaaaaaaaagggaaaataaaggagacttgaaatttttgaactaaatagtggtgatggctacacattgtgaatgtaattaacaccactgagttaaacacttaaaatggttaaaatggcaaattgtatgttatacctattttactacaataaaaagta

SEQ ID NO: 17277 - protein, 84 aa, Homo sapiens
ACIHSFLHSSPLSCYLYFFKLPGRKGKKRSRNWDPQKGGVGFELRHLPQSSNRLFKITFNFQLLGRPRQKDHLEARSLRPAWAT

SEQ ID NO: 17278 - DNA, 2106 bp, Homo sapiens
gccgaggcagggcctgggtcagacttaccaggctatgctcccagcccagccctcactagggacccccgagtgcatctctctcctctccaggcctctgtttctccatctgtgcaaccacagtgttggacatggtagtcccaagtgtctgctcgtaactttgccctctctgtgcccccaggtcagggctgcgataagacccggtcacgggtgaccctgcaggagtggaatgaccctcttgaccatgaccttgaggcccagctcatctaccggcacctgctgggcgtggaggccatgctgtgggagaggcaccgggagctgagcgggggcgcagaggcaggcacggtgcccacgagccctggcaaagtccccgaggactcattggcccggctgctccgggtgctgcaggacctccgcgaggcccatagctccagcccggccggctccccaccctcagagcccaactgcctcctggagctgcagacgtgaggcccgccctacgctccccttgctgagtcccctgccaagcgctcggagcccccccaggacactctgcaccccctcaccccggtcctcctcattagggtgcagggcctaggtctcttccaggtgggggaggggggagagtcaggaataaggggatccccagaagtgcagagctgagcaggcttgggcctgtcatggctggccggaagtgtccccagctccctacagacgctgtagccatcactgcctctccagggaccctcctctcctgcccaggacagacccagccagaaccactgctaggatgggccgcacccaggggtctggcctccagggacctagagaatgggagggagaacggggccccaggagacccggccgccaccccacccgctacccttgggtgccacagggctgtgctgttgccaacagtaaacctgctcttactgtccaggctctggggtcttgtgatgagggtctggggagaaagtgggcccggggggaccccggaggctgtcggtggatgtgccgatgatggggctgacagtatgggctctgggcatccctgttcccccctctttcttccccccactcttctggggtcgggggttcctttcccttcccagttgctgtccctgggtcccctctttcatgtcccacaggccacagagcccagtgtgtccaaccagctgttctctcctcaaagcagcccccaagcaagtcccttctctagggtgtccctgaggacagcacagaggcgggactcagagaccccattcctcttcacgcagcccttaccccaagccctctagctgtgtggctggcagtgttggccacgtaggggctcccatccccccaccattgtgtcacatgggctgccaggctcagctcccagctgcgtccacagtgacctggatcagggtggggacaaggactggaccctccttctccagaaggccttcagctcttgccttgccatgcagtcacctccttccccctctgaccccagatcccaaaggtgcaccgttgccccagcccctttctggccccatggggtttctctgatgccttcatcatagaggcccggggctggtccgatggttggcaaaacttgactccggcccagtccccactcttggggacttagaacccctgctgtcctgggatctggcctgcctttctttggtcagtccctgtggtcccccaccagctccccctcccatagggctgcccaccaagccctgcccccagcccaagaggagcccccactgcctgcggggcagtgatgtctggccaccggctcacaccaatgacttggtcctggggtggcagaagcagcaggtgacaggagcagggcccctgtccctctcttctggccctgtggtacccaggccacacgttgtgcccgctcttggggctgaccggctgcagggaccaccagccgctgctactgtgggccgccccggggcagggtgggcagggcttttgtgggttatgaggacacagaagtccctgaggcccccagacctggctcagccaacctccttcctcccccggttgccccccactctaaagcctcctccctcccagcgtccactggctccaggctcctcacaacagcag

SEQ ID NO: 17279 - protein, 64 aa, Homo sapiens; identical to SEQ ID NO: 1954

SEQ ID NO: 17280 - DNA, 3594 bp, Homo sapiens
cccgctgggctaggctgggccgggttggactgggctggggcgaggggtgaagagcggtggggaaccagggagcgctggggaggaccagggaggctgtgtcccagcgagggtcagggacggagcctaaggggagggggctgccaggagccctggtctgggggactccagcccgcgctcttccgcacccctccagaatgtaccgttcatcgccgtcaccagcttcctgtgcctgcgcttcttctctcccgccatcatgtcgcccaagctcttccacctgcgggagcgccacgcggacgcccgcaccagccgcaccctgctcctgttggccaaggcagtccagaacgtgggcaacatggacacgccggcttccagggccaaggaggcttggatggagccgctgcagcccaccgtgcaccagggcgtggcgcagctgaaggacttcatcaccaagctcgtggacatcgaggagaaggacgagctggacctgcagcggacgctgagtttgcaggcgccacctgtgaaggaggggccactcttcatccacaggaccaagggcaagggccccctcatgtcctcctccttcaagaagctctacttctccctcactaccgaggccctcagcttcgcgaagacgcccagctccaaggagttcccttttgtgtcagggtccagagccactgggaaaagtagtgatatcagggccaccaaatatatttggcgggttctggaatacctacgagcgtggccaaggggccagcggcggctgaaatccagcccacaccagcctcctgggctcctaccatcccggtgccttccgtggggacaagtggagctgctgccaccaaaaagacgagacagtgtgtgaatgagcttaaccagtggctgtctgcgctgcggaaggtgagcatcaacaacaccggactgctgggctcctaccaccctggcgtcttccgtggggacaagtggagctgctgccaccaaaaagagaagacaggtgggagaggaggcctgggtcccgggctctgcatccgtccactgcgagatcgggcctctggctgaacgatgggaccctgagccctgctgtgcacctgcagggacctaacccaaggaatgctggcccctccaggagctctgggcagaaagggtcccgtggaccaggtggtttgggaaatgccacgtgatgtgtgtgatgcatatgagtgaattcgctgaaggctctaaggaggcccgaaaacacgttagaatcccatttctttttatttcttcttcttctttttttttttttttttcagacacagactttcactctgtcccccagactggagtgcaatggcacgatctcagctcgctgcaatctccacctcccagggtcaagcaattctcctgcctcaacctccccagtagctgggatgaccggcactcgccaccaagcctagctaatttttttgtattttgactagagatggggtttcaccatgttagtcaagctgctcttgttttgttgttgttgttgttgttgttgttgttgttgtttgatactgagtctcgctctatcatccaggctggagtgcagtggtgcaatctcggctcactgcaatctccgtttcccaggctcaagtgattctcctgcctcagcctcccaaagtatcgcgccactgcaccccaggtcagggctgcgataagacccggtcacgggtgaccctgcaggagtggaatgaccctcttgaccatgaccttgaggcccagctcatctaccggcacctgctgggcgtggaggccatgctgtgggagaggcaccgggagctgagcgggggcgcagaggcaggcacggtgcccacgagccctggcaaagtccccgaggactcattggcccggctgctccgggtgctgcaggacctccgcgaggcccatagctccagcccggccggctccccaccctcagagcccaactgcctcctggagctgcagacgtgaggcccgccctacgctccccttgctgagtcccctgccaagcgctcggagcccccccaggacactctgcaccccctcaccccggtcctcctcattagggtgcagggcctaggtctcttccaggtgggggaggggggagagtcaggaataaggggatccccagaagtgcagagctgagcaggcttgggcctgtcatggctggccggaagtgtccccagctccctacagacgctgtagccatcactgcctctccagggaccctcctctcctgcccaggacagacccagccagaaccactgctaggatgggccgcacccaggggtctggcctccagggacctagagaatgggagggagaacggggccccaggagacccggccgccaccccacccgctacccttgggtgccacagggctgtgctgttgccaacagtaaacctgctcttactgtccaggctctggggtcttgtgatgagggtctggggagaaagtgggcccggggggaccccggaggctgtcggtggatgtgccgatgatggggctgacagtatgggctctgggcatccctgttcccccctctttcttccccccactcttctggggtcgggggttcctttcccttcccagttgctgtccctgggtcccctctttcatgtcccacaggccacagagcccagtgtgtccaaccagctgttctctcctcaaagcagcccccaagcaagtcccttctctagggtgtccctgaggacagcacagaggcgggactcagagaccccattcctcttcacgcagcccttaccccaagccctctagctgtgtggctggcagtgttggccacgtaggggctcccatccccccaccattgtgtcacatgggctgccaggctcagctcccagctgcgtccacagtgacctggatcagggtggggacaaggactggaccctccttctccagaaggccttcagctcttgccttgccatgcagtcacctccttccccctctgaccccagatcccaaaggtgcaccgttgccccagcccctttctggccccatggggtttctctgatgccttcatcatagaggcccggggctggtccgatggttggcaaaacttgactccggcccagtccccactcttggggacttagaacccctgctgtcctgggatctggcctgcctttctttggtcagtccctgtggtcccccaccagctccccctcccatagggctgcccaccaagccctgcccccagcccaagaggagcccccactgcctgcggggcagtgatgtctggccaccggctcacaccaatgacttggtcctggggtggcagaagcagcaggtgacaggagcagggcccctgtccctctcttctggccctgtggtacccaggccacacgttgtgcccgctcttggggctgaccggctgcagggaccaccagccgctgctactgtgggccgccccggggcagggtgggcagggcttttgtgggttatgaggacacagaagtccctgaggcccccagacctggctcagccaacctccttcctcccccggttgccccccactctaaagcctcctccctcccagcgtccactggctccaggctcctcacaacagcag

SEQ ID NO: 17281 - protein, 203 aa, Homo sapiens
MSPKLFHLRERHADARTSRTLLLLAKAVQNVGNMDTPASRAKEAWMEPLQPTVHQGVAQLKDFITKLVDIEEKDELDLQRTLSLQAPPVKEGPLFIHRTKGKGPLMSSSFKKLYFSLTTEALSFAKTPSSKEFPFVSGSRATGKSSDIRATKYIWRVLEYLRAWPRGQRRLKSSPHQPPGLLPSRCLPWGQVELLPPKRRDSV

SEQ ID NO: 17282 - DNA, 4103 bp, Homo sapiens
gcccagtccagcgcccgccgcccgccaccccggaccccggtgtctggcttcccccgagccggcaccccgcgatggccaagcgcagctcgctgtacatccgcatcgtggaggggaagaaccttcccgccaaggacatcactggcagcagcgacccctactgcatcgtgaaggtggacaatgagcccatcatcaggacagccacagtgtggaagaccctgtgccccttctggggtgaggagtaccaagtgcacctgccgcccaccttccacgctgtggctttctatgtcatggatgaggatgccctcagccgggacgacgttatcggaaaggtctgccttacaagggacaccatagcctctcaccctaagggtttcagcgggtgggcccacctgacagaggtcgaccccgacgaggaggtgcagggcgagatccacctgcggctggaagtgtggccaggggcccgggcctgccggctacgctgctctgtgctggaggccagggatctggccccaaaggaccgcaatggcacatctgaccccttcgtccgagtgcgctacaagggccggacacgggagacctcgatcgtgaagaagtcatgctacccacgctggaatgagacgtttgaatttgagctgcaggagggggccatggaggcgctgtgcgtggaggcctgggactgggaccttgtcagccgaaacgacttcctgggcaaagtggtgattgatgtccagagactgcgggtggtgcagcaggaggagggctggttccggctgcagcccgaccagtccaagagccggcggcatgacgagggcaacctgggctccttgcagctggaggtgcggctgcgggacgagacggtgctgccctccagctactaccagccactggtgcacctgctgtgccacgaggtcaagctgggcatgcagggcccagggcagctgatcccactcatcgaggagacaaccagcaccgagtgtcgccaggacgtggccacgaacctgctcaagctcttcctggggcaggggctggccaaggacttcctggacctgctcttccagctggagctgagtcgcaccagtgagaccaacaccctgttccggagcaactctctggcctcaaagtccgtggagtcttttctgaaggtggccgggatgcagtacctgcacggcgtcctgggccccatcatcaacaaggtgtttgaggagaagaagtacgtggagctggaccccagcaaagtggaagttaaggatgtagggtgctccgggctgcaccgcccgcagaccgaggccgaggtgctggagcagagcgcgcagacgctgcgcgcccacctgggggccctgctgagcgcgctcagccgctcggttcgcgcgtgccccgccgtggtgcgcgccaccttccgccagctcttccggcgcgtgcgcgagcgcttccccggcgcccagcacgagaatgtaccgttcatcgccgtcaccagcttcctgtgcctgcgcttcttctctcccgccatcatgtcgcccaagctcttccacctgcgggagcgccacgcggacgcccgcaccagccgcaccctgctcctgttggccaaggcagtccagaacgtgggcaacatggacacgccggcttccagggccaaggaggcttggatggagccgctgcagcccaccgtgcaccagggcgtggcgcagctgaaggacttcatcaccaagctcgtggacatcgaggagaaggacgagctggacctgcagcggacgctgagtttgcaggcgccacctgtgaaggaggggccactcttcatccacaggaccaagggcaagggccccctcatgtcctcctccttcaagaagctctacttctccctcactaccgaggccctcagcttcgcgaagacgcccagctccaagaaaagcgccctcatcaagttagccaacatccgggcagcggaaaaggttgaggaaaagagctttggcggctcgcacgtcatgcaggtcatctacacggacgacgccggcaggccccagactgcctacctgcagtgcaagtgtgtgaatgagcttaaccagtggctgtctgcgctgcggaaggtgagcatcaacaacaccggactgctgggctcctaccaccctggcgtcttccgtggggacaagtggagctgctgccaccaaaaagagaagacaggtcagggctgcgataagacccggtcacgggtgaccctgcaggagtggaatgaccctcttgaccatgaccttgaggcccagctcatctaccggcacctgctgggcgtggaggccatgctgtgggagaggcaccgggagctgagcgggggcgcagaggcaggcacggtgcccacgagccctggcaaagtccccgaggactcattggcccggctgctccgggtgctgcaggacctccgcgaggcccatagctccagcccggccggctccccaccctcagagcccaactgcctcctggagctgcagacgtgaggcccgccctacgctccccttgctgagtcccctgccaagcgctcggagcccccccaggacactctgcaccccctcaccccggtcctcctcattagggtgcagggcctaggtctcttccaggtgggggaggggggagagtcaggaataaggggatccccagaagtgcagagctgagcaggcttgggcctgtcatggctggccggaagtgtccccagctccctacagacgctgtagccatcactgcctctccagggaccctcctctcctgcccaggacagacccagccagaaccactgctaggatgggccgcacccaggggtctggcctccagggacctagagaatgggagggagaacggggccccaggagacccggccgccaccccacccgctacccttgggtgccacagggctgtgctgttgccaacagtaaacctgctcttactgtccaggctctggggtcttgtgatgagggtctggggagaaagtgggcccggggggaccccggaggctgtcggtggatgtgccgatgatggggctgacagtatgggctctgggcatccctgttcccccctctttcttccccccactcttctggggtcgggggttcctttcccttcccagttgctgtccctgggtcccctctttcatgtcccacaggccacagagcccagtgtgtccaaccagctgttctctcctcaaagcagcccccaagcaagtcccttctctagggtgtccctgaggacagcacagaggcgggactcagagaccccattcctcttcacgcagcccttaccccaagccctctagctgtgtggctggcagtgttggccacgtaggggctcccatccccccaccattgtgtcacatgggctgccaggctcagctcccagctgcgtccacagtgacctggatcagggtggggacaaggactggaccctccttctccagaaggccttcagctcttgccttgccatgcagtcacctccttccccctctgaccccagatcccaaaggtgcaccgttgccccagcccctttctggccccatggggtttctctgatgccttcatcatagaggcccggggctggtccgatggttggcaaaacttgactccggcccagtccccactcttggggacttagaacccctgctgtcctgggatctggcctgcctttctttggtcagtccctgtggtcccccaccagctccccctcccatagggctgcccaccaagccctgcccccagcccaagaggagcccccactgcctgcggggcagtgatgtctggccaccggctcacaccaatgacttggtcctggggtggcagaagcagcaggtgacaggagcagggcccctgtccctctcttctggccctgtggtacccaggccacacgttgtgcccgctcttggggctgaccggctgcagggaccaccagccgctgctactgtgggccgccccggggcagggtgggcagggcttttgtgggttatgaggacacagaagtccctgaggcccccagacctggctcagccaacctccttcctcccccggttgccccccactctaaagcctcctccctcccagcgtccactggctccaggctcctcacaacagcag

SEQ ID NO: 17283 - protein, 803 aa, Homo sapiens
MAKRSSLYIRIVEGKNLPAKDITGSSDPYCIVKVDNEPIIRTATVWKTLCPFWGEEYQVHLPPTFHAVAFYVMDEDALSRDDVIGKVCLTRDTIASHPKGFSGWAHLTEVDPDEEVQGEIHLRLEVWPGARACRLRCSVLEARDLAPKDRNGTSDPFVRVRYKGRTRETSIVKKSCYPRWNETFEFELQEGAMEALCVEAWDWDLVSRNDFLGKVVIDVQRLRVVQQEEGWFRLQPDQSKSRRHDEGNLGSLQLEVRLRDETVLPSSYYQPLVHLLCHEVKLGMQGPGQLIPLIEETTSTECRQDVATNLLKLFLGQGLAKDFLDLLFQLELSRTSETNTLFRSNSLASKSVESFLKVAGMQYLHGVLGPIINKVFEEKKYVELDPSKVEVKDVGCSGLHRPQTEAEVLEQSAQTLRAHLGALLSALSRSVRACPAVVRATFRQLFRRVRERFPGAQHENVPFIAVTSFLCLRFFSPAIMSPKLFHLRERHADARTSRTLLLLAKAVQNVGNMDTPASRAKEAWMEPLQPTVHQGVAQLKDFITKLVDIEEKDELDLQRTLSLQAPPVKEGPLFIHRTKGKGPLMSSSFKKLYFSLTTEALSFAKTPSSKKSALIKLANIRAAEKVEEKSFGGSHVMQVIYTDDAGRPQTAYLQCKCVNELNQWLSALRKVSINNTGLLGSYHPGVFRGDKWSCCHQKEKTGQGCDKTRSRVTLQEWNDPLDHDLEAQLIYRHLLGVEAMLWERHRELSGGAEAGTVPTSPGKVPEDSLARLLRVLQDLREAHSSSPAGSPPSEPNCLLELQT

SEQ ID NO: 17284 - DNA, 4338 bp, Homo sapiens
atgagagctgcggccccggccggcccctccccgccctggggaaccccggtcgcggattggccggcccgggcgcagtgtcccccgcacgtggggcgggggcgggtccagcgcccgccgcccgccaccccggaccccggtgtctggcttcccccgagccggcaccccgcgatggccaagcgcagctcgctgtacatccgcatcgtggaggggaagaaccttcccgccaaggacatcactggcagcagcgacccctactgcatcgtgaaggtggacaatgagcccatcatcaggacagccacagtgtggaagaccctgtgccccttctggggtgaggagtaccaagtgcacctgccgcccaccttccacgctgtggctttctatgtcatggatgaggatgccctcagccgggacgacgttatcggaaaggtctgccttacaagggacaccatagcctctcaccctaagggtttcagcgggtgggcccacctgacagaggtcgaccccgacgaggaggtgcagggcgagatccacctgcggctggaagtgtggccaggggcccgggcctgccggctacgctgctctgtgctggaggccagggatctggccccaaaggaccgcaatggcacatctgaccccttcgtccgagtgcgctacaagggccggacacgggagacctcgatcgtgaagaagtcatgctacccacgctggaatgagacgtttgaatttgagctgcaggagggggccatggaggcgctgtgcgtggaggcctgggactgggaccttgtcagccgaaacgacttcctgggcaaagtggtgattgatgtccagagactgcgggtggtgcagcaggaggagggctggttccggctgcagcccgaccagtccaagagccggcggcatgacgagggcaacctgggctccttgcagctggaggtgcggctgcgggacgagacggtgctgccctccagctactaccagccactggtgcacctgctgtgccacgaggtcaagctgggcatgcagggcccagggcagctgatcccactcatcgaggagacaaccagcaccgagtgtcgccaggacgtggccacgaacctgctcaagctcttcctggggcaggggctggccaaggacttcctggacctgctcttccagctggagctgagtcgcaccagtgagaccaacaccctgttccggagcaactctctggcctcaaagtccgtggagtcttttctgaagtttgccctgcatgtgtacctggccccctcctgggcggatacggcaggcaaacggtgcaagggcggctgccgggagaaggtgggcagctggagtgggactgggggagacaggatcaatgtgacctgcggtggtccccaggtggccgggatgcagtacctgcacggcgtcctgggccccatcatcaacaaggtgtttgaggagaagaagtacgtggagctggaccccagcaaagtggaagttaaggatgtagggtgctccgggctgcaccgcccgcagaccgaggccgaggtgctggagcagagcgcgcagacgctgcgcgcccacctgggggccctgctgagcgcgctcagccgctcggttcgcgcgtgccccgccgtggtgcgcgccaccttccgccagctcttccggcgcgtgcgcgagcgcttccccggcgcccagcacgagaatgtaccgttcatcgccgtcaccagcttcctgtgcctgcgcttcttctctcccgccatcatgtcgcccaagctcttccacctgcgggagcgccacgcggacgcccgcaccagccgcaccctgctcctgttggccaaggcagtccagaacgtgggcaacatggacacgccggcttccagggccaaggaggcttggatggagccgctgcagcccaccgtgcaccagggcgtggcgcagctgaaggacttcatcaccaagctcgtggacatcgaggagaaggacgagctggacctgcagcggacgctgagtttgcaggcgccacctgtgaaggaggggccactcttcatccacaggaccaagggcaagggccccctcatgtcctcctccttcaagaagctctacttctccctcactaccgaggccctcagcttcgcgaagacgcccagctccaagaaaagcgccctcatcaagttagccaacatccgggcagcggaaaaggttgaggaaaagagctttggcggctcgcacgtcatgcaggtcatctacacggacgacgccggcaggccccagactgcctacctgcagtgcaagtgtgtgaatgagcttaaccagtggctgtctgcgctgcggaaggtgagcatcaacaacaccggactgctgggctcctaccaccctggcgtcttccgtggggacaagtggagctgctgccaccaaaaagagaagacaggtcagggctgcgataagacccggtcacgggtgaccctgcaggagtggaatgaccctcttgaccatgaccttgaggcccagctcatctaccggcacctgctgggcgtggaggccatgctgtgggagaggcaccgggagctgagcgggggcgcagaggcaggcacggtgcccacgagccctggcaaagtccccgaggactcattggcccggctgctccgggtgctgcaggacctccgcgaggcccatagctccagcccggccggctccccaccctcagagcccaactgcctcctggagctgcagacgtgaggcccgccctacgctccccttgctgagtcccctgccaagcgctcggagcccccccaggacactctgcaccccctcaccccggtcctcctcattagggtgcagggcctaggtctcttccaggtgggggaggggggagagtcaggaataaggggatccccagaagtgcagagctgagcaggcttgggcctgtcatggctggccggaagtgtccccagctccctacagacgctgtagccatcactgcctctccagggaccctcctctcctgcccaggacagacccagccagaaccactgctaggatgggccgcacccaggggtctggcctccagggacctagagaatgggagggagaacggggccccaggagacccggccgccaccccacccgctacccttgggtgccacagggctgtgctgttgccaacagtaaacctgctcttactgtccaggctctggggtcttgtgatgagggtctggggagaaagtgggcccggggggaccccggaggctgtcggtggatgtgccgatgatggggctgacagtatgggctctgggcatccctgttcccccctctttcttccccccactcttctggggtcgggggttcctttcccttcccagttgctgtccctgggtcccctctttcatgtcccacaggccacagagcccagtgtgtccaaccagctgttctctcctcaaagcagcccccaagcaagtcccttctctagggtgtccctgaggacagcacagaggcgggactcagagaccccattcctcttcacgcagcccttaccccaagccctctagctgtgtggctggcagtgttggccacgtaggggctcccatccccccaccattgtgtcacatgggctgccaggctcagctcccagctgcgtccacagtgacctggatcagggtggggacaaggactggaccctccttctccagaaggccttcagctcttgccttgccatgcagtcacctccttccccctctgaccccagatcccaaaggtgcaccgttgccccagcccctttctggccccatggggtttctctgatgccttcatcatagaggcccggggctggtccgatggttggcaaaacttgactccggcccagtccccactcttggggacttagaacccctgctgtcctgggatctggcctgcctttctttggtcagtccctgtggtcccccaccagctccccctcccatagggctgcccaccaagccctgcccccagcccaagaggagcccccactgcctgcggggcagtgatgtctggccaccggctcacaccaatgacttggtcctggggtggcagaagcagcaggtgacaggagcagggcccctgtccctctcttctggccctgtggtacccaggccacacgttgtgcccgctcttggggctgaccggctgcagggaccaccagccgctgctactgtgggccgccccggggcagggtgggcagggcttttgtgggttatgaggacacagaagtccctgaggcccccagacctggctcagccaacctccttcctcccccggttgccccccactctaaagcctcctccctcccagcgtccactggctccaggctcctcacaacagcag

SEQ ID NO: 17285 - protein, 905 aa, Homo sapiens
MRAAAPAGPSPPWGTPVADWPARAQCPPHVGRGRVQRPPPATPDPGVWLPPSRHPAMAKRSSLYIRIVEGKNLPAKDITGSSDPYCIVKVDNEPIIRTATVWKTLCPFWGEEYQVHLPPTFHAVAFYVMDEDALSRDDVIGKVCLTRDTIASHPKGFSGWAHLTEVDPDEEVQGEIHLRLEVWPGARACRLRCSVLEARDLAPKDRNGTSDPFVRVRYKGRTRETSIVKKSCYPRWNETFEFELQEGAMEALCVEAWDWDLVSRNDFLGKVVIDVQRLRVVQQEEGWFRLQPDQSKSRRHDEGNLGSLQLEVRLRDETVLPSSYYQPLVHLLCHEVKLGMQGPGQLIPLIEETTSTECRQDVATNLLKLFLGQGLAKDFLDLLFQLELSRTSETNTLFRSNSLASKSVESFLKFALHVYLAPSWADTAGKRCKGGCREKVGSWSGTGGDRINVTCGGPQVAGMQYLHGVLGPIINKVFEEKKYVELDPSKVEVKDVGCSGLHRPQTEAEVLEQSAQTLRAHLGALLSALSRSVRACPAVVRATFRQLFRRVRERFPGAQHENVPFIAVTSFLCLRFFSPAIMSPKLFHLRERHADARTSRTLLLLAKAVQNVGNMDTPASRAKEAWMEPLQPTVHQGVAQLKDFITKLVDIEEKDELDLQRTLSLQAPPVKEGPLFIHRTKGKGPLMSSSFKKLYFSLTTEALSFAKTPSSKKSALIKLANIRAAEKVEEKSFGGSHVMQVIYTDDAGRPQTAYLQCKCVNELNQWLSALRKVSINNTGLLGSYHPGVFRGDKWSCCHQKEKTGQGCDKTRSRVTLQEWNDPLDHDLEAQLIYRHLLGVEAMLWERHRELSGGAEAGTVPTSPGKVPEDSLARLLRVLQDLREAHSSSPAGSPPSEPNCLLELQT

SEQ ID NO: 17286 - DNA, 939 bp, Homo sapiens
gccgaggcagggcctgggtcagacttaccaggctatgctcccagcccagccctcactagggacccccgagtgcatctctctcctctccaggcctctgtttctccatctgtgcaaccacagtgttggacatggtagtcccaagtgtctgctcgtaactttgccctctctgtgcccccaggtcagggctgcgataagacccggtcacgggtgaccctgcaggagtggaatgaccctcttgaccatgaccttgaggcccagctcatctaccggcacctgctgggcgtggaggccatgctgtgggagaggcaccgggagctgagcgggggcgcagaggcaggcacggtgcccacgagccctggcaaagtccccgaggactcattggcccggctgctccgggtgctgcaggacctccgcgaggcccatagctccagcccggccggctccccaccctcagagcccaactgcctcctggagctgcagacgtgaggcccgccctacgctccccttgctgagtcccctgccaagcgctcggagcccccccaggacactctgcaccccctcaccccggtcctcctcattagggtgcagggcctaggtctcttccaggtgggggaggggggagagtcaggaataaggggatccccagaagtgcagagctgagcaggcttgggcctgtcatggctggccggaagtgtccccagctccctacagacgctgtagccatcactgcctctccagggaccctcctctcctgcccaggacagacccagccagaaccactgctaggatgggccgcacccaggggtctggcctccagggacctagagaatgggagggagaacggggccccaggagacccggccgccaccccacccgctacccttgggtgccacagggctgtgctgttgccaacagtaaacctgctcttactgtccaggc

SEQ ID NO: 17287 - protein, 64 aa, Homo sapiens; identical to SEQ ID NO: 1954

SEQ ID NO: 17288 - DNA, 2427 bp, Homo sapiens
cccgctgggctaggctgggccgggttggactgggctggggcgaggggtgaagagcggtggggaaccagggagcgctggggaggaccagggaggctgtgtcccagcgagggtcagggacggagcctaaggggagggggctgccaggagccctggtctgggggactccagcccgcgctcttccgcacccctccagaatgtaccgttcatcgccgtcaccagcttcctgtgcctgcgcttcttctctcccgccatcatgtcgcccaagctcttccacctgcgggagcgccacgcggacgcccgcaccagccgcaccctgctcctgttggccaaggcagtccagaacgtgggcaacatggacacgccggcttccagggccaaggaggcttggatggagccgctgcagcccaccgtgcaccagggcgtggcgcagctgaaggacttcatcaccaagctcgtggacatcgaggagaaggacgagctggacctgcagcggacgctgagtttgcaggcgccacctgtgaaggaggggccactcttcatccacaggaccaagggcaagggccccctcatgtcctcctccttcaagaagctctacttctccctcactaccgaggccctcagcttcgcgaagacgcccagctccaaggagttcccttttgtgtcagggtccagagccactgggaaaagtagtgatatcagggccaccaaatatatttggcgggttctggaatacctacgagcgtggccaaggggccagcggcggctgaaatccagcccacaccagcctcctgggctcctaccatcccggtgccttccgtggggacaagtggagctgctgccaccaaaaagacgagacagtgtgtgaatgagcttaaccagtggctgtctgcgctgcggaaggtgagcatcaacaacaccggactgctgggctcctaccaccctggcgtcttccgtggggacaagtggagctgctgccaccaaaaagagaagacaggtgggagaggaggcctgggtcccgggctctgcatccgtccactgcgagatcgggcctctggctgaacgatgggaccctgagccctgctgtgcacctgcagggacctaacccaaggaatgctggcccctccaggagctctgggcagaaagggtcccgtggaccaggtggtttgggaaatgccacgtgatgtgtgtgatgcatatgagtgaattcgctgaaggctctaaggaggcccgaaaacacgttagaatcccatttctttttatttcttcttcttctttttttttttttttttcagacacagactttcactctgtcccccagactggagtgcaatggcacgatctcagctcgctgcaatctccacctcccagggtcaagcaattctcctgcctcaacctccccagtagctgggatgaccggcactcgccaccaagcctagctaatttttttgtattttgactagagatggggtttcaccatgttagtcaagctgctcttgttttgttgttgttgttgttgttgttgttgttgttgtttgatactgagtctcgctctatcatccaggctggagtgcagtggtgcaatctcggctcactgcaatctccgtttcccaggctcaagtgattctcctgcctcagcctcccaaagtatcgcgccactgcaccccaggtcagggctgcgataagacccggtcacgggtgaccctgcaggagtggaatgaccctcttgaccatgaccttgaggcccagctcatctaccggcacctgctgggcgtggaggccatgctgtgggagaggcaccgggagctgagcgggggcgcagaggcaggcacggtgcccacgagccctggcaaagtccccgaggactcattggcccggctgctccgggtgctgcaggacctccgcgaggcccatagctccagcccggccggctccccaccctcagagcccaactgcctcctggagctgcagacgtgaggcccgccctacgctccccttgctgagtcccctgccaagcgctcggagcccccccaggacactctgcaccccctcaccccggtcctcctcattagggtgcagggcctaggtctcttccaggtgggggaggggggagagtcaggaataaggggatccccagaagtgcagagctgagcaggcttgggcctgtcatggctggccggaagtgtccccagctccctacagacgctgtagccatcactgcctctccagggaccctcctctcctgcccaggacagacccagccagaaccactgctaggatgggccgcacccaggggtctggcctccagggacctagagaatgggagggagaacggggccccaggagacccggccgccaccccacccgctacccttgggtgccacagggctgtgctgttgccaacagtaaacctgctcttactgtccaggc

SEQ ID NO: 17289 - protein, 203 aa, Homo sapiens; identical to SEQ ID NO: 17281

SEQ ID NO: 17290 - DNA, 2936 bp, Homo sapiens
gcccagtccagcgcccgccgcccgccaccccggaccccggtgtctggcttcccccgagccggcaccccgcgatggccaagcgcagctcgctgtacatccgcatcgtggaggggaagaaccttcccgccaaggacatcactggcagcagcgacccctactgcatcgtgaaggtggacaatgagcccatcatcaggacagccacagtgtggaagaccctgtgccccttctggggtgaggagtaccaagtgcacctgccgcccaccttccacgctgtggctttctatgtcatggatgaggatgccctcagccgggacgacgttatcggaaaggtctgccttacaagggacaccatagcctctcaccctaagggtttcagcgggtgggcccacctgacagaggtcgaccccgacgaggaggtgcagggcgagatccacctgcggctggaagtgtggccaggggcccgggcctgccggctacgctgctctgtgctggaggccagggatctggccccaaaggaccgcaatggcacatctgaccccttcgtccgagtgcgctacaagggccggacacgggagacctcgatcgtgaagaagtcatgctacccacgctggaatgagacgtttgaatttgagctgcaggagggggccatggaggcgctgtgcgtggaggcctgggactgggaccttgtcagccgaaacgacttcctgggcaaagtggtgattgatgtccagagactgcgggtggtgcagcaggaggagggctggttccggctgcagcccgaccagtccaagagccggcggcatgacgagggcaacctgggctccttgcagctggaggtgcggctgcgggacgagacggtgctgccctccagctactaccagccactggtgcacctgctgtgccacgaggtcaagctgggcatgcagggcccagggcagctgatcccactcatcgaggagacaaccagcaccgagtgtcgccaggacgtggccacgaacctgctcaagctcttcctggggcaggggctggccaaggacttcctggacctgctcttccagctggagctgagtcgcaccagtgagaccaacaccctgttccggagcaactctctggcctcaaagtccgtggagtcttttctgaaggtggccgggatgcagtacctgcacggcgtcctgggccccatcatcaacaaggtgtttgaggagaagaagtacgtggagctggaccccagcaaagtggaagttaaggatgtagggtgctccgggctgcaccgcccgcagaccgaggccgaggtgctggagcagagcgcgcagacgctgcgcgcccacctgggggccctgctgagcgcgctcagccgctcggttcgcgcgtgccccgccgtggtgcgcgccaccttccgccagctcttccggcgcgtgcgcgagcgcttccccggcgcccagcacgagaatgtaccgttcatcgccgtcaccagcttcctgtgcctgcgcttcttctctcccgccatcatgtcgcccaagctcttccacctgcgggagcgccacgcggacgcccgcaccagccgcaccctgctcctgttggccaaggcagtccagaacgtgggcaacatggacacgccggcttccagggccaaggaggcttggatggagccgctgcagcccaccgtgcaccagggcgtggcgcagctgaaggacttcatcaccaagctcgtggacatcgaggagaaggacgagctggacctgcagcggacgctgagtttgcaggcgccacctgtgaaggaggggccactcttcatccacaggaccaagggcaagggccccctcatgtcctcctccttcaagaagctctacttctccctcactaccgaggccctcagcttcgcgaagacgcccagctccaagaaaagcgccctcatcaagttagccaacatccgggcagcggaaaaggttgaggaaaagagctttggcggctcgcacgtcatgcaggtcatctacacggacgacgccggcaggccccagactgcctacctgcagtgcaagtgtgtgaatgagcttaaccagtggctgtctgcgctgcggaaggtgagcatcaacaacaccggactgctgggctcctaccaccctggcgtcttccgtggggacaagtggagctgctgccaccaaaaagagaagacaggtcagggctgcgataagacccggtcacgggtgaccctgcaggagtggaatgaccctcttgaccatgaccttgaggcccagctcatctaccggcacctgctgggcgtggaggccatgctgtgggagaggcaccgggagctgagcgggggcgcagaggcaggcacggtgcccacgagccctggcaaagtccccgaggactcattggcccggctgctccgggtgctgcaggacctccgcgaggcccatagctccagcccggccggctccccaccctcagagcccaactgcctcctggagctgcagacgtgaggcccgccctacgctccccttgctgagtcccctgccaagcgctcggagcccccccaggacactctgcaccccctcaccccggtcctcctcattagggtgcagggcctaggtctcttccaggtgggggaggggggagagtcaggaataaggggatccccagaagtgcagagctgagcaggcttgggcctgtcatggctggccggaagtgtccccagctccctacagacgctgtagccatcactgcctctccagggaccctcctctcctgcccaggacagacccagccagaaccactgctaggatgggccgcacccaggggtctggcctccagggacctagagaatgggagggagaacggggccccaggagacccggccgccaccccacccgctacccttgggtgccacagggctgtgctgttgccaacagtaaacctgctcttactgtccaggc

SEQ ID NO: 17291 - protein, 803 aa, Homo sapiens; identical to SEQ ID NO: 17283

SEQ ID NO: 17292 - DNA, 3171 bp, Homo sapiens
atgagagctgcggccccggccggcccctccccgccctggggaaccccggtcgcggattggccggcccgggcgcagtgtcccccgcacgtggggcgggggcgggtccagcgcccgccgcccgccaccccggaccccggtgtctggcttcccccgagccggcaccccgcgatggccaagcgcagctcgctgtacatccgcatcgtggaggggaagaaccttcccgccaaggacatcactggcagcagcgacccctactgcatcgtgaaggtggacaatgagcccatcatcaggacagccacagtgtggaagaccctgtgccccttctggggtgaggagtaccaagtgcacctgccgcccaccttccacgctgtggctttctatgtcatggatgaggatgccctcagccgggacgacgttatcggaaaggtctgccttacaagggacaccatagcctctcaccctaagggtttcagcgggtgggcccacctgacagaggtcgaccccgacgaggaggtgcagggcgagatccacctgcggctggaagtgtggccaggggcccgggcctgccggctacgctgctctgtgctggaggccagggatctggccccaaaggaccgcaatggcacatctgaccccttcgtccgagtgcgctacaagggccggacacgggagacctcgatcgtgaagaagtcatgctacccacgctggaatgagacgtttgaatttgagctgcaggagggggccatggaggcgctgtgcgtggaggcctgggactgggaccttgtcagccgaaacgacttcctgggcaaagtggtgattgatgtccagagactgcgggtggtgcagcaggaggagggctggttccggctgcagcccgaccagtccaagagccggcggcatgacgagggcaacctgggctccttgcagctggaggtgcggctgcgggacgagacggtgctgccctccagctactaccagccactggtgcacctgctgtgccacgaggtcaagctgggcatgcagggcccagggcagctgatcccactcatcgaggagacaaccagcaccgagtgtcgccaggacgtggccacgaacctgctcaagctcttcctggggcaggggctggccaaggacttcctggacctgctcttccagctggagctgagtcgcaccagtgagaccaacaccctgttccggagcaactctctggcctcaaagtccgtggagtcttttctgaagtttgccctgcatgtgtacctggccccctcctgggcggatacggcaggcaaacggtgcaagggcggctgccgggagaaggtgggcagctggagtgggactgggggagacaggatcaatgtgacctgcggtggtccccaggtggccgggatgcagtacctgcacggcgtcctgggccccatcatcaacaaggtgtttgaggagaagaagtacgtggagctggaccccagcaaagtggaagttaaggatgtagggtgctccgggctgcaccgcccgcagaccgaggccgaggtgctggagcagagcgcgcagacgctgcgcgcccacctgggggccctgctgagcgcgctcagccgctcggttcgcgcgtgccccgccgtggtgcgcgccaccttccgccagctcttccggcgcgtgcgcgagcgcttccccggcgcccagcacgagaatgtaccgttcatcgccgtcaccagcttcctgtgcctgcgcttcttctctcccgccatcatgtcgcccaagctcttccacctgcgggagcgccacgcggacgcccgcaccagccgcaccctgctcctgttggccaaggcagtccagaacgtgggcaacatggacacgccggcttccagggccaaggaggcttggatggagccgctgcagcccaccgtgcaccagggcgtggcgcagctgaaggacttcatcaccaagctcgtggacatcgaggagaaggacgagctggacctgcagcggacgctgagtttgcaggcgccacctgtgaaggaggggccactcttcatccacaggaccaagggcaagggccccctcatgtcctcctccttcaagaagctctacttctccctcactaccgaggccctcagcttcgcgaagacgcccagctccaagaaaagcgccctcatcaagttagccaacatccgggcagcggaaaaggttgaggaaaagagctttggcggctcgcacgtcatgcaggtcatctacacggacgacgccggcaggccccagactgcctacctgcagtgcaagtgtgtgaatgagcttaaccagtggctgtctgcgctgcggaaggtgagcatcaacaacaccggactgctgggctcctaccaccctggcgtcttccgtggggacaagtggagctgctgccaccaaaaagagaagacaggtcagggctgcgataagacccggtcacgggtgaccctgcaggagtggaatgaccctcttgaccatgaccttgaggcccagctcatctaccggcacctgctgggcgtggaggccatgctgtgggagaggcaccgggagctgagcgggggcgcagaggcaggcacggtgcccacgagccctggcaaagtccccgaggactcattggcccggctgctccgggtgctgcaggacctccgcgaggcccatagctccagcccggccggctccccaccctcagagcccaactgcctcctggagctgcagacgtgaggcccgccctacgctccccttgctgagtcccctgccaagcgctcggagcccccccaggacactctgcaccccctcaccccggtcctcctcattagggtgcagggcctaggtctcttccaggtgggggaggggggagagtcaggaataaggggatccccagaagtgcagagctgagcaggcttgggcctgtcatggctggccggaagtgtccccagctccctacagacgctgtagccatcactgcctctccagggaccctcctctcctgcccaggacagacccagccagaaccactgctaggatgggccgcacccaggggtctggcctccagggacctagagaatgggagggagaacggggccccaggagacccggccgccaccccacccgctacccttgggtgccacagggctgtgctgttgccaacagtaaacctgctcttactgtccaggc

SEQ ID NO: 17293 - protein, 905 aa, Homo sapiens; identical to SEQ ID NO: 17285

SEQ ID NO: 17294 - DNA, 845 bp, Homo sapiens
ccttccacgctgtggctttctatgtcatggatgaggatgccctcagccgggacgacgttatcggaaaggtctgccttacaagggacaccatagcctctcaccctaagggtaagttctcccttccctcccacactggtctgcccagtccctggcctccctcccactcggagacctcccctctaggctccgtctggtctcctgctcagggaaagccatttctactctccccagaagccggggccacgttctgtactcctggcctctgttctgcagcatgttcccaagcctggttgttactgcctcttccctagggtgaagaggggctgctatgggtggaatctgaggcctctgctggcagaagaaggggcctccttacactctattgctgaagcatagggaccccttctccaaatcaggccagctccttctgtaacccatggggtcgcctccatctgggccctagtactactgtgtcctaagtctgaagggttggcctagagccagtccaggctggagatccctttcaattatttctgggatgcagacattgttttgtgttattgtttttacaatttttatatagtttttttttaaaaaaaaggccgggcacggtggctcacacctgtaatcccagcactttgggaggccgagacgggtggatcacgaggtcaggagatcgagaccatcctggctaacacggtgaaaccccgtctctactaaaagtacaaaaaaattagctgggcgtggtggcaggcacctgtagtcctagctacttggcaggctgaagcaggagaatggcgtgaacctgggaggcagagcttgcagtaagccgagatcgcgccact

SEQ ID NO: 17295 - protein, 94 aa, Homo sapiens
MDEDALSRDDVIGKVCLTRDTIASHPKGKFSLPSHTGLPSPWPPSHSETSPLGSVWSPAQGKPFLLSPEAGATFCTPGLCSAACSQAWLLLPLP

SEQ ID NO: 17296 - DNA, 1611 bp, Homo sapiens
ggtggcgacggtggcggacacttggggtctggacgcaacggcggcgggagcatgaacgcccctccagccttcgagtcgttcttgctcttcgagggcgagaagatcaccattaacaaggacaccaaggtacccaatgcctgtttattcaccatgaacaaagaagaccacacactgggaaacatcattaaatcacgtgcctgcttccccttcgccttctgccgtgattgtcagtttcctgaggcctccccagccacgcttcctgtacagcctgcagaacttctggcatggaaaagcccctgtgcaactggtaaagatatcaataagcaccaggaggtatctaaatccaccaggagccataggcatcacgttgacgtccatttaccagtcttccctggcaagattcttctgaattgtgctgccttggccaaaagagctgccccagagcacatcagctatgtgccccagctctcaaacgacaccttggcggggaggctcaccctgtccaccttcacgctggagcagcctctaggccagttcagcagccacaacatctctgacttggataccatctggctggtggtggccctcagcaacgccacccagagcttcacggccccacggacaaaccaggacatccctgctcctgccaacttctcccagaggggctactatctcacactgagggccaaccgggtgctgtaccagaccagaggccagctccatgtcctccgcgtcggcaatgatacccactgccaaccaacaaaaattggctgcaaccatcccctaccaggacccggcccctacagggtgaagttcctggtgatgaatgacgaaggacccgtggctgaaacaaagtggtccagcgacactcgcctgcagcaagcccaggcacttcgggctgtccccggcccccagagcccgggcaccgtggtcatcatcgccatcctgtctatcctcctggccgtcctcctcacggtcctcctggctgtgctcatatacacctgcttcaacagctgcaggagcacttccctatcaggcccagaggaggcagggagtgtgagaagatacaccacgcacctcgcgttcagcactcctgccgagggggcttcctgaggggttccagaggggcccacgtgtccctccacctcctccctggcccaggctgcagagcctgagctgggacacgccctgaagcttctggaccctgagagagattgtttcttttctttactatttttttttttttttttgagacggagtctcactctgtcgccaggctggcgcgatcttggctcactgcaacctctgcctcacgggttcaagcgattttcctgcttcagcctcctgagtagctgggactacaggcacacgccaccatgcccagctcatttttgtatttttagtagagatggggtttcaccatgttggccaggatggcctccgtctcttgaccttgtgatccgcccgactcggcctcccaaaatgctgggattacaggcgtgagccatcaagtctggtgagagagattgtttctagatgagggtgggggcgggtgtccttagcccaaagcttgtgccagtctctatcagaaataaatgcccccaaaacctc

SEQ ID NO: 17297 - protein, 353 aa, Homo sapiens [sequence omitted]

SEQ ID NO: 17298 - DNA, 1170 bp, Homo sapiens
ggagcctctggggctgcagacactgcagacggacggacagacagatggacaacagctggaggcttggcccggccatagggctctctgcgggacagtcccagctgctagtgtcgctgttgctgctactgacccgtgtccagcctgggacagacgtggccacccagagcttcacggccccacggacaaaccaggacatccctgctcctgccaacttctcccagaggggctactatctcacactgagggccaaccgggtgctgtaccagaccagaggccagctccatgtcctccgcgtcggcaatgatacccactgccaaccaacaaaaattggctgcaaccatcccctaccaggacccggcccctacagggtgaagttcctggtgatgaatgacgaaggacccgtggctgaaacaaagtggtccagcgacactcgcctgcagcaagcccaggcacttcgggctgtccccggcccccagagcccgggcaccgtggtcatcatcgccatcctgtctatcctcctggccgtcctcctcacggtcctcctggctgtgctcatatacacctgcttcaacagctgcaggagcacttccctatcaggcccagaggaggcagggagtgtgagaagatacaccacgcacctcgcgttcagcactcctgccgagggggcttcctgaggggttccagaggggcccacgtgtccctccacctcctccctggcccaggctgcagagcctgagctgggacacgccctgaagcttctggaccctgagagagattgtttcttttctttactatttttttttttttttttgagacggagtctcactctgtcgccaggctggcgcgatcttggctcactgcaacctctgcctcacgggttcaagcgattttcctgcttcagcctcctgagtagctgggactacaggcacacgccaccatgcccagctcatttttgtatttttagtagagatggggtttcaccatgttggccaggatggcctccgtctcttgaccttgtgatccgcccgactcggcctcccaaaatgctgggattacaggcgtgagccatcaagtctggtgagagagattgtttctagatgagggtgggggcgggtgtccttagcccaaagcttgtgccagtctctatcagaaataaatgcccccaaaacc

SEQ ID NO: 17299 - protein, 209 aa, Homo sapiens
MDNSWRLGPAIGLSAGQSQLLVSLLLLLTRVQPGTDVATQSFTAPRTNQDIPAPANFSQRGYYLTLRANRVLYQTRGQLHVLRVGNDTHCQPTKIGCNHPLPGPGPYRVKFLVMNDEGPVAETKWSSDTRLQQAQALRAVPGPQSPGTVVIIAILSILLAVLLTVLLAVLIYTCFNSCRSTSLSGPEEAGSVRRYTTHLAFSTPAEGAS

SEQ ID NO: 17300 - DNA, 1454 bp, Homo sapiens
ggtggcgacggtggcggacacttggggtctggacgcaacggcggcgggagcatgaacgcccctccagccttcgagtcgttcttgctcttcgagggcgagaagatcaccattaacaaggacaccaaggtacccaatgcctgtttattcaccatgaacaaagaagaccacacactgggaaacatcattaaatcacgtgcctgcttccccttcgccttctgccgtgattgtcagtttcctgaggcctccccagccacgcttcctgtacagcctgcagaactctgccccagagcacatcagctatgtgccccagctctcaaacgacaccttggcggggaggctcaccctgtccaccttcacgctggagcagcctctaggccagttcagcagccacaacatctctgacttggataccatctggctggtggtggccctcagcaacgccacccagagcttcacggccccacggacaaaccaggacatccctgctcctgccaacttctcccagaggggctactatctcacactgagggccaaccgggtgctgtaccagaccagaggccagctccatgtcctccgcgtcggcaatgatacccactgccaaccaacaaaaattggctgcaaccatcccctaccaggacccggcccctacagggtgaagttcctggtgatgaatgacgaaggacccgtggctgaaacaaagtggtccagcgacactcgcctgcagcaagcccaggcacttcgggctgtccccggcccccagagcccgggcaccgtggtcatcatcgccatcctgtctatcctcctggccgtcctcctcacggtcctcctggctgtgctcatatacacctgcttcaacagctgcaggagcacttccctatcaggcccagaggaggcagggagtgtgagaagatacaccacgcacctcgcgttcagcactcctgccgagggggcttcctgaggggttccagaggggcccacgtgtccctccacctcctccctggcccaggctgcagagcctgagctgggacacgccctgaagcttctggaccctgagagagattgtttcttttctttactatttttttttttttttttgagacggagtctcactctgtcgccaggctggcgcgatcttggctcactgcaacctctgcctcacgggttcaagcgattttcctgcttcagcctcctgagtagctgggactacaggcacacgccaccatgcccagctcatttttgtatttttagtagagatggggtttcaccatgttggccaggatggcctccgtctcttgaccttgtgatccgcccgactcggcctcccaaaatgctgggattacaggcgtgagccatcaagtctggtgagagagattgtttctagatgagggtgggggcgggtgtccttagcccaaagcttgtgccagtctctatcagaaataaatgcccccaaaacc

SEQ ID NO: 17301 - protein, 116 aa, Homo sapiens
MNAPPAFESFLLFEGEKITINKDTKVPNACLFTMNKEDHTLGNIIKSRACFPFAFCRDCQFPEASPATLPVQPAELCPRAHQLCAPALKRHLGGEAHPVHLHAGAASRPVQQPQHL

SEQ ID NO: 17302 - DNA, 1382 bp, Homo sapiens
agccatgtgtgagaatttggaaacaaagtgaggtcttgggtttgtcctgcagcctgagatgcagcgggtacccctgtgccaatccccacccttactcacccacgtctgtcccaggctggacacgggtcagtagcagcaacagcgacactagcagctgggactgtcccgcagagagccctatggccgggccaagcctccagctgttgtccatctgtctgtccgtccgtctgcagtgtctgcagccccagaggctcccctgtctgtagtctgtgctgtgctaggggaagctgttcctggcatctcctgctgcccctcccagctaccccctcctctcaaacaactggttggacaggtttgggggcagaatctgccagcccagtgaatctggcatcgccagggaggggtctgaagagaacatacagttgcaagacaagcctggactaccccccccacccaccaggagcgcctgaccagggaggggctgaggaaggaggcggggcagcctcaggatccaggctgccccagggacaatcccgctaagtctaccccgtggatctccttgtccaaacagtccccaatgtagcgactcttcctttaggacctgaggtgggaggatcactcgagcctgggaggttgaggctgcagtgagccaagatggcaccatgtggccttgacctcccaggctcaaggttctcagattctcaggccccaccctggggaaggatggaggatgaggacaagcttcccaggtccacatgacagagggactcaggattggcaatttggcctgtgtccagctttgctgctcagagagctcagatccccaccctcaattcactcccttgtgtggaagggagtgaccctcactttctagcacacacagggaagagggcttggctaagagcacccaggaggtcagggcaggactggggattagatcacacccaaatgcaagctctgtggcactcctggtatagccctgctgtccccctgtagcctggccctgggaggggggctcccagacttcacaccccctcacctctttatccaggggaccggctgtctcttcctccttcatccccagcctctgtcagggcagggtagttcctcctcgagacagaaaattaccagatggaagtccaggcatggtggctcacgcctgtaatcccagcattttgagaggccgaggtgggtggatcacctgaggtcaggagttcgagaccagcctggccaacacggcgaaaccccatctctactaaaaatacaaaattagctggacgtggtggcttgttcttgtaactccagctacgcaggaggctgaggcaggagaaccacttgaacccaggaggcagaggttgcaatgagccgagatcgcatcactg

SEQ ID NO: 17303 - protein, 34 aa, Homo sapiens [sequence omitted]

SEQ ID NO: 17304 - DNA, 637 bp, Homo sapiens
aacggggggcgatgagccgatccttgggcgggtttgccccgccggagtaatccggaagaggcctcttattagggctctggtggcggcggtggcggacacttggggtctggacgcaacggcggcgggagcatgaacgcccctccagccttcgagtcgttcttgctcttcgagggcgagaagatcaccattaacaaggacaccaaggtacccaaggcctgcttattcaccatcaacaaagaagaccacacactgggaaacatcattaaatcacaactcctaaaagacccgcaagtgctatttgctggctacaaagtcccccaccccttggagcacaagatcatcatccgagtgcagaccacgccggactacagcccccaggaagcctttaccaacgccatcaccgacctcatcagtgagctgtccctgctggaggagcgcttccggacgtgcctgcttccccttcgccttctgccgtgattgtcagtttcctgaggcctccccagccacgcttcctgtacagcctgcagaactagacggggtttttccacattggtcaggctggtctcaaacttctgacctcagatgatccgcccaccttggccacccaaagtgctgggattacaggtgtgaaccactg

SEQ ID NO: 17305 - protein, 115 aa, Homo sapiens; identical to SEQ ID NO: 2068

SEQ ID NO: 17306 - DNA, 1542 bp, Homo sapiens
agagcttggcgtggccatccctgtggcccctctgggagtctggagcccattccctcacactggtactcactgcagctggggacatctgcactaggaagacaggacacggcatggaagctggcctctgcccagaagccatgacattctggtcaccagcctgatgctataaaacgagtgtcacggccgggcatggtggttcacacctgtaatcccagcactttaggaggccaaggcgggtggatcatgaggtctggagttcgagaccagcctggccaacatggcgaaatcccgtctctactaaaaataagaacattagccaggtgtggtggcacatacctgtagtcccagctcctctggaggctgaggcaggagaatcacttaaacccaggaggcggagattgcagtgagccgagaccacggcattggactccaggctgggcaacagagcacgactccatctcaaaaacaaacaaaaaaaaagagtgtcacctggggctacttggccagacacagagagcaaggagacatccctattatctgtcaaaaataatttgctgggattacagctgtgagccaccgcacccggccgcattcttctaaatcacagtacatctggttcccagtgcccaggctctcagggcagagggtccagtgtgatcactttgcatggcctctctcccctcctgagcttgtgccagggccccagggctgacctggagaaggaaaatggcagagggtgaagatggggtgtctggtttggggaccatcctggccccccttgtcactgttggcatctcttctgcacagtggcattgctgggaggtgcttactgtgcctattcaaggggctggcagccgcagcctcactgcagatcagggacttggcttcccggttgaccacaggtccaagaacctgcagggtccagcctcccccccatccccagtcttccccaccctggcccggccctccaggtgcagaaacatgcaggcccctctccaggactgtgggaggagtgtgtccctcagactggcctgtgtcctggctcctcttaccacctcttccagaggttgtcacctgcagctgccccaggataaaggcaaggccagagaggactcctgaactcctgtgtgcctggggtggcaggggcaaacatagccaactggtggcctgagcagggccatggtgaggacacccttggtggcttgtcccacatcaagctgggaggtgacactgaggatgcattagtctgcagcgtatgataaaaacggcatttcaggccaggcgtggtggctcatgcctgtcaccccagcaccttgggaggccgaggtgggcagatcatatgaggtcaggactttgagaccagcctggccaacatggtgaaaactcatctgtactaaaaaaacaaaaattatgtgggttggtggtgtgcgcctgtaatcccagctacttgggaggctgaggcaggagaatcacttgaacctgggaggcggaggctacaacgagccgaaattgcaccactgcactccagcctgactccgtctc

SEQ ID NO: 17307 - protein, 142 aa, Homo sapiens [sequence omitted]

SEQ ID NO: 17308 - DNA, 1537 bp, Homo sapiens
ggagccccaccctgtctcatgagtcaccccaaaggtgcatgggcaggcaggtgctggggaatcggctactccccagagcttggcgtggccatccctgtggcccctctgggagtctggagcccattccctcacactggtactcactgcagctggggacatctgcactaggaagacaggacacggcatggaagctggcctctgcccagaagccatgacattctggtcaccagcctgatgctataaaacgagtgtcacggccgggcatggtggttcacacctgtaatcccagcactttaggaggccaaggcgggtggatcatgaggtctggagttcgagaccagcctggccaacatggcgaaatcccgtctctactaaaaataagaacattagccaggtgtggtggcacatacctgtagtcccagctcctctggaggctgaggcaggagaatcacttaaacccaggaggcggagattgcagtgagccgagaccacggcattggactccaggctgggcaacagagcacgactccatctcaacctcccaaagtgctgggattacagctgtgagccaccgcacccggccgcattcttctaaatcacagtacatctggttcccagtgcccaggctctcagggcagagggtccagtgtgatcactttgcatggcctctctcccctcctgagcttgtgccagggccccagggctgacctggagaaggaaaatggcagagggtgaagatggggtgtctggtttggggaccatcctggccccccttgtcactgttggcatctcttctgcacagtggcattgctgggaggtgcttactgtgcctattcaaggggctggcagccgcagcctcactgcagatcagggacttggcttcccggttgaccacaggtccaagaacctgcagggtccagcctcccccccatccccagtcttccccaccctggcccggccctccaggtgcagaaacatgcaggcccctctccaggactgtgggaggagtgtgtccctcagactggcctgtgtcctggctcctcttaccacctcttccagaggttgtcacctgcagctgccccaggataaaggcaaggccagagaggactcctgaactcctgtgtgcctggggtggcaggggcaaacatagccaactggtggcctgagcagggccatggtgaggacacccttggtggcttgtcccacatcaagctgggaggtgacactgaggatgcattagtctgcagcgtatgataaaaacggcatttcaggccaggcgtggtggctcatgcctgtcaccccagcaccttgggaggccgaggtgggcagatcatatgaggtcaggactttgagaccagcctggccaacatggtgaaaactcatctgtactaaaaaaacaaaaattatgtgggttggtggtgtgcgcctgtaatcccagctacttgggaggctgaggcaggagaatcacttgaacctgggaggcggaggctacaacgagccgaaattgcaccactgcactccagcctgactccgtctc

SEQ ID NO: 17309 - protein, 142 aa, Homo sapiens [sequence omitted]

SEQ ID NO: 17310 - DNA, 463 bp, Homo sapiens
ggagcacatgtaataatacagaaacaaatttaaagataataaaatatttaggataaaaagaattgtctcttaaaaatgaaaagaaaattagctttatgtatatataacaactataactctcatcaaaaaactacaggaacagcatgttttcaaaagtacaacaatttccaaactatttgaaataaatctatgaataattcaatggccgacattttccatacaaaccaataaaatgcagagtgtgcatgaagctatctgttacaatctgtggcactgatatttcacaaaagaattctgtcccaatctgagcccctgcattgtgccttcaaatcctcctggactgcaagtccgtaagaaacaggactcctggtttcttacttttctccaaggactcctagaaggaccccacccccctccccccacccctgctcctaggaggacaacgtgatcactgtattcagct

SEQ ID NO: 17311 - protein, 34 aa, Homo sapiens
MKRKLALCIYNNYNSHQKTTGTACFQKYNNFQTI

SEQ ID NO: 17312 - DNA, 347 bp, Homo sapiens
ggattgattatttgctgcccagtgatatttttccttaatggggttgtggttatttgaacatatttattagctctggaagataatcctgtgctgttttttatgtagaaaaaaacataaggctgggtgcagtgctcacacaggttaaggccaccagtccccactaggctgccctcgctttagacacacctgcaggcttgggtgtcctcagaccacatgtacttctcaccaactggctgcaaatttggaggttcccaccatgccctcaagttcgataactcactaaaacaattcacagaatgcagaaaagcatgatactttctttctctttttttttttttttttttttt

SEQ ID NO: 17313 - protein, 32 aa, Homo sapiens
MYFSPTGCKFGGSHHALKFDNSLKQFTECRKA

SEQ ID NO: 17314 - DNA, 691 bp, Homo sapiens
tagggctctggtggcgacggtggcggacacttggggtctggacgcaacggcggcgggagcatgaacgcccctccagccttcgagtcgttcttgctcttcgagggcgagaagatcaccattaacaaggacaccaaggtacccaatgcctgtttattcaccatgaacaaagaagaccacacactgggaaacatcattaaatcacaactcctaaaagacccgcaagtgctatttgctggctacaaagtcccccaccccttggagcacaagatcatcatccgagtgcagaccacgccggactacagcccccaggaagcctttaccaacgccatcaccgacctcatcagcgagctgtccctgctggaggagcgcttccggacgtgcctgcttccccttcgccttctgccgtgattgtcagtttcctgaggcctccccagccacgcttcctgtacagcctgcagaactgtgagtcaattaaacctcttttcttcataaattacccagtttctcatagttctttatagcagtgtgaaaacagactaatggacccttctggttgaaggaatgcagccattctgcttgtttgactatgtcctttctattcatctctatttcctgggaggtgtttatccaagtgcaataggaggtattggtgaccgcacagtcccctcagtgttctgctagtaaatagttg

SEQ ID NO: 17315 - protein, 115 aa, Homo sapiens; identical to SEQ ID NO: 4859

SEQ ID NO: 17316 - DNA, 889 bp, Homo sapiens
ggtggcgacggtggcggacacttggggtctggacgcaacggcggcgggagcatgaacgcccctccagccttcgagtcgttcttgctcttcgagggcgagaagatcaccattaacaaggacaccaaggtacccaatgcctgtttattcaccatgaacaaagaagaccacacactgggaaacatcattaaatcacaactcctaaaagacccgcaagtgctatttgctggctacaaagtcccccaccccttggagcacaagatcatcatccgagtgcagaccacgccggactacagcccccaggaagcctttaccaacgccatcaccgacctcatcagcgagctgtccctgctggaggagcgcttccgggtgagggcagggcctggaggggcagacggggtgggctggacactggcccgtgtgcccaggcctgggacagccctggcctgtttcttcggaggtcctcagggagaggcggcggtgatggaagaacagggacttccaccacaggctccaggacatgtggactgaggggctgtggagtctgggcctgtggctcccgtctgccccatgggacttctgtagtgctgcagggtccctcgggtgctgtgggccagatccgggcggggacctactgtcctttgggggtgctcttctacgtcccttgtcggtgattggcaaggcctggtccttccaggcctctgggaggcagctcaccccagggtggcccacacctgttcctagcagggcgcctgggaatctagaacagtttagaggggaaagagccacagcaaagaaaagccgaggcagggtgatcacgaggtcaggagttcaagaccagcctggcaaacatggtgaagccctgtttctactaaaaatacaaaaattagct

SEQ ID NO: 17317 - protein, 158 aa, Homo sapiens [sequence omitted]

SEQ ID NO: 17318 - DNA, 784 bp, Homo sapiens
ggtggcgacggtggcggacacttggggtctggacgcaacggcggcgggagcatgaacgcccctccagccttcgagtcgttcttgctcttcgagggcgagaaacaactcctaaaagacccgcaagtgctatttgctggctacaaagtcccccaccccttggagcacaagatcatcatccgagtgcagaccacgccggactacagcccccaggaagcctttaccaacgccatcaccgacctcatcagcgagctgtccctgctggaggagcgcttccgggtgagggcagggcctggaggggcagacggggtgggctggacactggcccgtgtgcccaggcctgggacagccctggcctgtttcttcggaggtcctcagggagaggcggcggtgatggaagaacagggacttccaccacaggctccaggacatgtggactgaggggctgtggagtctgggcctgtggctcccgtctgccccatgggacttctgtagtgctgcagggtccctcgggtgctgtgggccagatccgggcggggacctactgtcctttgggggtgctcttctacgtcccttgtcggtgattggcaaggcctggtccttccaggcctctgggaggcagctcaccccagggtggcccacacctgttcctagcagggcgcctgggaatctagaacagtttagaggggaaagagccacagcaaagaaaagccgaggcagggtgatcacgaggtcaggagttcaagaccagcctggcaaacatggtgaagccctgtttctactaaaa

SEQ ID NO: 17319 - protein, 128 aa, Homo sapiens
MNAPPAFESFLLFEGEKQLLKDPQVLFAGYKVPHPLEHKIIIRVQTTPDYSPQEAFTNAITDLISELSLLEERFRVRAGPGGADGVGWTLARVPRPGTALACFFGGPQGEAAVMEEQGLPPQAPGHVD

SEQ ID NO: 17320 - DNA, 784 bp, Homo sapiens
cggcggtggcggacacttggggtctggacgcaacggcggcgggagcatgaacgcccctccagccttcgagtcgttcttgctcttcgagggcgagaagatcaccattaacaaggacaccaaggtacccaatgcctgtttattcaccatgaacaaagaagaccacacactgggaaacatcattaaatcacaactcctaaaagacccgcaagtgctatttgctggctacaaagtcccccaccccttggagcacaagatcatcatccgagtgcagaccacgccggactacagcccccaggaagcctttaccaacgccatcaccgacctcatcagcgagctgtccctgctggaggagcgcttccgggtgagggcagggcctggaggggcagacggggtgggctggacactggcccgtgtgcccaggcctgggacagccctggcctgtttcttcggaggtcctcagggagaggcggcggtgatggaagaacagggacttccaccacaggctccaggacatgtggactgaggggctgtggagtctgggcctgtggctcccgtctgccccatgggacttctgtagtgctgcagggtccctcgggtgctgtgggccagatccgggcggggacctactgtcctttgggggtgctcttctacgtcccttgtcggtgattggcaaggcctggtccttccaggcctctgggaggcagctcaccccagggtggcccacacctgttcctagcagggcgcctgggaatctagaacagtttagaggggaaagagccacagc

SEQ ID NO: 17321 - protein, 158 aa, Homo sapiens [sequence omitted]

SEQ ID NO: 17322 - DNA, 831 bp, Homo sapiens
tctggtggcgacggtggcggacacttggggtctggacgcaacggcggcgggagcatgaacgcccctccagccttcgagtcgttcttgctcttcgagggcgagaagatcaccattaacaaggacaccaaggtacccaatgcctgtttattcaccatgaacaaagaagaccacacactgggaaacatcattaaatcgctggagtgcaatggcacgatcttgctcactgcaacctccgcctcccgggttcaagtgattctcctgcttcagccttcctagtagctgggactacaggcccacgccacgatgcccggctaatttttgtgtttttagtagagacggggattcactgtgttggccaggctggtctcgaactcctgacctcaggtgatccacctgccggcttcccaaagtgctgggattagagacgtgagctactgcgcccggccttacattcaccattaagtgcacattctgtaaatgaacgagcagcagattccagcacagtaggcctgtttgttattcatgctgagggacattgaaaagcagtcaagattagctcccctcatgccacccgtttgtgacctcagtgccacctgggcctctaagatgtatgtggcagagactagaacttctatttaacaagagaaagaagtaggagttctgtggctatccagtgcccctaatgggcaccctgcattggttggtgggtgtttgtttataccagtgaggtcctagccaggtggttggtcagggatgtgtctgccattctggcccagggacttgccattttactgtagacttggctcttccctctggtgccaccagcgaagc

SEQ ID NO: 17323 - protein, 73 aa, Homo sapiens [sequence omitted]

SEQ ID NO: 17324 - DNA, 472 bp, Homo sapiens
ggtggcgacggtggcggacacttggggtctggacgcaacggcggcgggagcatgaacgcccctccagccttcgagtcgttcttgctcttcgagggcgagaagatcaccattaacaaggacaccaaggtacccaatgcctgtttattcaccatgaacaaagaagaccacacactgggaaacatcattaaatcgtaagtttcccgtcacaggctctcaggggctatgtttaatgggcccctctgggcaaagcacaagttccaagtcttcctcagtctctctgagctacaggaagtccttctgggggcttgctctgggcattttataatcttggtacctttttatcaaaatgacaccgacctccatgtcttcacataagccacacttctgtagtggcttattctgtagatgaacacgtgcatttacattcactgtttgtttgtttgtttgtttttgagatggaattttctctctt

SEQ ID NO: 17325 - protein, 47 aa, Homo sapiens
MNAPPAFESFLLFEGEKITINKDTKVPNACLFTMNKEDHTLGNIIKS

SEQ ID NO: 17326 - DNA, 2223 bp, Homo sapiens
gctgtgtggctggcagtgttggccacgtaggggctcccatccccccaccattgtgtcacatgggctgccaggctcagctcccagctgcgtccacagtgacctggatcagggtggggacaaggactggaccctccttctccagaaggccttcagctcttgccttgccatgcagtcacctccttccccctctgaccccagatcccaaaggtgcaccgttgccccagcccctttctggccccatggggtttctctgatgccttcatcatagaggcccggggctggtccgatggttggcaaaacttgactccggcccagtccccactcttggggacttagaacccctgctgtcctgggatctggcctgcctttctttggtcagtccctgtggtcccccaccagctccccctcccatagggctgcccaccaagccctgcccccagcccaagaggagcccccactgcctgcggggcagtgatgtctggccaccggctcacaccaatgacttggtcctggggtggcagaagcagcaggtgacaggagcagggcccctgtccctctcttctggccctgtggtacccaggccacacgttgtgcccgctcttggggctgaccggctgtagggaccaccagccgctgctactgtgggccgccccggggcagggtgggcagggcttttgtgggttatgaggacacagaagtccctgaggcccccagacctggctcagccaacctccttcctcccccggttgccccccactctaaagcctcctccctcccagcgtccactggctccaggctcctcacaacagcagctcatagacacggggcgtctccaggtggtcccagccctccagatgtttctagctctccaggtgggcgctgttttcacgtctgcctgcatccattcattccttcattcctcacctttatcctgttatctctatttttttaagctaccaggaaggaaagggaagaagagatcacgaaactgggacccccagaagggaggagtgggctttgaacttagacatctacctcagagctcaaataggttgtttaaaatcacattcaattttcagatgaaggggaactttatagtttttttttttttttttttttttgagacagagtctcactgtgtttcccagctactcgggaggccaagacagaaggatcaccttgaggccaggagtttaaggccagcctgggcaacatagcaaaacctagtccctaaaattaaaaaaaaaaaaaaaaaaaaaggaaaataaaggagacttgaaatttttgaactaaatagtggtgatggctacacattgtgaatgtaattaacaccactgagttaaacacttaaaatggttaaaatggcaaattgtatgttatacctattttactacaataaaaagtataaaaaagagaagatatttaggtgacttacagcaaccaattgcaacaaaacaaaatgttaagaaatgatctttttatgaggcaattggaaatttgaacactgatcaactataggatgattggaattattaatttttaaaggtgtgataagatactgcacttggctgggcacagtggcacatgcctgtaatcccagctacttggcaggctgaggtgggagaatcgcttgagctcaggagttcgagaccagcctgggcaacgtggcgaaatccccgtctttacaaaaacaaacaaacaaacaaaaaagatattgcagttgtgttgtaagcgtccttatctttcagagctacatagtggaatgtttatggaatatttaggataaatgatataggcatttgggatttgctgcaaaatgacccagaggcaggggtcagggggagaggtagagatgagacaagaggtagaggggagaggtagaggtagccacgagctgataattacagacaagagatgcggagtatgtgggggctcattatcctgcatagtctatctttgtatatctttgaacttttcaagaataaaaaagcttaaaaagtatacatggcctggtcctaccagagactcacccaatgccagcctccagccagggagagccaagtttgcattttcacacgcatctcacactcctctgcactctcaacttggagcgctccaaacagggaaaccccaagccttgctggcttctgccaaccccctgagcagaagcatgggtccccctgatcaccacctcaccaccctcatcctgatctcactgtacac

SEQ ID NO: 17327 - protein, 177 aa, Homo sapiens
MRTQKSLRPPDLAQPTSFLPRLPPTLKPPPSQRPLAPGSSQQQLIDTGRLQVVPALQMFLALQVGAVFTSACIHSFLHSSPLSCYLYFFKLPGRKGKKRSRNWDPQKGGVGFELRHLPQSSNRLFKITFNFQMKGNFIVFFFFFFFETESHCVSQLLGRPRQKDHLEARSLRPAWAT

SEQ ID NO: 17328 - DNA, 5686 bp, Homo sapiens
agtccagcgcccgccgcccgccaccccggaccccggtgtctggcttcccccgagccgggaccccgcgatggccaagcgcagctcgctgtacatccgcatcgtggaggggaagaaccttcccgccaaggacatcactggcagcagcgacccctactgcatcgtgaaggtggacaatgagcccatcatcaggacagccacagtgtggaagaccctgtgccccttctggggtgaggagtaccaagtgcacctgccgcccaccttccacgctgtggctttctatgtcatggatgaggatgccctcagccgggacgacgttatcggaaaggtctgccttacaagggacaccatagcctctcaccctaagggtttcagcgggtgggcccacctgacggaggtcgaccccgatgaggaggtgcagggcgagatccacctgcggctggaagtgtggccaggggcccgggcctgccggctacgctgctctgtgctggaggccagggatctggccccaaaggaccgcaatggcacatctgaccccttcgtccgagtgcgctacaagggccggacacgggagacctcgatcgtgaagaagtcatgctacccacgctggaatgagacgtttgaatttgagctgcaggagggggccatggaggcgctgtgcgtggaggcctgggactgggacctcgtcagccgaaacgacttcctgggcaaagtggtgattgatgtccagagactgcgggtggtgcagcaggaggagggctggttccggctgcagcccgaccagtccaagagccggcggcatgacgagggcaacctgggctccttgcagctggaggtgcggctgcgggacgagacggtgctgccctccagctactaccagccactggtgcacctgctgtgccacgaggtcaagctgggcatgcagggcccagggcagctgatcccactcatcgaggagacaaccagcaccgagtgtcgccaggacgtggccacgaacctgctcaagctcttcctggggcaggggctggccaaggacttcctggacctgctcttccagctggagctgagtcgcaccagtgagaccaacaccctgttccggagcaactctctggcctcaaagtccatggagtcttttctgaaggtggccgggatgcagtacctgcacggcgtcctgggccccatcatcaacaaggtgtttgaggagaagaagtacgtggagctggaccccagcaaagtggaagttaaggatgtagggtgctccgggctgcaccgcccgcagaccgaggccgaggtgctggagcagagcgcgcagacgctgcgcgcccacctgggggccctgctgagcgcgctcagccgctcggttcgcgcgtgccccgccgtggtgcgcgccaccttccgccagctcttccggcgcgtgcgcgagcgcttccccggcgcccagcacgagaatgtaccgttcatcgccgtcaccagcttcctgtgcctgcgcttcttctctcccgccatcatgtcgcccaagctcttccacctgcgggagcgccacgcggacgcccgcaccagccgcaccctgctcctgttggccaaggcagtccagaacgtgggcaacatggacacgccggcttccagggccaaggaggcttggatggagccgctgcagcccaccgtgcgccagggcgtggcgcagctgaaggacttcatcaccaagctcgtggacatcgaggagaaggacgagctggacctgcagcggacgctgagtttgcaggcgccacctgtgaaggaggggccactcttcatccacaggaccaagggcaagggccccctcatgtcctcctccttcaagaagctctacttctccctcactaccgaggccctcagcttcgcgaagacgcccagctccaagtgtgtgaatgagcttaaccagtggctgtctgcgctgcggaaggtgagcatcaacaacaccggactgctgggctcctaccaccctggcgtcttccgtggggacaagtggagctgctgccaccaaaaagagaagacaggtcagggctgcgataagacccggtcacgggtgaccctgcaggagtggaatgaccctcttgaccatgaccttgaggcccagctcatctgccggcacctgctgggcgtggaggccatgctgtgggagaggcaccgggagctgagcgggggcgcagaggcaggcacggtgcccacgagccctggcaaagtccccgaggactcattggcccggctgctccgggtgctgcaggacctccgcgaggcccatagctccagcccggccggctccccaccctcagagcccaactgcctcctggagctgcagacgtgaggcccgccctacgctccccttgctgagtcccctgccaagcgctcggagcccccccaggacactctgcaccccctcaccccggtcctcctcattagggtgcagggcctaggtctcttccaggtgggggaggggggagagtcaggaataaggggatccccagaagtgcagagctgagcaggcttgggcctgtcatggctggccggaagtgtccccagctccctacagacgctgtagccatcactgcctctccagggaccctcctctcctgcccaggacagacccagccagaaccactgctaggatgggccgcacccaggggtctggcctccagggacctagagaatgggagggagaacggggccccaggagacccggccgccaccccacccgctacccttgggtgccacagggctgtgctgttgccaacagtaaacctgctcttactgtccaggctctggggtcttgtgatgagggtctggggagaaagtgggcccggggggaccccggaggctgtcggtggatgtgccgatgatggggctgacagtatgggctctgggcatccctgttcccccctctttcttccccccactcttctggggtcgggggttcctttcccttcccagttgctgtccctgggtcccctctttcatgtcccacaggccacagagcccagtgtgtccaaccagctgttctctcctcaaagcagcccccaagcaagtcccttctctagggtgtccctgaggacagcacagaggcgggactcagagaccccattcctcttcacgcagcccttaccccaagccctctagctgtgtggctggcagtgttggccacgtaggggctcccatccccccaccattgtgtcacatgggctgccaggctcagctcccagctgcgtccacagtgacctggatcagggtggggacaaggactggaccctccttctccagaaggccttcagctcttgccttgccatgcagtcacctccttccccctctgaccccagatcccaaaggtgcaccgttgccccagcccctttctggccccatggggtttctctgatgccttcatcatagaggcccggggctggtccgatggttggcaaaacttgactccggcccagtccccactcttggggacttagaacccctgctgtcctgggatctggcctgcctttctttggtcagtccctgtggtcccccaccagctccccctcccatagggctgcccaccaagccctgcccccagcccaagaggagcccccactgcctgcggggcagtgatgtctggccaccggctcacaccaatgacttggtcctggggtggcagaagcagcaggtgacaggagcagggcccctgtccctctcttctggccctgtggtacccaggccacacgttgtgcccgctcttggggctgaccggctgtagggaccaccagccgctgctactgtgggccgccccggggcagggtgggcagggcttttgtgggttatgaggacacagaagtccctgaggcccccagacctggctcagccaacctccttcctcccccggttgccccccactctaaagcctcctccctcccagcgtccactggctccaggctcctcacaacagcagctcatagacacggggcgtctccaggtggtcccagccctccagatgtttctagctctccaggtgggcgctgttttcacgtctgcctgcatccattcattccttcattcctcacctttatcctgttatctctatttttttaagctaccaggaaggaaagggaagaagagatcacgaaactgggacccccagaagggaggagtgggctttgaacttagacatctacctcagagctcaaataggttgtttaaaatcacattcaattttcagatgaaggggaactttatagtttttttttttttttttttttttgagacagagtctcactgtgttgcccaggctggagtgcaaatggcttgatcttggttcactgcaacctctgcctcccaggttcaagcaattctcttgcctcagcctcccgagtagctgggactaaaggcgtgtgccaccatgcccagctaattcttgtatttttagtagagacggagtttctccatgttggccagactggtctcgaactcctgacctcaggtgatctgaccgccttggcctccgaaagtgctgagattacagttgcgagccactgtgcgtggccagaactttataataagagacttgaagctgggtgtgacggtgcacacctctagtcccagctactcgggaggccaagacagaaggatcaccttgaggccaggagtttaaggccagcctgggcaacatagcaaaacctagtccctaaaattaaaaaaaaaaaaaaaaaaaaaggaaaataaaggagacttgaaatttttgaactaaatagtggtgatggctacacattgtgaatgtaattaacaccactgagttaaacacttaaaatggttaaaatggcaaattgtatgttatacctattttactacaataaaaagtataaaaaagagaagatatttaggtgacttacagcaaccaattgcaacaaaacaaaatgttaagaaatgatctttttatgaggcaattggaaatttgaacactgatcaactataggatgattggaattattaatttttaaaggtgtgataagatactgcacttggctgggcacagtggcacatgcctgtaatcccagctacttggcaggctgaggtgggagaatcgcttgagctcaggagttcgagaccagcctgggcaacgtggcgaaatccccgtctttacaaaaacaaacaaacaaacaaaaaagatattgcagttgtgttgtaagcgtccttatctttcagagctacatagtggaatgtttatggaatatttaggataaatgatataggcatttgggatttgctgcaaaatgacccagaggcaggggtcagggggagaggtagagatgagacaagaggtagaggggagaggtagaggtagccacgagctgataattacagacaagagatgcggagtatgtgggggctcattatcctgcatagtctatctttgtatatctttgaacttttcaagaataaaaaagcttaaaaagtatacatggcctggtcctaccagagactcacccaatgccagcctccagccagggagagccaagtttgcattttcacacgcatctcacactcctctgcactctcaacttggagcgctccaaacagggaaaccccaagccttgctggcttctgccaaccccctgagcagaagcatgggtccccctgatcaccacctcaccaccctcatcctgatctcactgtacac

SEQ ID NO: 17329 - protein, 757 aa, Homo sapiens
MAKRSSLYIRIVEGKNLPAKDITGSSDPYCIVKVDNEPIIRTATVWKTLCPFWGEEYQVHLPPTFHAVAFYVMDEDALSRDDVIGKVCLTRDTIASHPKGFSGWAHLTEVDPDEEVQGEIHLRLEVWPGARACRLRCSVLEARDLAPKDRNGTSDPFVRVRYKGRTRETSIVKKSCYPRWNETFEFELQEGAMEALCVEAWDWDLVSRNDFLGKVVIDVQRLRVVQQEEGWFRLQPDQSKSRRHDEGNLGSLQLEVRLRDETVLPSSYYQPLVHLLCHEVKLGMQGPGQLIPLIEETTSTECRQDVATNLLKLFLGQGLAKDFLDLLFQLELSRTSETNTLFRSNSLASKSMESFLKVAGMQYLHGVLGPIINKVFEEKKYVELDPSKVEVKDVGCSGLHRPQTEAEVLEQSAQTLRAHLGALLSALSRSVRACPAVVRATFRQLFRRVRERFPGAQHENVPFIAVTSFLCLRFFSPAIMSPKLFHLRERHADARTSRTLLLLAKAVQNVGNMDTPASRAKEAWMEPLQPTVRQGVAQLKDFITKLVDIEEKDELDLQRTLSLQAPPVKEGPLFIHRTKGKGPLMSSSFKKLYFSLTTEALSFAKTPSSKCVNELNQWLSALRKVSINNTGLLGSYHPGVFRGDKWSCCHQKEKTGQGCDKTRSRVTLQEWNDPLDHDLEAQLICRHLLGVEAMLWERHRELSGGAEAGTVPTSPGKVPEDSLARLLRVLQDLREAHSSSPAGSPPSEPNCLLELQT

SEQ ID NO: 17330 - DNA, 5824 bp, Homo sapiens
agtccagcgcccgccgcccgccaccccggaccccggtgtctggcttcccccgagccgggaccccgcgatggccaagcgcagctcgctgtacatccgcatcgtggaggggaagaaccttcccgccaaggacatcactggcagcagcgacccctactgcatcgtgaaggtggacaatgagcccatcatcaggacagccacagtgtggaagaccctgtgccccttctggggtgaggagtaccaagtgcacctgccgcccaccttccacgctgtggctttctatgtcatggatgaggatgccctcagccgggacgacgttatcggaaaggtctgccttacaagggacaccatagcctctcaccctaagggtttcagcgggtgggcccacctgacggaggtcgaccccgatgaggaggtgcagggcgagatccacctgcggctggaagtgtggccaggggcccgggcctgccggctacgctgctctgtgctggaggccagggatctggccccaaaggaccgcaatggcacatctgaccccttcgtccgagtgcgctacaagggccggacacgggagacctcgatcgtgaagaagtcatgctacccacgctggaatgagacgtttgaatttgagctgcaggagggggccatggaggcgctgtgcgtggaggcctgggactgggacctcgtcagccgaaacgacttcctgggcaaagtggtgattgatgtccagagactgcgggtggtgcagcaggaggagggctggttccggctgcagcccgaccagtccaagagccggcggcatgacgagggcaacctgggctccttgcagctggaggtgcggctgcgggacgagacggtgctgccctccagctactaccagccactggtgcacctgctgtgccacgaggtcaagctgggcatgcagggcccagggcagctgatcccactcatcgaggagacaaccagcaccgagtgtcgccaggacgtggccacgaacctgctcaagctcttcctggggcaggggctggccaaggacttcctggacctgctcttccagctggagctgagtcgcaccagtgagaccaacaccctgttccggagcaactctctggcctcaaagtccatggagtcttttctgaaggtggccgggatgcagtacctgcacggcgtcctgggccccatcatcaacaaggtgtttgaggagaagaagtacgtggagctggaccccagcaaagtggaagttaaggatgtagggtgctccgggctgcaccgcccgcagaccgaggccgaggtgctggagcagagcgcgcagacgctgcgcgcccacctgggggccctgctgagcgcgctcagccgctcggttcgcgcgtgccccgccgtggtgcgcgccaccttccgccagctcttccggcgcgtgcgcgagcgcttccccggcgcccagcacgagaatgtaccgttcatcgccgtcaccagcttcctgtgcctgcgcttcttctctcccgccatcatgtcgcccaagctcttccacctgcgggagcgccacgcggacgcccgcaccagccgcaccctgctcctgttggccaaggcagtccagaacgtgggcaacatggacacgccggcttccagggccaaggaggcttggatggagccgctgcagcccaccgtgcgccagggcgtggcgcagctgaaggacttcatcaccaagctcgtggacatcgaggagaaggacgagctggacctgcagcggacgctgagtttgcaggcgccacctgtgaaggaggggccactcttcatccacaggaccaagggcaagggccccctcatgtcctcctccttcaagaagctctacttctccctcactaccgaggccctcagcttcgcgaagacgcccagctccaagaaaagcgccctcatcaagttagccaacatccgggcagcggaaaaggttgaggaaaagagctttggcggctcgcacgtcatgcaggtcatctacacggacgacgccggcaggccccagactgcctacctgcagtgcaagtgtgtgaatgagcttaaccagtggctgtctgcgctgcggaaggtgagcatcaacaacaccggactgctgggctcctaccaccctggcgtcttccgtggggacaagtggagctgctgccaccaaaaagagaagacaggtcagggctgcgataagacccggtcacgggtgaccctgcaggagtggaatgaccctcttgaccatgaccttgaggcccagctcatctgccggcacctgctgggcgtggaggccatgctgtgggagaggcaccgggagctgagcgggggcgcagaggcaggcacggtgcccacgagccctggcaaagtccccgaggactcattggcccggctgctccgggtgctgcaggacctccgcgaggcccatagctccagcccggccggctccccaccctcagagcccaactgcctcctggagctgcagacgtgaggcccgccctacgctccccttgctgagtcccctgccaagcgctcggagcccccccaggacactctgcaccccctcaccccggtcctcctcattagggtgcagggcctaggtctcttccaggtgggggaggggggagagtcaggaataaggggatccccagaagtgcagagctgagcaggcttgggcctgtcatggctggccggaagtgtccccagctccctacagacgctgtagccatcactgcctctccagggaccctcctctcctgcccaggacagacccagccagaaccactgctaggatgggccgcacccaggggtctggcctccagggacctagagaatgggagggagaacggggccccaggagacccggccgccaccccacccgctacccttgggtgccacagggctgtgctgttgccaacagtaaacctgctcttactgtccaggctctggggtcttgtgatgagggtctggggagaaagtgggcccggggggaccccggaggctgtcggtggatgtgccgatgatggggctgacagtatgggctctgggcatccctgttcccccctctttcttccccccactcttctggggtcgggggttcctttcccttcccagttgctgtccctgggtcccctctttcatgtcccacaggccacagagcccagtgtgtccaaccagctgttctctcctcaaagcagcccccaagcaagtcccttctctagggtgtccctgaggacagcacagaggcgggactcagagaccccattcctcttcacgcagcccttaccccaagccctctagctgtgtggctggcagtgttggccacgtaggggctcccatccccccaccattgtgtcacatgggctgccaggctcagctcccagctgcgtccacagtgacctggatcagggtggggacaaggactggaccctccttctccagaaggccttcagctcttgccttgccatgcagtcacctccttccccctctgaccccagatcccaaaggtgcaccgttgccccagcccctttctggccccatggggtttctctgatgccttcatcatagaggcccggggctggtccgatggttggcaaaacttgactccggcccagtccccactcttggggacttagaacccctgctgtcctgggatctggcctgcctttctttggtcagtccctgtggtcccccaccagctccccctcccatagggctgcccaccaagccctgcccccagcccaagaggagcccccactgcctgcggggcagtgatgtctggccaccggctcacaccaatgacttggtcctggggtggcagaagcagcaggtgacaggagcagggcccctgtccctctcttctggccctgtggtacccaggccacacgttgtgcccgctcttggggctgaccggctgtagggaccaccagccgctgctactgtgggccgccccggggcagggtgggcagggcttttgtgggttatgaggacacagaagtccctgaggcccccagacctggctcagccaacctccttcctcccccggttgccccccactctaaagcctcctccctcccagcgtccactggctccaggctcctcacaacagcagctcatagacacggggcgtctccaggtggtcccagccctccagatgtttctagctctccaggtgggcgctgttttcacgtctgcctgcatccattcattccttcattcctcacctttatcctgttatctctatttttttaagctaccaggaaggaaagggaagaagagatcacgaaactgggacccccagaagggaggagtgggctttgaacttagacatctacctcagagctcaaataggttgtttaaaatcacattcaattttcagatgaaggggaactttatagtttttttttttttttttttttttgagacagagtctcactgtgttgcccaggctggagtgcaaatggcttgatcttggttcactgcaacctctgcctcccaggttcaagcaattctcttgcctcagcctcccgagtagctgggactaaaggcgtgtgccaccatgcccagctaattcttgtatttttagtagagacggagtttctccatgttggccagactggtctcgaactcctgacctcaggtgatctgaccgccttggcctccgaaagtgctgagattacagttgcgagccactgtgcgtggccagaactttataataagagacttgaagctgggtgtgacggtgcacacctctagtcccagctactcgggaggccaagacagaaggatcaccttgaggccaggagtttaaggccagcctgggcaacatagcaaaacctagtccctaaaattaaaaaaaaaaaaaaaaaaaaaggaaaataaaggagacttgaaatttttgaactaaatagtggtgatggctacacattgtgaatgtaattaacaccactgagttaaacacttaaaatggttaaaatggcaaattgtatgttatacctattttactacaataaaaagtataaaaaagagaagatatttaggtgacttacagcaaccaattgcaacaaaacaaaatgttaagaaatgatctttttatgaggcaattggaaatttgaacactgatcaactataggatgattggaattattaatttttaaaggtgtgataagatactgcacttggctgggcacagtggcacatgcctgtaatcccagctacttggcaggctgaggtgggagaatcgcttgagctcaggagttcgagaccagcctgggcaacgtggcgaaatccccgtctttacaaaaacaaacaaacaaacaaaaaagatattgcagttgtgttgtaagcgtccttatctttcagagctacatagtggaatgtttatggaatatttaggataaatgatataggcatttgggatttgctgcaaaatgacccagaggcaggggtcagggggagaggtagagatgagacaagaggtagaggggagaggtagaggtagccacgagctgataattacagacaagagatgcggagtatgtgggggctcattatcctgcatagtctatctttgtatatctttgaacttttcaagaataaaaaagcttaaaaagtatacatggcctggtcctaccagagactcacccaatgccagcctccagccagggagagccaagtttgcattttcacacgcatctcacactcctctgcactctcaacttggagcgctccaaacagggaaaccccaagccttgctggcttctgccaaccccctgagcagaagcatgggtccccctgatcaccacctcaccaccctcatcctgatctcactgtacac

SEQ ID NO: 17331 - protein, 803 aa, Homo sapiens
MAKRSSLYIRIVEGKNLPAKDITGSSDPYCIVKVDNEPIIRTATVWKTLCPFWGEEYQVHLPPTFHAVAFYVMDEDALSRDDVIGKVCLTRDTIASHPKGFSGWAHLTEVDPDEEVQGEIHLRLEVWPGARACRLRCSVLEARDLAPKDRNGTSDPFVRVRYKGRTRETSIVKKSCYPRWNETFEFELQEGAMEALCVEAWDWDLVSRNDFLGKVVIDVQRLRVVQQEEGWFRLQPDQSKSRRHDEGNLGSLQLEVRLRDETVLPSSYYQPLVHLLCHEVKLGMQGPGQLIPLIEETTSTECRQDVATNLLKLFLGQGLAKDFLDLLFQLELSRTSETNTLFRSNSLASKSMESFLKVAGMQYLHGVLGPIINKVFEEKKYVELDPSKVEVKDVGCSGLHRPQTEAEVLEQSAQTLRAHLGALLSALSRSVRACPAVVRATFRQLFRRVRERFPGAQHENVPFIAVTSFLCLRFFSPAIMSPKLFHLRERHADARTSRTLLLLAKAVQNVGNMDTPASRAKEAWMEPLQPTVRQGVAQLKDFITKLVDIEEKDELDLQRTLSLQAPPVKEGPLFIHRTKGKGPLMSSSFKKLYFSLTTEALSFAKTPSSKKSALIKLANIRAAEKVEEKSFGGSHVMQVIYTDDAGRPQTAYLQCKCVNELNQWLSALRKVSINNTGLLGSYHPGVFRGDKWSCCHQKEKTGQGCDKTRSRVTLQEWNDPLDHDLEAQLICRHLLGVEAMLWERHRELSGGAEAGTVPTSPGKVPEDSLARLLRVLQDLREAHSSSPAGSPPSEPNCLLELQT

SEQ ID NO: 17332 - DNA, 6476 bp, Homo sapiens
ggggcgatgagccgatccttgggcgggtttgccccgccggagtaatccggaagaggcctcttattagggctctggtggcggcggtggcggacacttggggtctggacgcaacggcggcgggagcatgaacgcccctccagccttcgagtcgttcttgctcttcgagggcgagaagatcaccattaacaaggacaccaaggtacccaaggcctgcttattcaccatcaacaaagaagaccacacactgggaaacatcattaaatcacgtgcctgcttccccttcgccttctgccgtgattgtcagtttcctgaggcctccccagccacgcttcctgtacagcctgcagaactctgccccagagcacatcagctatgtgccccagctctcaaacgacaccttggcggggaggctcaccctgtccaccttcacgctggagcagcctctaggccagttcagcagccacaacatctctgacttggataccatctggctggtggtggccctcagcaacgccacccagagcttcacggccccacggacaaaccaggacatccctgctcctgccaacttctcccagaggggctactatctcacactgagggccaaccgggtgctgtaccagaccagaggccagctccatgtcctccgcgtcggcaatgatacccactgccaaccaacaaaaattggctgcaaccatcccctaccaggacccggcccctacagggtgaagttcctggtgatgaatgacgaaggacccgtggctgaaaccaagtggtccagcgacactcgcctgcagcaagcccaggcacttcgggctgtccccggcccccagagcccgggcaccgtggtcatcatcgccatcctgtctatcctcctggccgtcctcctcacggtcctcctggctgtgctcatatacacctgcactggcagcagcgacccctactgcatcgtgaaggtggacaatgagcccatcatcaggacagccacagtgtggaagaccctgtgccccttctggggtgaggagtaccaagtgcacctgccgcccaccttccacgctgtggctttctatgtcatggatgaggatgccctcagccgggacgacgttatcggaaaggtctgccttacaagggacaccatagcctctcaccctaagggtttcagcgggtgggcccacctgacggaggtcgaccccgatgaggaggtgcagggcgagatccacctgcggctggaagtgtggccaggggcccgggcctgccggctacgctgctctgtgctggaggccagggatctggccccaaaggaccgcaatggcacatctgaccccttcgtccgagtgcgctacaagggccggacacgggagacctcgatcgtgaagaagtcatgctacccacgctggaatgagacgtttgaatttgagctgcaggagggggccatggaggcgctgtgcgtggaggcctgggactgggacctcgtcagccgaaacgacttcctgggcaaagtggtgattgatgtccagagactgcgggtggtgcagcaggaggagggctggttccggctgcagcccgaccagtccaagagccggcggcatgacgagggcaacctgggctccttgcagctggaggtgcggctgcgggacgagacggtgctgccctccagctactaccagccactggtgcacctgctgtgccacgaggtcaagctgggcatgcagggcccagggcagctgatcccactcatcgaggagacaaccagcaccgagtgtcgccaggacgtggccacgaacctgctcaagctcttcctggggcaggggctggccaaggacttcctggacctgctcttccagctggagctgagtcgcaccagtgagaccaacaccctgttccggagcaactctctggcctcaaagtccatggagtcttttctgaaggtggccgggatgcagtacctgcacggcgtcctgggccccatcatcaacaaggtgtttgaggagaagaagtacgtggagctggaccccagcaaagtggaagttaaggatgtagggtgctccgggctgcaccgcccgcagaccgaggccgaggtgctggagcagagcgcgcagacgctgcgcgcccacctgggggccctgctgagcgcgctcagccgctcggttcgcgcgtgccccgccgtggtgcgcgccaccttccgccagctcttccggcgcgtgcgcgagcgcttccccggcgcccagcacgagaatgtaccgttcatcgccgtcaccagcttcctgtgcctgcgcttcttctctcccgccatcatgtcgcccaagctcttccacctgcgggagcgccacgcggacgcccgcaccagccgcaccctgctcctgttggccaaggcagtccagaacgtgggcaacatggacacgccggcttccagggccaaggaggcttggatggagccgctgcagcccaccgtgcgccagggcgtggcgcagctgaaggacttcatcaccaagctcgtggacatcgaggagaaggacgagctggacctgcagcggacgctgagtttgcaggcgccacctgtgaaggaggggccactcttcatccacaggaccaagggcaagggccccctcatgtcctcctccttcaagaagctctacttctccctcactaccgaggccctcagcttcgcgaagacgcccagctccaagtgtgtgaatgagcttaaccagtggctgtctgcgctgcggaaggtgagcatcaacaacaccggactgctgggctcctaccaccctggcgtcttccgtggggacaagtggagctgctgccaccaaaaagagaagacaggtcagggctgcgataagacccggtcacgggtgaccctgcaggagtggaatgaccctcttgaccatgaccttgaggcccagctcatctgccggcacctgctgggcgtggaggccatgctgtgggagaggcaccgggagctgagcgggggcgcagaggcaggcacggtgcccacgagccctggcaaagtccccgaggactcattggcccggctgctccgggtgctgcaggacctccgcgaggcccatagctccagcccggccggctccccaccctcagagcccaactgcctcctggagctgcagacgtgaggcccgccctacgctccccttgctgagtcccctgccaagcgctcggagcccccccaggacactctgcaccccctcaccccggtcctcctcattagggtgcagggcctaggtctcttccaggtgggggaggggggagagtcaggaataaggggatccccagaagtgcagagctgagcaggcttgggcctgtcatggctggccggaagtgtccccagctccctacagacgctgtagccatcactgcctctccagggaccctcctctcctgcccaggacagacccagccagaaccactgctaggatgggccgcacccaggggtctggcctccagggacctagagaatgggagggagaacggggccccaggagacccggccgccaccccacccgctacccttgggtgccacagggctgtgctgttgccaacagtaaacctgctcttactgtccaggctctggggtcttgtgatgagggtctggggagaaagtgggcccggggggaccccggaggctgtcggtggatgtgccgatgatggggctgacagtatgggctctgggcatccctgttcccccctctttcttccccccactcttctggggtcgggggttcctttcccttcccagttgctgtccctgggtcccctctttcatgtcccacaggccacagagcccagtgtgtccaaccagctgttctctcctcaaagcagcccccaagcaagtcccttctctagggtgtccctgaggacagcacagaggcgggactcagagaccccattcctcttcacgcagcccttaccccaagccctctagctgtgtggctggcagtgttggccacgtaggggctcccatccccccaccattgtgtcacatgggctgccaggctcagctcccagctgcgtccacagtgacctggatcagggtggggacaaggactggaccctccttctccagaaggccttcagctcttgccttgccatgcagtcacctccttccccctctgaccccagatcccaaaggtgcaccgttgccccagcccctttctggccccatggggtttctctgatgccttcatcatagaggcccggggctggtccgatggttggcaaaacttgactccggcccagtccccactcttggggacttagaacccctgctgtcctgggatctggcctgcctttctttggtcagtccctgtggtcccccaccagctccccctcccatagggctgcccaccaagccctgcccccagcccaagaggagcccccactgcctgcggggcagtgatgtctggccaccggctcacaccaatgacttggtcctggggtggcagaagcagcaggtgacaggagcagggcccctgtccctctcttctggccctgtggtacccaggccacacgttgtgcccgctcttggggctgaccggctgtagggaccaccagccgctgctactgtgggccgccccggggcagggtgggcagggcttttgtgggttatgaggacacagaagtccctgaggcccccagacctggctcagccaacctccttcctcccccggttgccccccactctaaagcctcctccctcccagcgtccactggctccaggctcctcacaacagcagctcatagacacggggcgtctccaggtggtcccagccctccagatgtttctagctctccaggtgggcgctgttttcacgtctgcctgcatccattcattccttcattcctcacctttatcctgttatctctatttttttaagctaccaggaaggaaagggaagaagagatcacgaaactgggacccccagaagggaggagtgggctttgaacttagacatctacctcagagctcaaataggttgtttaaaatcacattcaattttcagatgaaggggaactttatagtttttttttttttttttttttttgagacagagtctcactgtgttgcccaggctggagtgcaaatggcttgatcttggttcactgcaacctctgcctcccaggttcaagcaattctcttgcctcagcctcccgagtagctgggactaaaggcgtgtgccaccatgcccagctaattcttgtatttttagtagagacggagtttctccatgttggccagactggtctcgaactcctgacctcaggtgatctgaccgccttggcctccgaaagtgctgagattacagttgcgagccactgtgcgtggccagaactttataataagagacttgaagctgggtgtgacggtgcacacctctagtcccagctactcgggaggccaagacagaaggatcaccttgaggccaggagtttaaggccagcctgggcaacatagcaaaacctagtccctaaaattaaaaaaaaaaaaaaaaaaaaaggaaaataaaggagacttgaaatttttgaactaaatagtggtgatggctacacattgtgaatgtaattaacaccactgagttaaacacttaaaatggttaaaatggcaaattgtatgttatacctattttactacaataaaaagtataaaaaagagaagatatttaggtgacttacagcaaccaattgcaacaaaacaaaatgttaagaaatgatctttttatgaggcaattggaaatttgaacactgatcaactataggatgattggaattattaatttttaaaggtgtgataagatactgcacttggctgggcacagtggcacatgcctgtaatcccagctacttggcaggctgaggtgggagaatcgcttgagctcaggagttcgagaccagcctgggcaacgtggcgaaatccccgtctttacaaaaacaaacaaacaaacaaaaaagatattgcagttgtgttgtaagcgtccttatctttcagagctacatagtggaatgtttatggaatatttaggataaatgatataggcatttgggatttgctgcaaaatgacccagaggcaggggtcagggggagaggtagagatgagacaagaggtagaggggagaggtagaggtagccacgagctgataattacagacaagagatgcggagtatgtgggggctcattatcctgcatagtctatctttgtatatctttgaacttttcaagaataaaaaagcttaaaaagtatacatggcctggtcctaccagagactcacccaatgccagcctccagccagggagagccaagtttgcattttcacacgcatctcacactcctctgcactctcaacttggagcgctccaaacagggaaaccccaagccttgctggcttctgccaaccccctgagcagaagcatgggtccccctgatcaccacctcaccaccctcatcctgatctcactgtacac

SEQ ID NO: 17333 - protein, 796 aa, Homo sapiens
MNDEGPVAETKWSSDTRLQQAQALRAVPGPQSPGTVVIIAILSILLAVLLTVLLAVLIYTCTGSSDPYCIVKVDNEPIIRTATVWKTLCPFWGEEYQVHLPPTFHAVAFYVMDEDALSRDDVIGKVCLTRDTIASHPKGFSGWAHLTEVDPDEEVQGEIHLRLEVWPGARACRLRCSVLEARDLAPKDRNGTSDPFVRVRYKGRTRETSIVKKSCYPRWNETFEFELQEGAMEALCVEAWDWDLVSRNDFLGKVVIDVQRLRVVQQEEGWFRLQPDQSKSRRHDEGNLGSLQLEVRLRDETVLPSSYYQPLVHLLCHEVKLGMQGPGQLIPLIEETTSTECRQDVATNLLKLFLGQGLAKDFLDLLFQLELSRTSETNTLFRSNSLASKSMESFLKVAGMQYLHGVLGPIINKVFEEKKYVELDPSKVEVKDVGCSGLHRPQTEAEVLEQSAQTLRAHLGALLSALSRSVRACPAVVRATFRQLFRRVRERFPGAQHENVPFIAVTSFLCLRFFSPAIMSPKLFHLRERHADARTSRTLLLLAKAVQNVGNMDTPASRAKEAWMEPLQPTVRQGVAQLKDFITKLVDIEEKDELDLQRTLSLQAPPVKEGPLFIHRTKGKGPLMSSSFKKLYFSLTTEALSFAKTPSSKCVNELNQWLSALRKVSINNTGLLGSYHPGVFRGDKWSCCHQKEKTGQGCDKTRSRVTLQEWNDPLDHDLEAQLICRHLLGVEAMLWERHRELSGGAEAGTVPTSPGKVPEDSLARLLRVLQDLREAHSSSPAGSPPSEPNCLLELQT

SEQ ID NO: 17334 - DNA, 6614 bp, Homo sapiens
ggggcgatgagccgatccttgggcgggtttgccccgccggagtaatccggaagaggcctcttattagggctctggtggcggcggtggcggacacttggggtctggacgcaacggcggcgggagcatgaacgcccctccagccttcgagtcgttcttgctcttcgagggcgagaagatcaccattaacaaggacaccaaggtacccaaggcctgcttattcaccatcaacaaagaagaccacacactgggaaacatcattaaatcacgtgcctgcttccccttcgccttctgccgtgattgtcagtttcctgaggcctccccagccacgcttcctgtacagcctgcagaactctgccccagagcacatcagctatgtgccccagctctcaaacgacaccttggcggggaggctcaccctgtccaccttcacgctggagcagcctctaggccagttcagcagccacaacatctctgacttggataccatctggctggtggtggccctcagcaacgccacccagagcttcacggccccacggacaaaccaggacatccctgctcctgccaacttctcccagaggggctactatctcacactgagggccaaccgggtgctgtaccagaccagaggccagctccatgtcctccgcgtcggcaatgatacccactgccaaccaacaaaaattggctgcaaccatcccctaccaggacccggcccctacagggtgaagttcctggtgatgaatgacgaaggacccgtggctgaaaccaagtggtccagcgacactcgcctgcagcaagcccaggcacttcgggctgtccccggcccccagagcccgggcaccgtggtcatcatcgccatcctgtctatcctcctggccgtcctcctcacggtcctcctggctgtgctcatatacacctgcactggcagcagcgacccctactgcatcgtgaaggtggacaatgagcccatcatcaggacagccacagtgtggaagaccctgtgccccttctggggtgaggagtaccaagtgcacctgccgcccaccttccacgctgtggctttctatgtcatggatgaggatgccctcagccgggacgacgttatcggaaaggtctgccttacaagggacaccatagcctctcaccctaagggtttcagcgggtgggcccacctgacggaggtcgaccccgatgaggaggtgcagggcgagatccacctgcggctggaagtgtggccaggggcccgggcctgccggctacgctgctctgtgctggaggccagggatctggccccaaaggaccgcaatggcacatctgaccccttcgtccgagtgcgctacaagggccggacacgggagacctcgatcgtgaagaagtcatgctacccacgctggaatgagacgtttgaatttgagctgcaggagggggccatggaggcgctgtgcgtggaggcctgggactgggacctcgtcagccgaaacgacttcctgggcaaagtggtgattgatgtccagagactgcgggtggtgcagcaggaggagggctggttccggctgcagcccgaccagtccaagagccggcggcatgacgagggcaacctgggctccttgcagctggaggtgcggctgcgggacgagacggtgctgccctccagctactaccagccactggtgcacctgctgtgccacgaggtcaagctgggcatgcagggcccagggcagctgatcccactcatcgaggagacaaccagcaccgagtgtcgccaggacgtggccacgaacctgctcaagctcttcctggggcaggggctggccaaggacttcctggacctgctcttccagctggagctgagtcgcaccagtgagaccaacaccctgttccggagcaactctctggcctcaaagtccatggagtcttttctgaaggtggccgggatgcagtacctgcacggcgtcctgggccccatcatcaacaaggtgtttgaggagaagaagtacgtggagctggaccccagcaaagtggaagttaaggatgtagggtgctccgggctgcaccgcccgcagaccgaggccgaggtgctggagcagagcgcgcagacgctgcgcgcccacctgggggccctgctgagcgcgctcagccgctcggttcgcgcgtgccccgccgtggtgcgcgccaccttccgccagctcttccggcgcgtgcgcgagcgcttccccggcgcccagcacgagaatgtaccgttcatcgccgtcaccagcttcctgtgcctgcgcttcttctctcccgccatcatgtcgcccaagctcttccacctgcgggagcgccacgcggacgcccgcaccagccgcaccctgctcctgttggccaaggcagtccagaacgtgggcaacatggacacgccggcttccagggccaaggaggcttggatggagccgctgcagcccaccgtgcgccagggcgtggcgcagctgaaggacttcatcaccaagctcgtggacatcgaggagaaggacgagctggacctgcagcggacgctgagtttgcaggcgccacctgtgaaggaggggccactcttcatccacaggaccaagggcaagggccccctcatgtcctcctccttcaagaagctctacttctccctcactaccgaggccctcagcttcgcgaagacgcccagctccaagaaaagcgccctcatcaagttagccaacatccgggcagcggaaaaggttgaggaaaagagctttggcggctcgcacgtcatgcaggtcatctacacggacgacgccggcaggccccagactgcctacctgcagtgcaagtgtgtgaatgagcttaaccagtggctgtctgcgctgcggaaggtgagcatcaacaacaccggactgctgggctcctaccaccctggcgtcttccgtggggacaagtggagctgctgccaccaaaaagagaagacaggtcagggctgcgataagacccggtcacgggtgaccctgcaggagtggaatgaccctcttgaccatgaccttgaggcccagctcatctgccggcacctgctgggcgtggaggccatgctgtgggagaggcaccgggagctgagcgggggcgcagaggcaggcacggtgcccacgagccctggcaaagtccccgaggactcattggcccggctgctccgggtgctgcaggacctccgcgaggcccatagctccagcccggccggctccccaccctcagagcccaactgcctcctggagctgcagacgtgaggcccgccctacgctccccttgctgagtcccctgccaagcgctcggagcccccccaggacactctgcaccccctcaccccggtcctcctcattagggtgcagggcctaggtctcttccaggtgggggaggggggagagtcaggaataaggggatccccagaagtgcagagctgagcaggcttgggcctgtcatggctggccggaagtgtccccagctccctacagacgctgtagccatcactgcctctccagggaccctcctctcctgcccaggacagacccagccagaaccactgctaggatgggccgcacccaggggtctggcctccagggacctagagaatgggagggagaacggggccccaggagacccggccgccaccccacccgctacccttgggtgccacagggctgtgctgttgccaacagtaaacctgctcttactgtccaggctctggggtcttgtgatgagggtctggggagaaagtgggcccggggggaccccggaggctgtcggtggatgtgccgatgatggggctgacagtatgggctctgggcatccctgttcccccctctttcttccccccactcttctggggtcgggggttcctttcccttcccagttgctgtccctgggtcccctctttcatgtcccacaggccacagagcccagtgtgtccaaccagctgttctctcctcaaagcagcccccaagcaagtcccttctctagggtgtccctgaggacagcacagaggcgggactcagagaccccattcctcttcacgcagcccttaccccaagccctctagctgtgtggctggcagtgttggccacgtaggggctcccatccccccaccattgtgtcacatgggctgccaggctcagctcccagctgcgtccacagtgacctggatcagggtggggacaaggactggaccctccttctccagaaggccttcagctcttgccttgccatgcagtcacctccttccccctctgaccccagatcccaaaggtgcaccgttgccccagcccctttctggccccatggggtttctctgatgccttcatcatagaggcccggggctggtccgatggttggcaaaacttgactccggcccagtccccactcttggggacttagaacccctgctgtcctgggatctggcctgcctttctttggtcagtccctgtggtcccccaccagctccccctcccatagggctgcccaccaagccctgcccccagcccaagaggagcccccactgcctgcggggcagtgatgtctggccaccggctcacaccaatgacttggtcctggggtggcagaagcagcaggtgacaggagcagggcccctgtccctctcttctggccctgtggtacccaggccacacgttgtgcccgctcttggggctgaccggctgtagggaccaccagccgctgctactgtgggccgccccggggcagggtgggcagggcttttgtgggttatgaggacacagaagtccctgaggcccccagacctggctcagccaacctccttcctcccccggttgccccccactctaaagcctcctccctcccagcgtccactggctccaggctcctcacaacagcagctcatagacacggggcgtctccaggtggtcccagccctccagatgtttctagctctccaggtgggcgctgttttcacgtctgcctgcatccattcattccttcattcctcacctttatcctgttatctctatttttttaagctaccaggaaggaaagggaagaagagatcacgaaactgggacccccagaagggaggagtgggctttgaacttagacatctacctcagagctcaaataggttgtttaaaatcacattcaattttcagatgaaggggaactttatagtttttttttttttttttttttttgagacagagtctcactgtgttgcccaggctggagtgcaaatggcttgatcttggttcactgcaacctctgcctcccaggttcaagcaattctcttgcctcagcctcccgagtagctgggactaaaggcgtgtgccaccatgcccagctaattcttgtatttttagtagagacggagtttctccatgttggccagactggtctcgaactcctgacctcaggtgatctgaccgccttggcctccgaaagtgctgagattacagttgcgagccactgtgcgtggccagaactttataataagagacttgaagctgggtgtgacggtgcacacctctagtcccagctactcgggaggccaagacagaaggatcaccttgaggccaggagtttaaggccagcctgggcaacatagcaaaacctagtccctaaaattaaaaaaaaaaaaaaaaaaaaaggaaaataaaggagacttgaaatttttgaactaaatagtggtgatggctacacattgtgaatgtaattaacaccactgagttaaacacttaaaatggttaaaatggcaaattgtatgttatacctattttactacaataaaaagtataaaaaagagaagatatttaggtgacttacagcaaccaattgcaacaaaacaaaatgttaagaaatgatctttttatgaggcaattggaaatttgaacactgatcaactataggatgattggaattattaatttttaaaggtgtgataagatactgcacttggctgggcacagtggcacatgcctgtaatcccagctacttggcaggctgaggtgggagaatcgcttgagctcaggagttcgagaccagcctgggcaacgtggcgaaatccccgtctttacaaaaacaaacaaacaaacaaaaaagatattgcagttgtgttgtaagcgtccttatctttcagagctacatagtggaatgtttatggaatatttaggataaatgatataggcatttgggatttgctgcaaaatgacccagaggcaggggtcagggggagaggtagagatgagacaagaggtagaggggagaggtagaggtagccacgagctgataattacagacaagagatgcggagtatgtgggggctcattatcctgcatagtctatctttgtatatctttgaacttttcaagaataaaaaagcttaaaaagtatacatggcctggtcctaccagagactcacccaatgccagcctccagccagggagagccaagtttgcattttcacacgcatctcacactcctctgcactctcaacttggagcgctccaaacagggaaaccccaagccttgctggcttctgccaaccccctgagcagaagcatgggtccccctgatcaccacctcaccaccctcatcctgatctcactgtacac

SEQ ID NO: 17335 - protein, 842 aa, Homo sapiens
MNDEGPVAETKWSSDTRLQQAQALRAVPGPQSPGTVVIIAILSILLAVLLTVLLAVLIYTCTGSSDPYCIVKVDNEPIIRTATVWKTLCPFWGEEYQVHLPPTFHAVAFYVMDEDALSRDDVIGKVCLTRDTIASHPKGFSGWAHLTEVDPDEEVQGEIHLRLEVWPGARACRLRCSVLEARDLAPKDRNGTSDPFVRVRYKGRTRETSIVKKSCYPRWNETFEFELQEGAMEALCVEAWDWDLVSRNDFLGKVVIDVQRLRVVQQEEGWFRLQPDQSKSRRHDEGNLGSLQLEVRLRDETVLPSSYYQPLVHLLCHEVKLGMQGPGQLIPLIEETTSTECRQDVATNLLKLFLGQGLAKDFLDLLFQLELSRTSETNTLFRSNSLASKSMESFLKVAGMQYLHGVLGPIINKVFEEKKYVELDPSKVEVKDVGCSGLHRPQTEAEVLEQSAQTLRAHLGALLSALSRSVRACPAVVRATFRQLFRRVRERFPGAQHENVPFIAVTSFLCLRFFSPAIMSPKLFHLRERHADARTSRTLLLLAKAVQNVGNMDTPASRAKEAWMEPLQPTVRQGVAQLKDFITKLVDIEEKDELDLQRTLSLQAPPVKEGPLFIHRTKGKGPLMSSSFKKLYFSLTTEALSFAKTPSSKKSALIKLANIRAAEKVEEKSFGGSHVMQVIYTDDAGRPQTAYLQCKCVNELNQWLSALRKVSINNTGLLGSYHPGVFRGDKWSCCHQKEKTGQGCDKTRSRVTLQEWNDPLDHDLEAQLICRHLLGVEAMLWERHRELSGGAEAGTVPTSPGKVPEDSLARLLRVLQDLREAHSSSPAGSPPSEPNCLLELQT

SEQ ID NO: 17336 - DNA, 2002 bp, Homo sapiens
gctgtgtggctggcagtgttggccacgtaggggctcccatccccccaccattgtgtcacatgggctgccaggctcagctcccagctgcgtccacagtgacctggatcagggtggggacaaggactggaccctccttctccagaaggccttcagctcttgccttgccatgcagtcacctccttccccctctgaccccagatcccaaaggtgcaccgttgccccagcccctttctggccccatggggtttctctgatgccttcatcatagaggcccggggctggtccgatggttggcaaaacttgactccggcccagtccccactcttggggacttagaacccctgctgtcctgggatctggcctgcctttctttggtcagtccctgtggtcccccaccagctccccctcccatagggctgcccaccaagccctgcccccagcccaagaggagcccccactgcctgcggggcagtgatgtctggccaccggctcacaccaatgacttggtcctggggtggcagaagcagcaggtgacaggagcagggcccctgtccctctcttctggccctgtggtacccaggccacacgttgtgcccgctcttggggctgaccggctgtagggaccaccagccgctgctactgtgggccgccccggggcagggtgggcagggcttttgtgggttatgaggacacagaagtccctgaggcccccagacctggctcagccaacctccttcctcccccggttgccccccactctaaagcctcctccctcccagcgtccactggctccaggctcctcacaacagcagctcatagacacggggcgtctccaggtggtcccagccctccagatgtttctagctctccaggtgggcgctgttttcacgtctgcctgcatccattcattccttcattcctcacctttatcctgttatctctatttttttaagctaccaggaaggaaagggaagaagagatcacgaaactgggacccccagaagggaggagtgggctttgaacttagacatctacctcagagctcaaataggttgtttaaaatcacattcaattttcagatgaaggggaactttatagtttttttttttttttttttttttgagacagagtctcactgtgtttcccagctactcgggaggccaagacagaaggatcaccttgaggccaggagtttaaggccagcctgggcaacatagcaaaacctagtccctaaaattaaaaaaaaaaaaaaaaaaaaaggaaaataaaggagacttgaaatttttgaactaaatagtggtgatggctacacattgtgaatgtaattaacaccactgagttaaacacttaaaatggttaaaatggcaaattgtatgttatacctattttactacaataaaaagtataaaaaagagaagatatttaggtgacttacagcaaccaattgcaacaaaacaaaatgttaagaaatgatctttttatgaggcaattggaaatttgaacactgatcaactataggatgattggaattattaatttttaaaggtgtgataagatactgcacttggctgggcacagtggcacatgcctgtaatcccagctacttggcaggctgaggtgggagaatcgcttgagctcaggagttcgagaccagcctgggcaacgtggcgaaatccccgtctttacaaaaacaaacaaacaaacaaaaaagatattgcagttgtgttgtaagcgtccttatctttcagagctacatagtggaatgtttatggaatatttaggataaatgatataggcatttgggatttgctgcaaaatgacccagaggcaggggtcagggggagaggtagagatgagacaagaggtagaggggagaggtagaggtagccacgagctgataattacagacaagagatgcggagtatgtgggggctcattatcctgcatagtctatctttgtatatctttgaacttttcaagaataaaaaagcttaaaaagtat

SEQ ID NO: 17337 - protein, 177 aa, Homo sapiens; identical to SEQ ID NO: 17327

SEQ ID NO: 17338 - DNA, 5465 bp, Homo sapiens
agtccagcgcccgccgcccgccaccccggaccccggtgtctggcttcccccgagccgggaccccgcgatggccaagcgcagctcgctgtacatccgcatcgtggaggggaagaaccttcccgccaaggacatcactggcagcagcgacccctactgcatcgtgaaggtggacaatgagcccatcatcaggacagccacagtgtggaagaccctgtgccccttctggggtgaggagtaccaagtgcacctgccgcccaccttccacgctgtggctttctatgtcatggatgaggatgccctcagccgggacgacgttatcggaaaggtctgccttacaagggacaccatagcctctcaccctaagggtttcagcgggtgggcccacctgacggaggtcgaccccgatgaggaggtgcagggcgagatccacctgcggctggaagtgtggccaggggcccgggcctgccggctacgctgctctgtgctggaggccagggatctggccccaaaggaccgcaatggcacatctgaccccttcgtccgagtgcgctacaagggccggacacgggagacctcgatcgtgaagaagtcatgctacccacgctggaatgagacgtttgaatttgagctgcaggagggggccatggaggcgctgtgcgtggaggcctgggactgggacctcgtcagccgaaacgacttcctgggcaaagtggtgattgatgtccagagactgcgggtggtgcagcaggaggagggctggttccggctgcagcccgaccagtccaagagccggcggcatgacgagggcaacctgggctccttgcagctggaggtgcggctgcgggacgagacggtgctgccctccagctactaccagccactggtgcacctgctgtgccacgaggtcaagctgggcatgcagggcccagggcagctgatcccactcatcgaggagacaaccagcaccgagtgtcgccaggacgtggccacgaacctgctcaagctcttcctggggcaggggctggccaaggacttcctggacctgctcttccagctggagctgagtcgcaccagtgagaccaacaccctgttccggagcaactctctggcctcaaagtccatggagtcttttctgaaggtggccgggatgcagtacctgcacggcgtcctgggccccatcatcaacaaggtgtttgaggagaagaagtacgtggagctggaccccagcaaagtggaagttaaggatgtagggtgctccgggctgcaccgcccgcagaccgaggccgaggtgctggagcagagcgcgcagacgctgcgcgcccacctgggggccctgctgagcgcgctcagccgctcggttcgcgcgtgccccgccgtggtgcgcgccaccttccgccagctcttccggcgcgtgcgcgagcgcttccccggcgcccagcacgagaatgtaccgttcatcgccgtcaccagcttcctgtgcctgcgcttcttctctcccgccatcatgtcgcccaagctcttccacctgcgggagcgccacgcggacgcccgcaccagccgcaccctgctcctgttggccaaggcagtccagaacgtgggcaacatggacacgccggcttccagggccaaggaggcttggatggagccgctgcagcccaccgtgcgccagggcgtggcgcagctgaaggacttcatcaccaagctcgtggacatcgaggagaaggacgagctggacctgcagcggacgctgagtttgcaggcgccacctgtgaaggaggggccactcttcatccacaggaccaagggcaagggccccctcatgtcctcctccttcaagaagctctacttctccctcactaccgaggccctcagcttcgcgaagacgcccagctccaagtgtgtgaatgagcttaaccagtggctgtctgcgctgcggaaggtgagcatcaacaacaccggactgctgggctcctaccaccctggcgtcttccgtggggacaagtggagctgctgccaccaaaaagagaagacaggtcagggctgcgataagacccggtcacgggtgaccctgcaggagtggaatgaccctcttgaccatgaccttgaggcccagctcatctgccggcacctgctgggcgtggaggccatgctgtgggagaggcaccgggagctgagcgggggcgcagaggcaggcacggtgcccacgagccctggcaaagtccccgaggactcattggcccggctgctccgggtgctgcaggacctccgcgaggcccatagctccagcccggccggctccccaccctcagagcccaactgcctcctggagctgcagacgtgaggcccgccctacgctccccttgctgagtcccctgccaagcgctcggagcccccccaggacactctgcaccccctcaccccggtcctcctcattagggtgcagggcctaggtctcttccaggtgggggaggggggagagtcaggaataaggggatccccagaagtgcagagctgagcaggcttgggcctgtcatggctggccggaagtgtccccagctccctacagacgctgtagccatcactgcctctccagggaccctcctctcctgcccaggacagacccagccagaaccactgctaggatgggccgcacccaggggtctggcctccagggacctagagaatgggagggagaacggggccccaggagacccggccgccaccccacccgctacccttgggtgccacagggctgtgctgttgccaacagtaaacctgctcttactgtccaggctctggggtcttgtgatgagggtctggggagaaagtgggcccggggggaccccggaggctgtcggtggatgtgccgatgatggggctgacagtatgggctctgggcatccctgttcccccctctttcttccccccactcttctggggtcgggggttcctttcccttcccagttgctgtccctgggtcccctctttcatgtcccacaggccacagagcccagtgtgtccaaccagctgttctctcctcaaagcagcccccaagcaagtcccttctctagggtgtccctgaggacagcacagaggcgggactcagagaccccattcctcttcacgcagcccttaccccaagccctctagctgtgtggctggcagtgttggccacgtaggggctcccatccccccaccattgtgtcacatgggctgccaggctcagctcccagctgcgtccacagtgacctggatcagggtggggacaaggactggaccctccttctccagaaggccttcagctcttgccttgccatgcagtcacctccttccccctctgaccccagatcccaaaggtgcaccgttgccccagcccctttctggccccatggggtttctctgatgccttcatcatagaggcccggggctggtccgatggttggcaaaacttgactccggcccagtccccactcttggggacttagaacccctgctgtcctgggatctggcctgcctttctttggtcagtccctgtggtcccccaccagctccccctcccatagggctgcccaccaagccctgcccccagcccaagaggagcccccactgcctgcggggcagtgatgtctggccaccggctcacaccaatgacttggtcctggggtggcagaagcagcaggtgacaggagcagggcccctgtccctctcttctggccctgtggtacccaggccacacgttgtgcccgctcttggggctgaccggctgtagggaccaccagccgctgctactgtgggccgccccggggcagggtgggcagggcttttgtgggttatgaggacacagaagtccctgaggcccccagacctggctcagccaacctccttcctcccccggttgccccccactctaaagcctcctccctcccagcgtccactggctccaggctcctcacaacagcagctcatagacacggggcgtctccaggtggtcccagccctccagatgtttctagctctccaggtgggcgctgttttcacgtctgcctgcatccattcattccttcattcctcacctttatcctgttatctctatttttttaagctaccaggaaggaaagggaagaagagatcacgaaactgggacccccagaagggaggagtgggctttgaacttagacatctacctcagagctcaaataggttgtttaaaatcacattcaattttcagatgaaggggaactttatagtttttttttttttttttttttttgagacagagtctcactgtgttgcccaggctggagtgcaaatggcttgatcttggttcactgcaacctctgcctcccaggttcaagcaattctcttgcctcagcctcccgagtagctgggactaaaggcgtgtgccaccatgcccagctaattcttgtatttttagtagagacggagtttctccatgttggccagactggtctcgaactcctgacctcaggtgatctgaccgccttggcctccgaaagtgctgagattacagttgcgagccactgtgcgtggccagaactttataataagagacttgaagctgggtgtgacggtgcacacctctagtcccagctactcgggaggccaagacagaaggatcaccttgaggccaggagtttaaggccagcctgggcaacatagcaaaacctagtccctaaaattaaaaaaaaaaaaaaaaaaaaaggaaaataaaggagacttgaaatttttgaactaaatagtggtgatggctacacattgtgaatgtaattaacaccactgagttaaacacttaaaatggttaaaatggcaaattgtatgttatacctattttactacaataaaaagtataaaaaagagaagatatttaggtgacttacagcaaccaattgcaacaaaacaaaatgttaagaaatgatctttttatgaggcaattggaaatttgaacactgatcaactataggatgattggaattattaatttttaaaggtgtgataagatactgcacttggctgggcacagtggcacatgcctgtaatcccagctacttggcaggctgaggtgggagaatcgcttgagctcaggagttcgagaccagcctgggcaacgtggcgaaatccccgtctttacaaaaacaaacaaacaaacaaaaaagatattgcagttgtgttgtaagcgtccttatctttcagagctacatagtggaatgtttatggaatatttaggataaatgatataggcatttgggatttgctgcaaaatgacccagaggcaggggtcagggggagaggtagagatgagacaagaggtagaggggagaggtagaggtagccacgagctgataattacagacaagagatgcggagtatgtgggggctcattatcctgcatagtctatctttgtatatctttgaacttttcaagaataaaaaagcttaaaaagtat

SEQ ID NO: 17339 - protein, 757 aa, Homo sapiens; identical to SEQ ID NO: 17329

SEQ ID NO: 17340 - DNA, 5603 bp, Homo sapiens
agtccagcgcccgccgcccgccaccccggaccccggtgtctggcttcccccgagccgggaccccgcgatggccaagcgcagctcgctgtacatccgcatcgtggaggggaagaaccttcccgccaaggacatcactggcagcagcgacccctactgcatcgtgaaggtggacaatgagcccatcatcaggacagccacagtgtggaagaccctgtgccccttctggggtgaggagtaccaagtgcacctgccgcccaccttccacgctgtggctttctatgtcatggatgaggatgccctcagccgggacgacgttatcggaaaggtctgccttacaagggacaccatagcctctcaccctaagggtttcagcgggtgggcccacctgacggaggtcgaccccgatgaggaggtgcagggcgagatccacctgcggctggaagtgtggccaggggcccgggcctgccggctacgctgctctgtgctggaggccagggatctggccccaaaggaccgcaatggcacatctgaccccttcgtccgagtgcgctacaagggccggacacgggagacctcgatcgtgaagaagtcatgctacccacgctggaatgagacgtttgaatttgagctgcaggagggggccatggaggcgctgtgcgtggaggcctgggactgggacctcgtcagccgaaacgacttcctgggcaaagtggtgattgatgtccagagactgcgggtggtgcagcaggaggagggctggttccggctgcagcccgaccagtccaagagccggcggcatgacgagggcaacctgggctccttgcagctggaggtgcggctgcgggacgagacggtgctgccctccagctactaccagccactggtgcacctgctgtgccacgaggtcaagctgggcatgcagggcccagggcagctgatcccactcatcgaggagacaaccagcaccgagtgtcgccaggacgtggccacgaacctgctcaagctcttcctggggcaggggctggccaaggacttcctggacctgctcttccagctggagctgagtcgcaccagtgagaccaacaccctgttccggagcaactctctggcctcaaagtccatggagtcttttctgaaggtggccgggatgcagtacctgcacggcgtcctgggccccatcatcaacaaggtgtttgaggagaagaagtacgtggagctggaccccagcaaagtggaagttaaggatgtagggtgctccgggctgcaccgcccgcagaccgaggccgaggtgctggagcagagcgcgcagacgctgcgcgcccacctgggggccctgctgagcgcgctcagccgctcggttcgcgcgtgccccgccgtggtgcgcgccaccttccgccagctcttccggcgcgtgcgcgagcgcttccccggcgcccagcacgagaatgtaccgttcatcgccgtcaccagcttcctgtgcctgcgcttcttctctcccgccatcatgtcgcccaagctcttccacctgcgggagcgccacgcggacgcccgcaccagccgcaccctgctcctgttggccaaggcagtccagaacgtgggcaacatggacacgccggcttccagggccaaggaggcttggatggagccgctgcagcccaccgtgcgccagggcgtggcgcagctgaaggacttcatcaccaagctcgtggacatcgaggagaaggacgagctggacctgcagcggacgctgagtttgcaggcgccacctgtgaaggaggggccactcttcatccacaggaccaagggcaagggccccctcatgtcctcctccttcaagaagctctacttctccctcactaccgaggccctcagcttcgcgaagacgcccagctccaagaaaagcgccctcatcaagttagccaacatccgggcagcggaaaaggttgaggaaaagagctttggcggctcgcacgtcatgcaggtcatctacacggacgacgccggcaggccccagactgcctacctgcagtgcaagtgtgtgaatgagcttaaccagtggctgtctgcgctgcggaaggtgagcatcaacaacaccggactgctgggctcctaccaccctggcgtcttccgtggggacaagtggagctgctgccaccaaaaagagaagacaggtcagggctgcgataagacccggtcacgggtgaccctgcaggagtggaatgaccctcttgaccatgaccttgaggcccagctcatctgccggcacctgctgggcgtggaggccatgctgtgggagaggcaccgggagctgagcgggggcgcagaggcaggcacggtgcccacgagccctggcaaagtccccgaggactcattggcccggctgctccgggtgctgcaggacctccgcgaggcccatagctccagcccggccggctccccaccctcagagcccaactgcctcctggagctgcagacgtgaggcccgccctacgctccccttgctgagtcccctgccaagcgctcggagcccccccaggacactctgcaccccctcaccccggtcctcctcattagggtgcagggcctaggtctcttccaggtgggggaggggggagagtcaggaataaggggatccccagaagtgcagagctgagcaggcttgggcctgtcatggctggccggaagtgtccccagctccctacagacgctgtagccatcactgcctctccagggaccctcctctcctgcccaggacagacccagccagaaccactgctaggatgggccgcacccaggggtctggcctccagggacctagagaatgggagggagaacggggccccaggagacccggccgccaccccacccgctacccttgggtgccacagggctgtgctgttgccaacagtaaacctgctcttactgtccaggctctggggtcttgtgatgagggtctggggagaaagtgggcccggggggaccccggaggctgtcggtggatgtgccgatgatggggctgacagtatgggctctgggcatccctgttcccccctctttcttccccccactcttctggggtcgggggttcctttcccttcccagttgctgtccctgggtcccctctttcatgtcccacaggccacagagcccagtgtgtccaaccagctgttctctcctcaaagcagcccccaagcaagtcccttctctagggtgtccctgaggacagcacagaggcgggactcagagaccccattcctcttcacgcagcccttaccccaagccctctagctgtgtggctggcagtgttggccacgtaggggctcccatccccccaccattgtgtcacatgggctgccaggctcagctcccagctgcgtccacagtgacctggatcagggtggggacaaggactggaccctccttctccagaaggccttcagctcttgccttgccatgcagtcacctccttccccctctgaccccagatcccaaaggtgcaccgttgccccagcccctttctggccccatggggtttctctgatgccttcatcatagaggcccggggctggtccgatggttggcaaaacttgactccggcccagtccccactcttggggacttagaacccctgctgtcctgggatctggcctgcctttctttggtcagtccctgtggtcccccaccagctccccctcccatagggctgcccaccaagccctgcccccagcccaagaggagcccccactgcctgcggggcagtgatgtctggccaccggctcacaccaatgacttggtcctggggtggcagaagcagcaggtgacaggagcagggcccctgtccctctcttctggccctgtggtacccaggccacacgttgtgcccgctcttggggctgaccggctgtagggaccaccagccgctgctactgtgggccgccccggggcagggtgggcagggcttttgtgggttatgaggacacagaagtccctgaggcccccagacctggctcagccaacctccttcctcccccggttgccccccactctaaagcctcctccctcccagcgtccactggctccaggctcctcacaacagcagctcatagacacggggcgtctccaggtggtcccagccctccagatgtttctagctctccaggtgggcgctgttttcacgtctgcctgcatccattcattccttcattcctcacctttatcctgttatctctatttttttaagctaccaggaaggaaagggaagaagagatcacgaaactgggacccccagaagggaggagtgggctttgaacttagacatctacctcagagctcaaataggttgtttaaaatcacattcaattttcagatgaaggggaactttatagtttttttttttttttttttttttgagacagagtctcactgtgttgcccaggctggagtgcaaatggcttgatcttggttcactgcaacctctgcctcccaggttcaagcaattctcttgcctcagcctcccgagtagctgggactaaaggcgtgtgccaccatgcccagctaattcttgtatttttagtagagacggagtttctccatgttggccagactggtctcgaactcctgacctcaggtgatctgaccgccttggcctccgaaagtgctgagattacagttgcgagccactgtgcgtggccagaactttataataagagacttgaagctgggtgtgacggtgcacacctctagtcccagctactcgggaggccaagacagaaggatcaccttgaggccaggagtttaaggccagcctgggcaacatagcaaaacctagtccctaaaattaaaaaaaaaaaaaaaaaaaaaggaaaataaaggagacttgaaatttttgaactaaatagtggtgatggctacacattgtgaatgtaattaacaccactgagttaaacacttaaaatggttaaaatggcaaattgtatgttatacctattttactacaataaaaagtataaaaaagagaagatatttaggtgacttacagcaaccaattgcaacaaaacaaaatgttaagaaatgatctttttatgaggcaattggaaatttgaacactgatcaactataggatgattggaattattaatttttaaaggtgtgataagatactgcacttggctgggcacagtggcacatgcctgtaatcccagctacttggcaggctgaggtgggagaatcgcttgagctcaggagttcgagaccagcctgggcaacgtggcgaaatccccgtctttacaaaaacaaacaaacaaacaaaaaagatattgcagttgtgttgtaagcgtccttatctttcagagctacatagtggaatgtttatggaatatttaggataaatgatataggcatttgggatttgctgcaaaatgacccagaggcaggggtcagggggagaggtagagatgagacaagaggtagaggggagaggtagaggtagccacgagctgataattacagacaagagatgcggagtatgtgggggctcattatcctgcatagtctatctttgtatatctttgaacttttcaagaataaaaaagcttaaaaagtat

SEQ ID NO: 17341 - protein, 803 aa, Homo sapiens; identical to SEQ ID NO: 17331

SEQ ID NO: 17342 - DNA, 6255 bp, Homo sapiens
ggggcgatgagccgatccttgggcgggtttgccccgccggagtaatccggaagaggcctcttattagggctctggtggcggcggtggcggacacttggggtctggacgcaacggcggcgggagcatgaacgcccctccagccttcgagtcgttcttgctcttcgagggcgagaagatcaccattaacaaggacaccaaggtacccaaggcctgcttattcaccatcaacaaagaagaccacacactgggaaacatcattaaatcacgtgcctgcttccccttcgccttctgccgtgattgtcagtttcctgaggcctccccagccacgcttcctgtacagcctgcagaactctgccccagagcacatcagctatgtgccccagctctcaaacgacaccttggcggggaggctcaccctgtccaccttcacgctggagcagcctctaggccagttcagcagccacaacatctctgacttggataccatctggctggtggtggccctcagcaacgccacccagagcttcacggccccacggacaaaccaggacatccctgctcctgccaacttctcccagaggggctactatctcacactgagggccaaccgggtgctgtaccagaccagaggccagctccatgtcctccgcgtcggcaatgatacccactgccaaccaacaaaaattggctgcaaccatcccctaccaggacccggcccctacagggtgaagttcctggtgatgaatgacgaaggacccgtggctgaaaccaagtggtccagcgacactcgcctgcagcaagcccaggcacttcgggctgtccccggcccccagagcccgggcaccgtggtcatcatcgccatcctgtctatcctcctggccgtcctcctcacggtcctcctggctgtgctcatatacacctgcactggcagcagcgacccctactgcatcgtgaaggtggacaatgagcccatcatcaggacagccacagtgtggaagaccctgtgccccttctggggtgaggagtaccaagtgcacctgccgcccaccttccacgctgtggctttctatgtcatggatgaggatgccctcagccgggacgacgttatcggaaaggtctgccttacaagggacaccatagcctctcaccctaagggtttcagcgggtgggcccacctgacggaggtcgaccccgatgaggaggtgcagggcgagatccacctgcggctggaagtgtggccaggggcccgggcctgccggctacgctgctctgtgctggaggccagggatctggccccaaaggaccgcaatggcacatctgaccccttcgtccgagtgcgctacaagggccggacacgggagacctcgatcgtgaagaagtcatgctacccacgctggaatgagacgtttgaatttgagctgcaggagggggccatggaggcgctgtgcgtggaggcctgggactgggacctcgtcagccgaaacgacttcctgggcaaagtggtgattgatgtccagagactgcgggtggtgcagcaggaggagggctggttccggctgcagcccgaccagtccaagagccggcggcatgacgagggcaacctgggctccttgcagctggaggtgcggctgcgggacgagacggtgctgccctccagctactaccagccactggtgcacctgctgtgccacgaggtcaagctgggcatgcagggcccagggcagctgatcccactcatcgaggagacaaccagcaccgagtgtcgccaggacgtggccacgaacctgctcaagctcttcctggggcaggggctggccaaggacttcctggacctgctcttccagctggagctgagtcgcaccagtgagaccaacaccctgttccggagcaactctctggcctcaaagtccatggagtcttttctgaaggtggccgggatgcagtacctgcacggcgtcctgggccccatcatcaacaaggtgtttgaggagaagaagtacgtggagctggaccccagcaaagtggaagttaaggatgtagggtgctccgggctgcaccgcccgcagaccgaggccgaggtgctggagcagagcgcgcagacgctgcgcgcccacctgggggccctgctgagcgcgctcagccgctcggttcgcgcgtgccccgccgtggtgcgcgccaccttccgccagctcttccggcgcgtgcgcgagcgcttccccggcgcccagcacgagaatgtaccgttcatcgccgtcaccagcttcctgtgcctgcgcttcttctctcccgccatcatgtcgcccaagctcttccacctgcgggagcgccacgcggacgcccgcaccagccgcaccctgctcctgttggccaaggcagtccagaacgtgggcaacatggacacgccggcttccagggccaaggaggcttggatggagccgctgcagcccaccgtgcgccagggcgtggcgcagctgaaggacttcatcaccaagctcgtggacatcgaggagaaggacgagctggacctgcagcggacgctgagtttgcaggcgccacctgtgaaggaggggccactcttcatccacaggaccaagggcaagggccccctcatgtcctcctccttcaagaagctctacttctccctcactaccgaggccctcagcttcgcgaagacgcccagctccaagtgtgtgaatgagcttaaccagtggctgtctgcgctgcggaaggtgagcatcaacaacaccggactgctgggctcctaccaccctggcgtcttccgtggggacaagtggagctgctgccaccaaaaagagaagacaggtcagggctgcgataagacccggtcacgggtgaccctgcaggagtggaatgaccctcttgaccatgaccttgaggcccagctcatctgccggcacctgctgggcgtggaggccatgctgtgggagaggcaccgggagctgagcgggggcgcagaggcaggcacggtgcccacgagccctggcaaagtccccgaggactcattggcccggctgctccgggtgctgcaggacctccgcgaggcccatagctccagcccggccggctccccaccctcagagcccaactgcctcctggagctgcagacgtgaggcccgccctacgctccccttgctgagtcccctgccaagcgctcggagcccccccaggacactctgcaccccctcaccccggtcctcctcattagggtgcagggcctaggtctcttccaggtgggggaggggggagagtcaggaataaggggatccccagaagtgcagagctgagcaggcttgggcctgtcatggctggccggaagtgtccccagctccctacagacgctgtagccatcactgcctctccagggaccctcctctcctgcccaggacagacccagccagaaccactgctaggatgggccgcacccaggggtctggcctccagggacctagagaatgggagggagaacggggccccaggagacccggccgccaccccacccgctacccttgggtgccacagggctgtgctgttgccaacagtaaacctgctcttactgtccaggctctggggtcttgtgatgagggtctggggagaaagtgggcccggggggaccccggaggctgtcggtggatgtgccgatgatggggctgacagtatgggctctgggcatccctgttcccccctctttcttccccccactcttctggggtcgggggttcctttcccttcccagttgctgtccctgggtcccctctttcatgtcccacaggccacagagcccagtgtgtccaaccagctgttctctcctcaaagcagcccccaagcaagtcccttctctagggtgtccctgaggacagcacagaggcgggactcagagaccccattcctcttcacgcagcccttaccccaagccctctagctgtgtggctggcagtgttggccacgtaggggctcccatccccccaccattgtgtcacatgggctgccaggctcagctcccagctgcgtccacagtgacctggatcagggtggggacaaggactggaccctccttctccagaaggccttcagctcttgccttgccatgcagtcacctccttccccctctgaccccagatcccaaaggtgcaccgttgccccagcccctttctggccccatggggtttctctgatgccttcatcatagaggcccggggctggtccgatggttggcaaaacttgactccggcccagtccccactcttggggacttagaacccctgctgtcctgggatctggcctgcctttctttggtcagtccctgtggtcccccaccagctccccctcccatagggctgcccaccaagccctgcccccagcccaagaggagcccccactgcctgcggggcagtgatgtctggccaccggctcacaccaatgacttggtcctggggtggcagaagcagcaggtgacaggagcagggcccctgtccctctcttctggccctgtggtacccaggccacacgttgtgcccgctcttggggctgaccggctgtagggaccaccagccgctgctactgtgggccgccccggggcagggtgggcagggcttttgtgggttatgaggacacagaagtccctgaggcccccagacctggctcagccaacctccttcctcccccggttgccccccactctaaagcctcctccctcccagcgtccactggctccaggctcctcacaacagcagctcatagacacggggcgtctccaggtggtcccagccctccagatgtttctagctctccaggtgggcgctgttttcacgtctgcctgcatccattcattccttcattcctcacctttatcctgttatctctatttttttaagctaccaggaaggaaagggaagaagagatcacgaaactgggacccccagaagggaggagtgggctttgaacttagacatctacctcagagctcaaataggttgtttaaaatcacattcaattttcagatgaaggggaactttatagtttttttttttttttttttttttgagacagagtctcactgtgttgcccaggctggagtgcaaatggcttgatcttggttcactgcaacctctgcctcccaggttcaagcaattctcttgcctcagcctcccgagtagctgggactaaaggcgtgtgccaccatgcccagctaattcttgtatttttagtagagacggagtttctccatgttggccagactggtctcgaactcctgacctcaggtgatctgaccgccttggcctccgaaagtgctgagattacagttgcgagccactgtgcgtggccagaactttataataagagacttgaagctgggtgtgacggtgcacacctctagtcccagctactcgggaggccaagacagaaggatcaccttgaggccaggagtttaaggccagcctgggcaacatagcaaaacctagtccctaaaattaaaaaaaaaaaaaaaaaaaaaggaaaataaaggagacttgaaatttttgaactaaatagtggtgatggctacacattgtgaatgtaattaacaccactgagttaaacacttaaaatggttaaaatggcaaattgtatgttatacctattttactacaataaaaagtataaaaaagagaagatatttaggtgacttacagcaaccaattgcaacaaaacaaaatgttaagaaatgatctttttatgaggcaattggaaatttgaacactgatcaactataggatgattggaattattaatttttaaaggtgtgataagatactgcacttggctgggcacagtggcacatgcctgtaatcccagctacttggcaggctgaggtgggagaatcgcttgagctcaggagttcgagaccagcctgggcaacgtggcgaaatccccgtctttacaaaaacaaacaaacaaacaaaaaagatattgcagttgtgttgtaagcgtccttatctttcagagctacatagtggaatgtttatggaatatttaggataaatgatataggcatttgggatttgctgcaaaatgacccagaggcaggggtcagggggagaggtagagatgagacaagaggtagaggggagaggtagaggtagccacgagctgataattacagacaagagatgcggagtatgtgggggctcattatcctgcatagtctatctttgtatatctttgaacttttcaagaataaaaaagcttaaaaagtat

SEQ ID NO: 17343 - protein, 796 aa, Homo sapiens; identical to SEQ ID NO: 17333

SEQ ID NO: 17344 - DNA, 6393 bp, Homo sapiens
ggggcgatgagccgatccttgggcgggtttgccccgccggagtaatccggaagaggcctcttattagggctctggtggcggcggtggcggacacttggggtctggacgcaacggcggcgggagcatgaacgcccctccagccttcgagtcgttcttgctcttcgagggcgagaagatcaccattaacaaggacaccaaggtacccaaggcctgcttattcaccatcaacaaagaagaccacacactgggaaacatcattaaatcacgtgcctgcttccccttcgccttctgccgtgattgtcagtttcctgaggcctccccagccacgcttcctgtacagcctgcagaactctgccccagagcacatcagctatgtgccccagctctcaaacgacaccttggcggggaggctcaccctgtccaccttcacgctggagcagcctctaggccagttcagcagccacaacatctctgacttggataccatctggctggtggtggccctcagcaacgccacccagagcttcacggccccacggacaaaccaggacatccctgctcctgccaacttctcccagaggggctactatctcacactgagggccaaccgggtgctgtaccagaccagaggccagctccatgtcctccgcgtcggcaatgatacccactgccaaccaacaaaaattggctgcaaccatcccctaccaggacccggcccctacagggtgaagttcctggtgatgaatgacgaaggacccgtggctgaaaccaagtggtccagcgacactcgcctgcagcaagcccaggcacttcgggctgtccccggcccccagagcccgggcaccgtggtcatcatcgccatcctgtctatcctcctggccgtcctcctcacggtcctcctggctgtgctcatatacacctgcactggcagcagcgacccctactgcatcgtgaaggtggacaatgagcccatcatcaggacagccacagtgtggaagaccctgtgccccttctggggtgaggagtaccaagtgcacctgccgcccaccttccacgctgtggctttctatgtcatggatgaggatgccctcagccgggacgacgttatcggaaaggtctgccttacaagggacaccatagcctctcaccctaagggtttcagcgggtgggcccacctgacggaggtcgaccccgatgaggaggtgcagggcgagatccacctgcggctggaagtgtggccaggggcccgggcctgccggctacgctgctctgtgctggaggccagggatctggccccaaaggaccgcaatggcacatctgaccccttcgtccgagtgcgctacaagggccggacacgggagacctcgatcgtgaagaagtcatgctacccacgctggaatgagacgtttgaatttgagctgcaggagggggccatggaggcgctgtgcgtggaggcctgggactgggacctcgtcagccgaaacgacttcctgggcaaagtggtgattgatgtccagagactgcgggtggtgcagcaggaggagggctggttccggctgcagcccgaccagtccaagagccggcggcatgacgagggcaacctgggctccttgcagctggaggtgcggctgcgggacgagacggtgctgccctccagctactaccagccactggtgcacctgctgtgccacgaggtcaagctgggcatgcagggcccagggcagctgatcccactcatcgaggagacaaccagcaccgagtgtcgccaggacgtggccacgaacctgctcaagctcttcctggggcaggggctggccaaggacttcctggacctgctcttccagctggagctgagtcgcaccagtgagaccaacaccctgttccggagcaactctctggcctcaaagtccatggagtcttttctgaaggtggccgggatgcagtacctgcacggcgtcctgggccccatcatcaacaaggtgtttgaggagaagaagtacgtggagctggaccccagcaaagtggaagttaaggatgtagggtgctccgggctgcaccgcccgcagaccgaggccgaggtgctggagcagagcgcgcagacgctgcgcgcccacctgggggccctgctgagcgcgctcagccgctcggttcgcgcgtgccccgccgtggtgcgcgccaccttccgccagctcttccggcgcgtgcgcgagcgcttccccggcgcccagcacgagaatgtaccgttcatcgccgtcaccagcttcctgtgcctgcgcttcttctctcccgccatcatgtcgcccaagctcttccacctgcgggagcgccacgcggacgcccgcaccagccgcaccctgctcctgttggccaaggcagtccagaacgtgggcaacatggacacgccggcttccagggccaaggaggcttggatggagccgctgcagcccaccgtgcgccagggcgtggcgcagctgaaggacttcatcaccaagctcgtggacatcgaggagaaggacgagctggacctgcagcggacgctgagtttgcaggcgccacctgtgaaggaggggccactcttcatccacaggaccaagggcaagggccccctcatgtcctcctccttcaagaagctctacttctccctcactaccgaggccctcagcttcgcgaagacgcccagctccaagaaaagcgccctcatcaagttagccaacatccgggcagcggaaaaggttgaggaaaagagctttggcggctcgcacgtcatgcaggtcatctacacggacgacgccggcaggccccagactgcctacctgcagtgcaagtgtgtgaatgagcttaaccagtggctgtctgcgctgcggaaggtgagcatcaacaacaccggactgctgggctcctaccaccctggcgtcttccgtggggacaagtggagctgctgccaccaaaaagagaagacaggtcagggctgcgataagacccggtcacgggtgaccctgcaggagtggaatgaccctcttgaccatgaccttgaggcccagctcatctgccggcacctgctgggcgtggaggccatgctgtgggagaggcaccgggagctgagcgggggcgcagaggcaggcacggtgcccacgagccctggcaaagtccccgaggactcattggcccggctgctccgggtgctgcaggacctccgcgaggcccatagctccagcccggccggctccccaccctcagagcccaactgcctcctggagctgcagacgtgaggcccgccctacgctccccttgctgagtcccctgccaagcgctcggagcccccccaggacactctgcaccccctcaccccggtcctcctcattagggtgcagggcctaggtctcttccaggtgggggaggggggagagtcaggaataaggggatccccagaagtgcagagctgagcaggcttgggcctgtcatggctggccggaagtgtccccagctccctacagacgctgtagccatcactgcctctccagggaccctcctctcctgcccaggacagacccagccagaaccactgctaggatgggccgcacccaggggtctggcctccagggacctagagaatgggagggagaacggggccccaggagacccggccgccaccccacccgctacccttgggtgccacagggctgtgctgttgccaacagtaaacctgctcttactgtccaggctctggggtcttgtgatgagggtctggggagaaagtgggcccggggggaccccggaggctgtcggtggatgtgccgatgatggggctgacagtatgggctctgggcatccctgttcccccctctttcttccccccactcttctggggtcgggggttcctttcccttcccagttgctgtccctgggtcccctctttcatgtcccacaggccacagagcccagtgtgtccaaccagctgttctctcctcaaagcagcccccaagcaagtcccttctctagggtgtccctgaggacagcacagaggcgggactcagagaccccattcctcttcacgcagcccttaccccaagccctctagctgtgtggctggcagtgttggccacgtaggggctcccatccccccaccattgtgtcacatgggctgccaggctcagctcccagctgcgtccacagtgacctggatcagggtggggacaaggactggaccctccttctccagaaggccttcagctcttgccttgccatgcagtcacctccttccccctctgaccccagatcccaaaggtgcaccgttgccccagcccctttctggccccatggggtttctctgatgccttcatcatagaggcccggggctggtccgatggttggcaaaacttgactccggcccagtccccactcttggggacttagaacccctgctgtcctgggatctggcctgcctttctttggtcagtccctgtggtcccccaccagctccccctcccatagggctgcccaccaagccctgcccccagcccaagaggagcccccactgcctgcggggcagtgatgtctggccaccggctcacaccaatgacttggtcctggggtggcagaagcagcaggtgacaggagcagggcccctgtccctctcttctggccctgtggtacccaggccacacgttgtgcccgctcttggggctgaccggctgtagggaccaccagccgctgctactgtgggccgccccggggcagggtgggcagggcttttgtgggttatgaggacacagaagtccctgaggcccccagacctggctcagccaacctccttcctcccccggttgccccccactctaaagcctcctccctcccagcgtccactggctccaggctcctcacaacagcagctcatagacacggggcgtctccaggtggtcccagccctccagatgtttctagctctccaggtgggcgctgttttcacgtctgcctgcatccattcattccttcattcctcacctttatcctgttatctctatttttttaagctaccaggaaggaaagggaagaagagatcacgaaactgggacccccagaagggaggagtgggctttgaacttagacatctacctcagagctcaaataggttgtttaaaatcacattcaattttcagatgaaggggaactttatagtttttttttttttttttttttttgagacagagtctcactgtgttgcccaggctggagtgcaaatggcttgatcttggttcactgcaacctctgcctcccaggttcaagcaattctcttgcctcagcctcccgagtagctgggactaaaggcgtgtgccaccatgcccagctaattcttgtatttttagtagagacggagtttctccatgttggccagactggtctcgaactcctgacctcaggtgatctgaccgccttggcctccgaaagtgctgagattacagttgcgagccactgtgcgtggccagaactttataataagagacttgaagctgggtgtgacggtgcacacctctagtcccagctactcgggaggccaagacagaaggatcaccttgaggccaggagtttaaggccagcctgggcaacatagcaaaacctagtccctaaaattaaaaaaaaaaaaaaaaaaaaaggaaaataaaggagacttgaaatttttgaactaaatagtggtgatggctacacattgtgaatgtaattaacaccactgagttaaacacttaaaatggttaaaatggcaaattgtatgttatacctattttactacaataaaaagtataaaaaagagaagatatttaggtgacttacagcaaccaattgcaacaaaacaaaatgttaagaaatgatctttttatgaggcaattggaaatttgaacactgatcaactataggatgattggaattattaatttttaaaggtgtgataagatactgcacttggctgggcacagtggcacatgcctgtaatcccagctacttggcaggctgaggtgggagaatcgcttgagctcaggagttcgagaccagcctgggcaacgtggcgaaatccccgtctttacaaaaacaaacaaacaaacaaaaaagatattgcagttgtgttgtaagcgtccttatctttcagagctacatagtggaatgtttatggaatatttaggataaatgatataggcatttgggatttgctgcaaaatgacccagaggcaggggtcagggggagaggtagagatgagacaagaggtagaggggagaggtagaggtagccacgagctgataattacagacaagagatgcggagtatgtgggggctcattatcctgcatagtctatctttgtatatctttgaacttttcaagaataaaaaagcttaaaaagtat

SEQ ID NO: 17345 - protein, 842 aa, Homo sapiens; identical to SEQ ID NO: 17335

SEQ ID NO: 17346 - DNA, 2794 bp, Homo sapiens
agtccagcgcccgccgcccgccaccccggaccccggtgtctggcttcccccgagccgggaccccgcgatggccaagcgcagctcgctgtacatccgcatcgtggaggggaagaaccttcccgccaaggacatcactggcagcagcgacccctactgcatcgtgaaggtggacaatgagcccatcatcaggacagccacagtgtggaagaccctgtgccccttctggggtgaggagtaccaagtgcacctgccgcccaccttccacgctgtggctttctatgtcatggatgaggatgccctcagccgggacgacgttatcggaaaggtctgccttacaagggacaccatagcctctcaccctaagggtttcagcgggtgggcccacctgacggaggtcgaccccgatgaggaggtgcagggcgagatccacctgcggctggaagtgtggccaggggcccgggcctgccggctacgctgctctgtgctggaggccagggatctggccccaaaggaccgcaatggcacatctgaccccttcgtccgagtgcgctacaagggccggacacgggagacctcgatcgtgaagaagtcatgctacccacgctggaatgagacgtttgaatttgagctgcaggagggggccatggaggcgctgtgcgtggaggcctgggactgggacctcgtcagccgaaacgacttcctgggcaaagtggtgattgatgtccagagactgcgggtggtgcagcaggaggagggctggttccggctgcagcccgaccagtccaagagccggcggcatgacgagggcaacctgggctccttgcagctggaggtgcggctgcgggacgagacggtgctgccctccagctactaccagccactggtgcacctgctgtgccacgaggtcaagctgggcatgcagggcccagggcagctgatcccactcatcgaggagacaaccagcaccgagtgtcgccaggacgtggccacgaacctgctcaagctcttcctggggcaggggctggccaaggacttcctggacctgctcttccagctggagctgagtcgcaccagtgagaccaacaccctgttccggagcaactctctggcctcaaagtccatggagtcttttctgaaggtggccgggatgcagtacctgcacggcgtcctgggccccatcatcaacaaggtgtttgaggagaagaagtacgtggagctggaccccagcaaagtggaagttaaggatgtagggtgctccgggctgcaccgcccgcagaccgaggccgaggtgctggagcagagcgcgcagacgctgcgcgcccacctgggggccctgctgagcgcgctcagccgctcggttcgcgcgtgccccgccgtggtgcgcgccaccttccgccagctcttccggcgcgtgcgcgagcgcttccccggcgcccagcacgagaatgtaccgttcatcgccgtcaccagcttcctgtgcctgcgcttcttctctcccgccatcatgtcgcccaagctcttccacctgcgggagcgccacgcggacgcccgcaccagccgcaccctgctcctgttggccaaggcagtccagaacgtgggcaacatggacacgccggcttccagggccaaggaggcttggatggagccgctgcagcccaccgtgcgccagggcgtggcgcagctgaaggacttcatcaccaagctcgtggacatcgaggagaaggacgagctggacctgcagcggacgctgagtttgcaggcgccacctgtgaaggaggggccactcttcatccacaggaccaagggcaagggccccctcatgtcctcctccttcaagaagctctacttctccctcactaccgaggccctcagcttcgcgaagacgcccagctccaagtgtgtgaatgagcttaaccagtggctgtctgcgctgcggaaggtgagcatcaacaacaccggactgctgggctcctaccaccctggcgtcttccgtggggacaagtggagctgctgccaccaaaaagagaagacaggtcagggctgcgataagacccggtcacgggtgaccctgcaggagtggaatgaccctcttgaccatgaccttgaggcccagctcatctgccggcacctgctgggcgtggaggccatgctgtgggagaggcaccgggagctgagcgggggcgcagaggcaggcacggtgcccacgagccctggcaaagtccccgaggactcattggcccggctgctccgggtgctgcaggacctccgcgaggcccatagctccagcccggccggctccccaccctcagagcccaactgcctcctggagctgcagacgtgaggcccgccctacgctccccttgctgagtcccctgccaagcgctcggagcccccccaggacactctgcaccccctcaccccggtcctcctcattagggtgcagggcctaggtctcttccaggtgggggaggggggagagtcaggaataaggggatccccagaagtgcagagctgagcaggcttgggcctgtcatggctggccggaagtgtccccagctccctacagacgctgtagccatcactgcctctccagggaccctcctctcctgcccaggacagacccagccagaaccactgctaggatgggccgcacccaggggtctggcctccagggacctagagaatgggagggagaacggggccccaggagacccggccgccaccccacccgctacccttgggtgccacagggctgtgctgttgccaacagtaaacctgctcttactgtccaggc

SEQ ID NO: 17347 - protein, 757 aa, Homo sapiens; identical to SEQ ID NO: 17329

SEQ ID NO: 17348 - DNA, 3584 bp, Homo sapiens
ggggcgatgagccgatccttgggcgggtttgccccgccggagtaatccggaagaggcctcttattagggctctggtggcggcggtggcggacacttggggtctggacgcaacggcggcgggagcatgaacgcccctccagccttcgagtcgttcttgctcttcgagggcgagaagatcaccattaacaaggacaccaaggtacccaaggcctgcttattcaccatcaacaaagaagaccacacactgggaaacatcattaaatcacgtgcctgcttccccttcgccttctgccgtgattgtcagtttcctgaggcctccccagccacgcttcctgtacagcctgcagaactctgccccagagcacatcagctatgtgccccagctctcaaacgacaccttggcggggaggctcaccctgtccaccttcacgctggagcagcctctaggccagttcagcagccacaacatctctgacttggataccatctggctggtggtggccctcagcaacgccacccagagcttcacggccccacggacaaaccaggacatccctgctcctgccaacttctcccagaggggctactatctcacactgagggccaaccgggtgctgtaccagaccagaggccagctccatgtcctccgcgtcggcaatgatacccactgccaaccaacaaaaattggctgcaaccatcccctaccaggacccggcccctacagggtgaagttcctggtgatgaatgacgaaggacccgtggctgaaaccaagtggtccagcgacactcgcctgcagcaagcccaggcacttcgggctgtccccggcccccagagcccgggcaccgtggtcatcatcgccatcctgtctatcctcctggccgtcctcctcacggtcctcctggctgtgctcatatacacctgcactggcagcagcgacccctactgcatcgtgaaggtggacaatgagcccatcatcaggacagccacagtgtggaagaccctgtgccccttctggggtgaggagtaccaagtgcacctgccgcccaccttccacgctgtggctttctatgtcatggatgaggatgccctcagccgggacgacgttatcggaaaggtctgccttacaagggacaccatagcctctcaccctaagggtttcagcgggtgggcccacctgacggaggtcgaccccgatgaggaggtgcagggcgagatccacctgcggctggaagtgtggccaggggcccgggcctgccggctacgctgctctgtgctggaggccagggatctggccccaaaggaccgcaatggcacatctgaccccttcgtccgagtgcgctacaagggccggacacgggagacctcgatcgtgaagaagtcatgctacccacgctggaatgagacgtttgaatttgagctgcaggagggggccatggaggcgctgtgcgtggaggcctgggactgggacctcgtcagccgaaacgacttcctgggcaaagtggtgattgatgtccagagactgcgggtggtgcagcaggaggagggctggttccggctgcagcccgaccagtccaagagccggcggcatgacgagggcaacctgggctccttgcagctggaggtgcggctgcgggacgagacggtgctgccctccagctactaccagccactggtgcacctgctgtgccacgaggtcaagctgggcatgcagggcccagggcagctgatcccactcatcgaggagacaaccagcaccgagtgtcgccaggacgtggccacgaacctgctcaagctcttcctggggcaggggctggccaaggacttcctggacctgctcttccagctggagctgagtcgcaccagtgagaccaacaccctgttccggagcaactctctggcctcaaagtccatggagtcttttctgaaggtggccgggatgcagtacctgcacggcgtcctgggccccatcatcaacaaggtgtttgaggagaagaagtacgtggagctggaccccagcaaagtggaagttaaggatgtagggtgctccgggctgcaccgcccgcagaccgaggccgaggtgctggagcagagcgcgcagacgctgcgcgcccacctgggggccctgctgagcgcgctcagccgctcggttcgcgcgtgccccgccgtggtgcgcgccaccttccgccagctcttccggcgcgtgcgcgagcgcttccccggcgcccagcacgagaatgtaccgttcatcgccgtcaccagcttcctgtgcctgcgcttcttctctcccgccatcatgtcgcccaagctcttccacctgcgggagcgccacgcggacgcccgcaccagccgcaccctgctcctgttggccaaggcagtccagaacgtgggcaacatggacacgccggcttccagggccaaggaggcttggatggagccgctgcagcccaccgtgcgccagggcgtggcgcagctgaaggacttcatcaccaagctcgtggacatcgaggagaaggacgagctggacctgcagcggacgctgagtttgcaggcgccacctgtgaaggaggggccactcttcatccacaggaccaagggcaagggccccctcatgtcctcctccttcaagaagctctacttctccctcactaccgaggccctcagcttcgcgaagacgcccagctccaagtgtgtgaatgagcttaaccagtggctgtctgcgctgcggaaggtgagcatcaacaacaccggactgctgggctcctaccaccctggcgtcttccgtggggacaagtggagctgctgccaccaaaaagagaagacaggtcagggctgcgataagacccggtcacgggtgaccctgcaggagtggaatgaccctcttgaccatgaccttgaggcccagctcatctgccggcacctgctgggcgtggaggccatgctgtgggagaggcaccgggagctgagcgggggcgcagaggcaggcacggtgcccacgagccctggcaaagtccccgaggactcattggcccggctgctccgggtgctgcaggacctccgcgaggcccatagctccagcccggccggctccccaccctcagagcccaactgcctcctggagctgcagacgtgaggcccgccctacgctccccttgctgagtcccctgccaagcgctcggagcccccccaggacactctgcaccccctcaccccggtcctcctcattagggtgcagggcctaggtctcttccaggtgggggaggggggagagtcaggaataaggggatccccagaagtgcagagctgagcaggcttgggcctgtcatggctggccggaagtgtccccagctccctacagacgctgtagccatcactgcctctccagggaccctcctctcctgcccaggacagacccagccagaaccactgctaggatgggccgcacccaggggtctggcctccagggacctagagaatgggagggagaacggggccccaggagacccggccgccaccccacccgctacccttgggtgccacagggctgtgctgttgccaacagtaaacctgctcttactgtccaggc

SEQ ID NO: 17349 - protein, 796 aa, Homo sapiens; identical to SEQ ID NO: 17333

SEQ ID NO: 17350 - DNA, 3722 bp, Homo sapiens
ggggcgatgagccgatccttgggcgggtttgccccgccggagtaatccggaagaggcctcttattagggctctggtggcggcggtggcggacacttggggtctggacgcaacggcggcgggagcatgaacgcccctccagccttcgagtcgttcttgctcttcgagggcgagaagatcaccattaacaaggacaccaaggtacccaaggcctgcttattcaccatcaacaaagaagaccacacactgggaaacatcattaaatcacgtgcctgcttccccttcgccttctgccgtgattgtcagtttcctgaggcctccccagccacgcttcctgtacagcctgcagaactctgccccagagcacatcagctatgtgccccagctctcaaacgacaccttggcggggaggctcaccctgtccaccttcacgctggagcagcctctaggccagttcagcagccacaacatctctgacttggataccatctggctggtggtggccctcagcaacgccacccagagcttcacggccccacggacaaaccaggacatccctgctcctgccaacttctcccagaggggctactatctcacactgagggccaaccgggtgctgtaccagaccagaggccagctccatgtcctccgcgtcggcaatgatacccactgccaaccaacaaaaattggctgcaaccatcccctaccaggacccggcccctacagggtgaagttcctggtgatgaatgacgaaggacccgtggctgaaaccaagtggtccagcgacactcgcctgcagcaagcccaggcacttcgggctgtccccggcccccagagcccgggcaccgtggtcatcatcgccatcctgtctatcctcctggccgtcctcctcacggtcctcctggctgtgctcatatacacctgcactggcagcagcgacccctactgcatcgtgaaggtggacaatgagcccatcatcaggacagccacagtgtggaagaccctgtgccccttctggggtgaggagtaccaagtgcacctgccgcccaccttccacgctgtggctttctatgtcatggatgaggatgccctcagccgggacgacgttatcggaaaggtctgccttacaagggacaccatagcctctcaccctaagggtttcagcgggtgggcccacctgacggaggtcgaccccgatgaggaggtgcagggcgagatccacctgcggctggaagtgtggccaggggcccgggcctgccggctacgctgctctgtgctggaggccagggatctggccccaaaggaccgcaatggcacatctgaccccttcgtccgagtgcgctacaagggccggacacgggagacctcgatcgtgaagaagtcatgctacccacgctggaatgagacgtttgaatttgagctgcaggagggggccatggaggcgctgtgcgtggaggcctgggactgggacctcgtcagccgaaacgacttcctgggcaaagtggtgattgatgtccagagactgcgggtggtgcagcaggaggagggctggttccggctgcagcccgaccagtccaagagccggcggcatgacgagggcaacctgggctccttgcagctggaggtgcggctgcgggacgagacggtgctgccctccagctactaccagccactggtgcacctgctgtgccacgaggtcaagctgggcatgcagggcccagggcagctgatcccactcatcgaggagacaaccagcaccgagtgtcgccaggacgtggccacgaacctgctcaagctcttcctggggcaggggctggccaaggacttcctggacctgctcttccagctggagctgagtcgcaccagtgagaccaacaccctgttccggagcaactctctggcctcaaagtccatggagtcttttctgaaggtggccgggatgcagtacctgcacggcgtcctgggccccatcatcaacaaggtgtttgaggagaagaagtacgtggagctggaccccagcaaagtggaagttaaggatgtagggtgctccgggctgcaccgcccgcagaccgaggccgaggtgctggagcagagcgcgcagacgctgcgcgcccacctgggggccctgctgagcgcgctcagccgctcggttcgcgcgtgccccgccgtggtgcgcgccaccttccgccagctcttccggcgcgtgcgcgagcgcttccccggcgcccagcacgagaatgtaccgttcatcgccgtcaccagcttcctgtgcctgcgcttcttctctcccgccatcatgtcgcccaagctcttccacctgcgggagcgccacgcggacgcccgcaccagccgcaccctgctcctgttggccaaggcagtccagaacgtgggcaacatggacacgccggcttccagggccaaggaggcttggatggagccgctgcagcccaccgtgcgccagggcgtggcgcagctgaaggacttcatcaccaagctcgtggacatcgaggagaaggacgagctggacctgcagcggacgctgagtttgcaggcgccacctgtgaaggaggggccactcttcatccacaggaccaagggcaagggccccctcatgtcctcctccttcaagaagctctacttctccctcactaccgaggccctcagcttcgcgaagacgcccagctccaagaaaagcgccctcatcaagttagccaacatccgggcagcggaaaaggttgaggaaaagagctttggcggctcgcacgtcatgcaggtcatctacacggacgacgccggcaggccccagactgcctacctgcagtgcaagtgtgtgaatgagcttaaccagtggctgtctgcgctgcggaaggtgagcatcaacaacaccggactgctgggctcctaccaccctggcgtcttccgtggggacaagtggagctgctgccaccaaaaagagaagacaggtcagggctgcgataagacccggtcacgggtgaccctgcaggagtggaatgaccctcttgaccatgaccttgaggcccagctcatctgccggcacctgctgggcgtggaggccatgctgtgggagaggcaccgggagctgagcgggggcgcagaggcaggcacggtgcccacgagccctggcaaagtccccgaggactcattggcccggctgctccgggtgctgcaggacctccgcgaggcccatagctccagcccggccggctccccaccctcagagcccaactgcctcctggagctgcagacgtgaggcccgccctacgctccccttgctgagtcccctgccaagcgctcggagcccccccaggacactctgcaccccctcaccccggtcctcctcattagggtgcagggcctaggtctcttccaggtgggggaggggggagagtcaggaataaggggatccccagaagtgcagagctgagcaggcttgggcctgtcatggctggccggaagtgtccccagctccctacagacgctgtagccatcactgcctctccagggaccctcctctcctgcccaggacagacccagccagaaccactgctaggatgggccgcacccaggggtctggcctccagggacctagagaatgggagggagaacggggccccaggagacccggccgccaccccacccgctacccttgggtgccacagggctgtgctgttgccaacagtaaacctgctcttactgtccaggc

SEQ ID NO: 17351 - protein, 842 aa, Homo sapiens; identical to SEQ ID NO: 17335

SEQ ID NO: 17352 - DNA, 2040 bp, Homo sapiens
tgggctggggcgaggggtgaagagcggtggggaaccagggagcgctggggaggaccagggaggctgtgtcccagcgagggtcagggacggagcctaaggggagggggctgccaggagccctggtctgggggactccagcccgcgctcttccgcacccctccagaatgtaccgttcatcgccgtcaccagcttcctgtgcctgcgcttcttctctcccgccatcatgtcgcccaagctcttccacctgcgggagcgccacgcggacgcccgcaccagccgcaccctgctcctgttggccaaggcagtccagaacgtgggcaacatggacacgccggcttccagggccaaggaggcttggatggagccgctgcagcccaccgtgcgccagggcgtggcgcagctgaaggacttcatcaccaagctcgtggacatcgaggagaaggacgagctggacctgcagcggacgctgagtttgcaggcgccacctgtgaaggaggggccactcttcatccacaggaccaagggcaagggccccctcatgtcctcctccttcaagaagctctacttctccctcactaccgaggccctcagcttcgcgaagacgcccagctccaagtgtgtgaatgagcttaaccagtggctgtctgcgctgcggaaggtgagcatcaacaacaccggactgctgggctcctaccaccctggcgtcttccgtggggacaagtggagctgctgccaccaaaaagagaagacaggtgggagaggaggcctgggtcccgggctctgcatccgtccactgcgagatcgggcctctggctgaacgatgggaccctgagccctgctgtgcacctgcagggacctaacccaaggaatgctggcccctccaggagctctgggcagaaagggtcccgtggaccaggtggtttgggaaatgccacgtgatgtgtgtgatgcatatgagtgaattcgctgaaggctctaaggaggcccgaaaacacgttagaatcccatttctttttatttcttcttcttcttttttttttttttttcagacacagactttcactctgtcccccagactggagtgcaatggcacgatctcagctcgctgcaatctccacctcccagggtcaagcaattctcctgcctcaacctccccagtagctgggatgaccggcactcgccaccaagcctagctaatttttttgtattttgactagagatggggtttcaccatgttagtcaagctgctcttgttttgttgttgttgttgttgttgttgttgtttgatactgagtctcgctctatcatccaggctggagtgcagtggtgcaatctcggctcactgcaatctccgtttcccaggctcaagtgattctcctgcctcagcctcccaagtactacaggcgcaagccactgcacccagctaagttttgtattttcagtaaagacggggttttaccatgttggccaggctggtcttgaactcccgacctcgtgatctgccctcctcggcctcccaaagtgctgggattacaggtgtgagccaccacgcccggcctagaattccatttctaacgtggtttaacccagcacttcccaaactcttttgacagggaacccttctcttccccaaggagcttcttacagaacaggtgttctcaggaacacattcgaggagccccctgctaatgagagccagagagcccctgggttcgcacactccaatgctggccatctgaatccggagctgtgggtgggaggggaccctgagccttgggcactagagggatggcatagaggagcttctagaaggactccatactgtgtagtactctaggttctagcacctgtggttcttgagcacttgaaatgtggcttgaggagctgaggggttttttttgtttaattttttaaaacagggtcttgctctgttgcccaggctggagtgcagtggcacgatcatagctcactgcagcctccaactcctgggctcaagcaatcctcctgcctcagcctctgagtaggctggcactaccggca

SEQ ID NO: 17353 - protein, 197 aa, Homo sapiens
MSPKLFHLRERHADARTSRTLLLLAKAVQNVGNMDTPASRAKEAWMEPLQPTVRQGVAQLKDFITKLVDIEEKDELDLQRTLSLQAPPVKEGPLFIHRTKGKGPLMSSSFKKLYFSLTTEALSFAKTPSSKCVNELNQWLSALRKVSINNTGLLGSYHPGVFRGDKWSCCHQKEKTGGRGGLGPGLCIRPLRDRASG

SEQ ID NO: 17354 - DNA, 3274 bp, Homo sapiens
ggggcgatgagccgatccttgggcgggtttgccccgccggagtaatccggaagaggcctcttattagggctctggtggcggcggtggcggacacttggggtctggacgcaacggcggcgggagcatgaacgcccctccagccttcgagtcgttcttgctcttcgagggcgagaagatcaccattaacaaggacaccaaggtacccaaggcctgcttattcaccatcaacaaagaagaccacacactgggaaacatcattaaatcacgtgcctgcttccccttcgccttctgccgtgattgtcagtttcctgaggcctccccagccacgcttcctgtacagcctgcagaactctgccccagagcacatcagctatgtgccccagctctcaaacgacaccttggcggggaggctcaccctgtccaccttcacgctggagcagcctctaggccagttcagcagccacaacatctctgacttggataccatctggctggtggtggccctcagcaacgccacccagagcttcacggccccacggacaaaccaggacatccctgctcctgccaacttctcccagaggggctactatctcacactgagggccaaccgggtgctgtaccagaccagaggccagctccatgtcctccgcgtcggcaatgatacccactgccaaccaacaaaaattggctgcaaccatcccctaccaggacccggcccctacagggtgaagttcctggtgatgaatgacgaaggacccgtggctgaaaccaagtggtccagcgacactcgcctgcagcaagcccaggcacttcgggctgtccccggcccccagagcccgggcaccgtggtcatcatcgccatcctgtctatcctcctggccgtcctcctcacggtcctcctggctgtgctcatatacacctgcactggcagcagcgacccctactgcatcgtgaaggtggacaatgagcccatcatcaggacagccacagtgtggaagaccctgtgccccttctggggtgaggagtaccaagtgcacctgccgcccaccttccacgctgtggctttctatgtcatggatgaggatgccctcagccgggacgacgttatcggaaaggtctgccttacaagggacaccatagcctctcaccctaagggtttcagcgggtgggcccacctgacggaggtcgaccccgatgaggaggtgcagggcgagatccacctgcggctggaagtgtggccaggggcccgggcctgccggctacgctgctctgtgctggaggccagggatctggccccaaaggaccgcaatggcacatctgaccccttcgtccgagtgcgctacaagggccggacacgggagacctcgatcgtgaagaagtcatgctacccacgctggaatgagacgtttgaatttgagctgcaggagggggccatggaggcgctgtgcgtggaggcctgggactgggacctcgtcagccgaaacgacttcctgggcaaagtggtgattgatgtccagagactgcgggtggtgcagcaggaggagggctggttccggctgcagcccgaccagtccaagagccggcggcatgacgagggcaacctgggctccttgcagctggaggtgcggctgcgggacgagacggtgctgccctccagctactaccagccactggtgcacctgctgtgccacgaggtcaagctgggcatgcagggcccagggcagctgatcccactcatcgaggagacaaccagcaccgagtgtcgccaggacgtggccacgaacctgctcaagctcttcctggggcaggggctggccaaggacttcctggacctgctcttccagctggagctgagtcgcaccagtgagaccaacaccctgttccggagcaactctctggcctcaaagtccatggagtcttttctgaaggtggccgggatgcagtacctgcacggcgtcctgggccccatcatcaacaaggtgtttgaggagaagaagtacgtggagctggaccccagcaaagtggaagttaaggatgtagggtgctccgggctgcaccgcccgcagaccgaggccgaggtgctggagcagagcgcgcagacgctgcgcgcccacctgggggccctgctgagcgcgctcagccgctcggttcgcgcgtgccccgccgtggtgcgcgccaccttccgccagctcttccggcgcgtgcgcgagcgcttccccggcgcccagcacgagaatgtaccgttcatcgccgtcaccagcttcctgtgcctgcgcttcttctctcccgccatcatgtcgcccaagctcttccacctgcgggagcgccacgcggacgcccgcaccagccgcaccctgctcctgttggccaaggcagtccagaacgtgggcaacatggacacgccggcttccagggccaaggaggcttggatggagccgctgcagcccaccgtgcgccagggcgtggcgcagctgaaggacttcatcaccaagctcgtggacatcgaggagaaggacgagctggacctgcagcggacgctgagtttgcaggcgccacctgtgaaggaggggccactcttcatccacaggaccaagggcaagggccccctcatgtcctcctccttcaagaagctctacttctccctcactaccgaggccctcagcttcgcgaagacgcccagctccaagaaaagcgccctcatcaagttagccaacatccgggcagcggaaaaggttgaggaaaagagctttggcggctcgcacgtcatgcaggtcatctacacggacgacgccggcaggccccagactgcctacctgcagtgcaagtgtgtgaatgagcttaaccagtggctgtctgcgctgcggaaggtgagcatcaacaacaccggactgctgggctcctaccaccctggcgtcttccgtggggacaagtggagctgctgccaccaaaaagagaagacagacacagactttcactctgtcccccagactggagtgcaatggcacgatctcagctcgctgcaatctccacctcccagggtcaagcaattctcctgcctcaacctccccagtagctgggatgaccggcactcgccaccaagcctagctaatttttttgtattttgactagagatggggtttcaccatgttagtcaagctgctcttgttttgttgttgttgttgttgttgttgttgtttgatactgagtctcgctctatcatccaggctggagtgcagtggtgcaatctcggctcactgcaatctccgtttcccag

SEQ ID NO: 17355 - protein, 794 aa, Homo sapiens
MNDEGPVAETKWSSDTRLQQAQALRAVPGPQSPGTVVIIAILSILLAVLLTVLLAVLIYTCTGSSDPYCIVKVDNEPIIRTATVWKTLCPFWGEEYQVHLPPTFHAVAFYVMDEDALSRDDVIGKVCLTRDTIASHPKGFSGWAHLTEVDPDEEVQGEIHLRLEVWPGARACRLRCSVLEARDLAPKDRNGTSDPFVRVRYKGRTRETSIVKKSCYPRWNETFEFELQEGAMEALCVEAWDWDLVSRNDFLGKVVIDVQRLRVVQQEEGWFRLQPDQSKSRRHDEGNLGSLQLEVRLRDETVLPSSYYQPLVHLLCHEVKLGMQGPGQLIPLIEETTSTECRQDVATNLLKLFLGQGLAKDFLDLLFQLELSRTSETNTLFRSNSLASKSMESFLKVAGMQYLHGVLGPIINKVFEEKKYVELDPSKVEVKDVGCSGLHRPQTEAEVLEQSAQTLRAHLGALLSALSRSVRACPAVVRATFRQLFRRVRERFPGAQHENVPFIAVTSFLCLRFFSPAIMSPKLFHLRERHADARTSRTLLLLAKAVQNVGNMDTPASRAKEAWMEPLQPTVRQGVAQLKDFITKLVDIEEKDELDLQRTLSLQAPPVKEGPLFIHRTKGKGPLMSSSFKKLYFSLTTEALSFAKTPSSKKSALIKLANIRAAEKVEEKSFGGSHVMQVIYTDDAGRPQTAYLQCKCVNELNQWLSALRKVSINNTGLLGSYHPGVFRGDKWSCCHQKEKTDTDFHSVPQTGVQWHDLSSLQSPPPRVKQFSCLNLPSSWDDRHSPPSLANFFVF

SEQ ID NO: 17356 - DNA, 392 bp, Homo sapiens
ttggtttcttccgggcttgaccgtcctggcctgtggggaggaagtcacagacctgtccctctgtgcccttccctctaggagttcccttttgtgtcagggtccagagccactgggaaaagtagtgatatcagggccaccaaatatatttggcgggttctggaatacctacgagcgtggccaaggggccagcggcggctgaaatccagcccacaccagcctcctgggctcctaccatcccggtgccttccgtggggacaagtggagctgctgccaccaaaaagacgagacagtgtgtgaatgagcttaaccagtggctgtctgcgctgcggaaggtgagcatcaacaacaccggactgctgggctcctaccaccctggcgtcttccgtggggac

SEQ ID NO: 17357 - protein, 88 aa, Homo sapiens
YQGHQIYLAGSGIPTSVAKGPAAAEIQPTPASWAPTIPVPSVGTSGAAATKKTRQCVNELNQWLSALRKVSINNTGLLGSYHPGVFRG

SEQ ID NO: 17358 - DNA, 651 bp, Homo sapiens
agcaggcagtggacgtagtcatggggctcaagggcggagcaaacatcaacagctggtttaactgacgctgctgcactggataccccaccccggtgccgggcacataggtgcagcctgagagtaagcagacccgggttggaaggtcccgcgattcaccaccgacaggatgggcggccttggcaacccccgacccctcgcaggcctgttcccttatccatgagatggagctcggacaaggtggccacaggaaggctttgcaaactgtgaagtgcagtgcctacgtgggcgtgccagtggcctcgccggagccggtagggaacactctgcagtccaggccagggccccggtaggacacccagctgtgcatcccgcccgtggccgcaaggcccgcaccttggccaacaggagcagggtgcggctggtgcgggcgtccgcgtggcgctcccgcaggtggaagagcttgggcgacatgatggcgggagagaagaagcgcaggcacaggaagctggtgacggcgatgaacggtacattctggaggggtgcggaagagcgcgggctggagtcccccagaccagggctcctggcagccccctccccttaggctccgtccctgaccctcgctgggacacagcctccctggtcctccccagc

SEQ ID NO: 17359 - protein, 43 aa, Homo sapiens
MMAGEKKRRHRKLVTAMNGTFWRGAEERGLESPRPGLLAAPSP

SEQ ID NO: 17360 - DNA, 809 bp, Homo sapiens
cgagcttggtgatgaagtccttcagctgcgccacgccctggcgcacggtgggctgcagcggctccatccaagcctccttggccctggaagccggcgtgtccatgttgcccacgttctggactgcctggaggtgacagcaggaaggaccaggttctgctaggtttaactgacgctgctgcactggataccccaccccggtgccgggcacataggtgcagcctgagagtaagcagacccgggttggaaggtcccgcgattcaccaccgacaggatgggcggccttggcaacccccgacccctcgcaggcctgttcccttatccatgagatggagctcggacaaggtggccacaggaaggctttgcaaactgtgaagtgcagtgcctacgtgggcgtgccagtggcctcgccggagccggtagggaacactctgcagtccaggccagggccccggtaggacacccagctgtgcatcccgcccgtggccgcaaggcccgcaccttggccaacaggagcagggtgcggctggtgcgggcgtccgcgtggcgctcccgcaggtggaagagcttgggcgacatgatggcgggagagaagaagcgcaggcacaggaagctggtgacggcgatgaacggtacattctggaggggtgcggaagagcgcgggctggagtcccccagaccagggctcctggcagccccctccccttaggctccgtccctgaccctcgctgggacacagcctccctggtcctccccagcgctccctggttccccaccgctcttcacccctcgccccagcccagtccaacccg

SEQ ID NO: 17361 - protein, 43 aa, Homo sapiens; identical to SEQ ID NO: 17359

SEQ ID NO: 17362 - DNA, 1155 bp, Homo sapiens
ccgccgcccgccaccccggaccccggtgtctggcttcccccgagccgggaccccgcgatggccaagcgcagctcgctgtacatccgcatcgtggaggggaagaaccttcccgccaaggacatcactggcagcagcgacccctactgcatcgtgaaggtggacaatgagcccatcatcaggacagccacagtgtggaagaccctgtgccccttctggggtgaggagtaccaagtgcacctgccgcccaccttccacgctgtggctttctatgtcatggatgaggatgccctcagccgggacgacgttatcggaaaggtctgccttacaagggacaccatagcctctcaccctaagggtaagttctcccttccctcccacactggtctgcccagtccctggcctccctcccactcggagacctcccctctaggctccgtctggtctcctgctcagggaaagccatttctactctccccagaagccggggccacgttctgtactcctggcctctgttctgcagcatgttcccaagcctggttgttactgcctcttccctagggtgaagaggggctgctatgggtggaatctgaggcctctgctggcagaagaaggggcctccttacactctattgctgaagcatagggaccccttctccaaatcaggccagctccttctgtaacccatggggtcgcctccatctgggccctagtactactgtgtcctaagtctgaagggttggcctagagccagtccaggctggagatccctttcaattatttctgggatgcagacattgttttgtgttattgtttttacaatttttatatagtttttttttaaaaaaaaggccgggcacggtggctcacacctgtaatcccagcactttgggaggccgagacgggtggatcacgaggtcaggagatcgagaccatcctggctaacacggtgaaaccccgtctctactaaaagtacaaaaaaattagctgggcgtggtggcaggcacctgtagtcctagctacttggcaggctgaagcaggagaatggcgtgaacctgggaggcagagcttgcagtaagccgagatcgcgccactgcactccagcctcagcaacggagcaagactccacctcaaaaataaataaataaataaatgaat

SEQ ID NO: 17363 - protein, 166 aa, Homo sapiens
MAKRSSLYIRIVEGKNLPAKDITGSSDPYCIVKVDNEPIIRTATVWKTLCPFWGEEYQVHLPPTFHAVAFYVMDEDALSRDDVIGKVCLTRDTIASHPKGKFSLPSHTGLPSPWPPSHSETSPLGSVWSPAQGKPFLLSPEAGATFCTPGLCSAACSQAWLLLPLP

SEQ ID NO: 17364 - DNA, 1955 bp, Homo sapiens
ggggcgatgagccgatccttgggcgggtttgccccgccggagtaatccggaagaggcctcttattagggctctggtggcggcggtggcggacacttggggtctggacgcaacggcggcgggagcatgaacgcccctccagccttcgagtcgttcttgctcttcgagggcgagaagatcaccattaacaaggacaccaaggtacccaaggcctgcttattcaccatcaacaaagaagaccacacactgggaaacatcattaaatcacgtgcctgcttccccttcgccttctgccgtgattgtcagtttcctgaggcctccccagccacgcttcctgtacagcctgcagaactctgccccagagcacatcagctatgtgccccagctctcaaacgacaccttggcggggaggctcaccctgtccaccttcacgctggagcagcctctaggccagttcagcagccacaacatctctgacttggataccatctggctggtggtggccctcagcaacgccacccagagcttcacggccccacggacaaaccaggacatccctgctcctgccaacttctcccagaggggctactatctcacactgagggccaaccgggtgctgtaccagaccagaggccagctccatgtcctccgcgtcggcaatgatacccactgccaaccaacaaaaattggctgcaaccatcccctaccaggacccggcccctacagggtgaagttcctggtgatgaatgacgaaggacccgtggctgaaaccaagtggtccagcgacactcgcctgcagcaagcccaggcacttcgggctgtccccggcccccagagcccgggcaccgtggtcatcatcgccatcctgtctatcctcctggccgtcctcctcacggtcctcctggctgtgctcatatacacctgcactggcagcagcgacccctactgcatcgtgaaggtggacaatgagcccatcatcaggacagccacagtgtggaagaccctgtgccccttctggggtgaggagtaccaagtgcacctgccgcccaccttccacgctgtggctttctatgtcatggatgaggatgccctcagccgggacgacgttatcggaaaggtctgccttacaagggacaccatagcctctcaccctaagggtaagttctcccttccctcccacactggtctgcccagtccctggcctccctcccactcggagacctcccctctaggctccgtctggtctcctgctcagggaaagccatttctactctccccagaagccggggccacgttctgtactcctggcctctgttctgcagcatgttcccaagcctggttgttactgcctcttccctagggtgaagaggggctgctatgggtggaatctgaggcctctgctggcagaagaaggggcctccttacactctattgctgaagcatagggaccccttctccaaatcaggccagctccttctgtaacccatggggtcgcctccatctgggccctagtactactgtgtcctaagtctgaagggttggcctagagccagtccaggctggagatccctttcaattatttctgggatgcagacattgttttgtgttattgtttttacaatttttatatagtttttttttaaaaaaaaggccgggcacggtggctcacacctgtaatcccagcactttgggaggccgagacgggtggatcacgaggtcaggagatcgagaccatcctggctaacacggtgaaaccccgtctctactaaaagtacaaaaaaattagctgggcgtggtggcaggcacctgtagtcctagctacttggcaggctgaagcaggagaatggcgtgaacctgggaggcagagcttgcagtaagccgagatcgcgccactgcactccagcctcagcaacggagcaagactccacctcaaaaataaataaataaataaatgaat

SEQ ID NO: 17365 - protein, 205 aa, Homo sapiens
MNDEGPVAETKWSSDTRLQQAQALRAVPGPQSPGTVVIIAILSILLAVLLTVLLAVLIYTCTGSSDPYCIVKVDNEPIIRTATVWKTLCPFWGEEYQVHLPPTFHAVAFYVMDEDALSRDDVIGKVCLTRDTIASHPKGKFSLPSHTGLPSPWPPSHSETSPLGSVWSPAQGKPFLLSPEAGATFCTPGLCSAACSQAWLLLPLP

SEQ ID NO: 17366 - DNA, 290 bp, Homo sapiens
ggaaacctcctgttcctcccgcaggggatagaatgttcctcctttctatgccctcctgcccagtcggccttcagccctgccagagccctccctcgccccaggacgggacggggaggaaggcctccctggactcacactgcctgcccacttcatccagcctggtagtgatcagctgcctcccacctgctctgagctacctgggggcggggagcatgcctgtgtccccagggcccccacagggcttggcacaagacaggcagcccatgagtgtttgccgaatgaacagacga

SEQ ID NO: 17367 - protein, 85 aa, Homo sapiens [sequence omitted]

SEQ ID NO: 17368 - DNA, 1188 bp, Homo sapiens
cggcggtggcggacacttggggtctggacgcaacggcggcgggagcatgaacgcccctccagccttcgagtcgttcttgctcttcgagggcgagaagatcaccattaacaaggacaccaaggtacccaaggcctgcttattcaccatcaacaaagaagaccacacactgggaaacatcattaaatcacaactcctaaaagacccgcaagtgctatttgctggctacaaagtcccccaccccttggagcacaagatcatcatccgagtgcagaccacgccggactacagcccccaggaagcctttaccaacgccatcaccgacctcatcagtgagctgtccctgctggaggagcgcttccggacgtgcctgcttccccttcgccttctgccgtgattgtcagtttcctgaggcctccccagccacgcttcctgtacagcctgcagaactctgccccagagcacatcagctatgtgccccagctctcaaacgacaccttggcggggaggctcaccctgtccaccttcacgctggagcagcctctaggccagttcagcagccacaacatctctgacttggataccatctggctggtggtggccctcagcaacgccacccagagcttcacggccccacggacaaaccaggacatccctgctcctgccaacttctcccagaggggctactatctcacactgagggccaaccgggtgctgtaccagaccagaggccagctccatgtcctccgcgtcggcaatgatacccactgccaaccaacaaaaattggctgcaaccatcccctaccaggacccggcccctacagggtgaagttcctggtgatgaatgacgaaggacccgtggctgaaaccaagtggtccagcgacactcgcctgcagcaagcccaggcacttcgggctgtccccggcccccagagcccgggcaccgtggtcatcatcgccatcctgtctatcctcctggccgtcctcctcacggtcctcctggctgtgctcatatacacctggacctgcctcctcccaaagtcctctctgggggctctgggccatggcacagcaggacagccaccagaagccactgtcagagtctgatgggtgaggacggaaggtggctcaggagtccttccttagggcagggacaattttttccaggagaggtgtgaggcctccagctcc

SEQ ID NO: 17369 - protein, 115 aa, Homo sapiens; identical to SEQ ID NO: 2068

SEQ ID NO: 17370 - DNA, 1091 bp, Homo sapiens
ggggcgatgagccgatccttgggcgggtttgccccgccggagtaatccggaagaggcctcttattagggctctggtggcggcggtggcggacacttggggtctggacgcaacggcggcgggagcatgaacgcccctccagccttcgagtcgttcttgctcttcgagggcgagaagatcaccattaacaaggacaccaaggtacccaaggcctgcttattcaccatcaacaaagaagaccacacactgggaaacatcattaaatcacgtgcctgcttccccttcgccttctgccgtgattgtcagtttcctgaggcctccccagccacgcttcctgtacagcctgcagaactctgccccagagcacatcagctatgtgccccagctctcaaacgacaccttggcggggaggctcaccctgtccaccttcacgctggagcagcctctaggccagttcagcagccacaacatctctgacttggataccatctggctggtggtggccctcagcaacgccacccagagcttcacggccccacggacaaaccaggacatccctgctcctgccaacttctcccagaggggctactatctcacactgagggccaaccgggtgctgtaccagaccagaggccagctccatgtcctccgcgtcggcaatgatacccactgccaaccaacaaaaattggctgcaaccatcccctaccaggacccggcccctacagggtgaagttcctggtgatgaatgacgaaggacccgtggctgaaaccaagtggtccagcgacactcgcctgcagcaagcccaggcacttcgggctgtccccggcccccagagcccgggcaccgtggtcatcatcgccatcctgtctatcctcctggccgtcctcctcacggtcctcctggctgtgctcatatacacctggacctgcctcctcccaaagtcctctctgggggctctgggccatggcacagcaggacagccaccagaagccactgtcagagtctgatgggtgaggacggaaggtggctcaggagtccttccttagggcagggacaattttttccaggagaggtgtgaggcctccagctcc

SEQ ID NO: 17371 - protein, 116 aa, Homo sapiens; identical to SEQ ID NO: 2066

SEQ ID NO: 17372 - DNA, 1176 bp, Homo sapiens
cggcggtggcggacacttggggtctggacgcaacggcggcgggagcatgaacgcccctccagccttcgagtcgttcttgctcttcgagggcgagaagatcaccattaacaaggacaccaaggtacccaaggcctgcttattcaccatcaacaaagaagaccacacactgggaaacatcattaaatcacaactcctaaaagacccgcaagtgctatttgctggctacaaagtcccccaccccttggagcacaagatcatcatccgagtgcagaccacgccggactacagcccccaggaagcctttaccaacgccatcaccgacctcatcagtgagctgtccctgctggaggagcgcttccggacgtgcctgcttccccttcgccttctgccgtgattgtcagtttcctgaggcctccccagccacgcttcctgtacagcctgcagaactctgccccagagcacatcagctatgtgccccagctctcaaacgacaccttggcggggaggctcaccctgtccaccttcacgctggagcagcctctaggccagttcagcagccacaacatctctgacttggataccatctggctggtggtggccctcagcaacgccacccagagcttcacggccccacggacaaaccaggacatccctgctcctgccaacttctcccagaggggctactatctcacactgagggccaaccgggtgctgtaccagaccagaggccagctccatgtcctccgcgtcggcaatgatacccactgccaaccaacaaaaattggctgcaaccatcccctaccaggacccggcccctacagggtgacatggactgcagggtatggccgcggcagcccagctcttaaggggacagcctgggaaaacagacttagggacaatgatcttgagccatgaaatgatgtccaatgccccttgtgccacctgacatcagcctgattaatgaacaaacagaagaggaagcaggggacctgtgtgtccctctctctgcttttctgtctttctctgtgccccctctcttatgtctctcacgctgtctcttgtccttgtttttaactctgacacgccatgggaacttggctcacttcctagggggaagctgtctggactggcccagagatgggcaccaccatttcccaataaacacaagataaaatc

SEQ ID NO: 17373 - protein, 115 aa, Homo sapiens; identical to SEQ ID NO: 2068

SEQ ID NO: 17374 - DNA, 1005 bp, Homo sapiens
gtggcggcggtggcggacacttggggtctggacgcaacggcggcgggagcatgaacgcccctccagccttcgagtcgttcttgctcttcgagggcgagaagatcaccattaacaaggacaccaaggtacccaaggcctgcttattcaccatcaacaaagaagaccacacactgggaaacatcattaaatcacgtgcctgcttccccttcgccttctgccgtgattgtcagtttcctgaggcctccccagccacgcttcctgtacagcctgcagaactctgccccagagcacatcagctatgtgccccagctctcaaacgacaccttggcggggaggctcaccctgtccaccttcacgctggagcagcctctaggccagttcagcagccacaacatctctgacttggataccatctggctggtggtggccctcagcaacgccacccagagcttcacggccccacggacaaaccaggacatccctgctcctgccaacttctcccagaggggctactatctcacactgagggccaaccgggtgctgtaccagaccagaggccagctccatgtcctccgcgtcggcaatgatacccactgccaaccaacaaaaattggctgcaaccatcccctaccaggacccggcccctacagggtgacatggactgcagggtatggccgcggcagcccagctcttaaggggacagcctgggaaaacagacttagggacaatgatcttgagccatgaaatgatgtccaatgccccttgtgccacctgacatcagcctgattaatgaacaaacagaagaggaagcaggggacctgtgtgtccctctctctgcttttctgtctttctctgtgccccctctcttatgtctctcacgctgtctcttgtccttgtttttaactctgacacgccatgggaacttggctcacttcctagggggaagctgtctggactggcccagagatgggcaccaccatttcccaataaacacaagataaaatc

SEQ ID NO: 17375 - protein, 116 aa, Homo sapiens; identical to SEQ ID NO: 2066

SEQ ID NO: 17376 - DNA, 1503 bp, Homo sapiens
tgtggaggggccctgccctctggggcaagaggtcagggaggagggcgctggctgggttcccaggcgcctgcccctgagaggcgcaaatggccctaatggggttattaggtggagcagatgcgtccggctcctgctgtggaggaaatgctcaaatgatcttgaagctaccaggctgggagaggcaggcaggggatggggcagacaggctgccaacctctgtgagataagccctggcctctccagaaccttttcagaacagctatgagccccaaccctggggctgagtgacccaagacagatcactcacactctctgggcctcagtttccccttacataaaaagcaatggttaggccaggtgcagatggctcacacctctaatcctagtgctttgggaggccgaggtgggaggattgcttgagaccaagagttcaagtccagcctgggcaacatagcaacaccccatctctacaaaacataaatacaaaaattaaggccgggcatggtggttaaggccaggcgtggtggctcacacttggaatcccacttcagcctccccaggtgctgggattacaggcatgagccaccgcacccagcggggacaggacaattttgccagctggagaaggggtggcccccaaatgtccccttcaccaccctcctgcctcttccttcagaacactttttccctgaagccctcctgggtagccccctacccacatgcctcagcattgggaggtggggagtatgggggtcccccttctcctcagccccatttggagtaatgtcctgtgcagctgagctcacaactcctcctccacctgtcccttcacccggtgtcactggcaattgctcacttcctgggcctgcacccactcagctcccctatccctgggcatcagcctcagccagctcccatgtggactaatgacccttgtccctcccctcagctgcctctcttttttctttttttttttgtttttgagacagagtctggctctgtcacccaggctggagtgcagtggcgcgatcttgactcattgcaacctccacctcctgggttcaagcgattctcgtgcctcaccctcctgaatagctgggattacaggcacccgccaccatgcccggctgatttttgtatttcggtagagacggggtttcaccatgttggccaggctggtctcgaactcccgacctcaggtgatccgcccgcctcagcctcccaaattgctgggattacaggcgtgaggcagctcgcccggcaaccctcagctgcctctcatatgtccttggccccctggccatctctgaccagacatctaggaggcccctcctgccaatatgcttccccgacagccgagcccaaagctgtctccagccctgcaccttgtcttggttccccgggtgctccctttcccaggctgaagcctggacagccccaggcaacctctctccctgaccacagtaccacctggccacatgccacactgctttctacagcaga

SEQ ID NO: 17377 - protein, 141 aa, Homo sapiens [sequence omitted]

SEQ ID NO: 17378 - DNA, 434 bp, Homo sapiens
ctgtggaggaaatgctcaaatgatcttgaagctaccaggctgggagaggcaggcaggggatggggcagacaggctgccaacctctgtgagataagccctggcctctccagaaccttttcagaacagctatgagccccaaccctggggctgagtgacccaagacagatcactcacactctctgggcctcagtttccccttacataaaaagcaatggttaggccaggtgcagatggctcacacctcccaaagtgctgaaattacaagcataagccaccatgcctggcctcccttcctggccttctggtctccagactggagagagggccacaaagtcctgcccagacagagggctgctaaggctggggtggggctgggggtgtgcagaagggactctgcaggggctgacctctgagtctcaggggacagggcaaat

SEQ ID NO: 17379 - protein, 60 aa, Homo sapiens [sequence omitted]

SEQ ID NO: 17380 - DNA, 1458 bp, Homo sapiens
ggagcctctggggctgcagacactgcagacggacggacagacagatggacaacagctggaggcttggcccggccatagggctctctgcgggacagtcccagctgctagtgtcgctgttgctgctactgacccgtgtccagcctgggacagacgtggccacccagagcttcacggccccacggacaaaccaggacatccctgctcctgccaacttctcccagaggggctactatctcacactgagggccaaccgggtgctgtaccagaccagaggccagctccatgtcctccgcgtcggcaatgatacccactgccaaccaacaaaaattggctgcaaccatcccctaccaggacccggcccctacagggtgaagttcctggtgatgaatgacgaaggacccgtggctgaaaccaagtggtccagcgacactcgcctgcagcaagcccaggcacttcgggctgtccccggcccccagagcccgggcaccgtggtcatcatcgccatcctgtctatcctcctggccgtcctcctcacggtcctcctggctgtgctcatatacacctgcttcaacagctgcaggagcacttccctatcaggcccagaggaggcagggagtgtgagaagatacaccacgcacctcgcgttcagcactcctgccgagggggcttcctgaggggttccagaggggcccacgtgtccctccacctcctccctggcccaggctgcagagcctgagctgggacacgccctgaagcttctggaccctgagagagattgtttcttttctttactatttttttttttttttttgagacggagtctcactctgtcgccaggctggcgcgatcttggctcactgcaacctctgcctcacgggttcaagcgattttcctgcttcagcctcctgagtagctgggactacaggcacacgccaccatgcccagctcatttttgtatttttagtagagatggggtttcaccatgttggccaggatggcctccatctcttgaccttgtgatccgcccgactcggcctcccaaaatgctgggattacaggcgtgagccatcaagtctggcgagagagattgtttctagatgagggtgggggcgggtgtccttagcccaaagcttgtgccagtctctatcagaaataaatgcccccaaaacctccctgcctgtccgtgacatcatacacctgggtagtctttctgcaccactgcccctggctcctcctcctgaggaggtccccaagggcgtgtaggaccagggcaaggctcaggatcctagagaaattgtcacctggggcaggacaggcctctctgccagccttactgtccctatctgtaaaatgaggatggtaaccctgaacccacaaggccacagtaaggctaaaccaaggtgaacatgccttgggaactgtgaagactgtggaccccaagccggttgcggtggctca

SEQ ID NO: 17381 - protein, 209 aa, Homo sapiens; identical to SEQ ID NO: 17299

SEQ ID NO: 17382 - DNA, 1583 bp, Homo sapiens
tcttccctggcaagattcttctgaattgtgctgccttggccaaaagaggaggaactaccctgccctgacagaggctggggatgaaggaggaagagacagccggtcccctggataaagagctgccccagagcacatcagctatgtgccccagctctcaaacgacaccttggcggggaggctcaccctgtccaccttcacgctggagcagcctctaggccagttcagcagccacaacatctctgacttggataccatctggctggtggtggccctcagcaacgccacccagagcttcacggccccacggacaaaccaggacatccctgctcctgccaacttctcccagaggggctactatctcacactgagggccaaccgggtgctgtaccagaccagaggccagctccatgtcctccgcgtcggcaatgatacccactgccaaccaacaaaaattggctgcaaccatcccctaccaggacccggcccctacagggtgaagttcctggtgatgaatgacgaaggacccgtggctgaaaccaagtggtccagcgacactcgcctgcagcaagcccaggcacttcgggctgtccccggcccccagagcccgggcaccgtggtcatcatcgccatcctgtctatcctcctggccgtcctcctcacggtcctcctggctgtgctcatatacacctgcttcaacagctgcaggagcacttccctatcaggcccagaggaggcagggagtgtgagaagatacaccacgcacctcgcgttcagcactcctgccgagggggcttcctgaggggttccagaggggcccacgtgtccctccacctcctccctggcccaggctgcagagcctgagctgggacacgccctgaagcttctggaccctgagagagattgtttcttttctttactatttttttttttttttttgagacggagtctcactctgtcgccaggctggcgcgatcttggctcactgcaacctctgcctcacgggttcaagcgattttcctgcttcagcctcctgagtagctgggactacaggcacacgccaccatgcccagctcatttttgtatttttagtagagatggggtttcaccatgttggccaggatggcctccatctcttgaccttgtgatccgcccgactcggcctcccaaaatgctgggattacaggcgtgagccatcaagtctggcgagagagattgtttctagatgagggtgggggcgggtgtccttagcccaaagcttgtgccagtctctatcagaaataaatgcccccaaaacctccctgcctgtccgtgacatcatacacctgggtagtctttctgcaccactgcccctggctcctcctcctgaggaggtccccaagggcgtgtaggaccagggcaaggctcaggatcctagagaaattgtcacctggggcaggacaggcctctctgccagccttactgtccctatctgtaaaatgaggatggtaaccctgaacccacaaggccacagtaaggctaaaccaaggtgaacatgccttgggaactgtgaagactgtggaccccaagccggttgcggtggctca

SEQ ID NO: 17383 - protein, 96 aa, Homo sapiens
MNDEGPVAETKWSSDTRLQQAQALRAVPGPQSPGTVVIIAILSILLAVLLTVLLAVLIYTCFNSCRSTSLSGPEEAGSVRRYTTHLAFSTPAEGAS

SEQ ID NO: 17384 - DNA, 1912 bp, Homo sapiens
cggcggtggcggacacttggggtctggacgcaacggcggcgggagcatgaacgcccctccagccttcgagtcgttcttgctcttcgagggcgagaagatcaccattaacaaggacaccaaggtacccaaggcctgcttattcaccatcaacaaagaagaccacacactgggaaacatcattaaatcacaactcctaaaagacccgcaagtgctatttgctggctacaaagtcccccaccccttggagcacaagatcatcatccgagtgcagaccacgccggactacagcccccaggaagcctttaccaacgccatcaccgacctcatcagtgagctgtccctgctggaggagcgcttccggacgtgcctgcttccccttcgccttctgccgtgattgtcagtttcctgaggcctccccagccacgcttcctgtacagcctgcagaactctgccccagagcacatcagctatgtgccccagctctcaaacgacaccttggcggggaggctcaccctgtccaccttcacgctggagcagcctctaggccagttcagcagccacaacatctctgacttggataccatctggctggtggtggccctcagcaacgccacccagagcttcacggccccacggacaaaccaggacatccctgctcctgccaacttctcccagaggggctactatctcacactgagggccaaccgggtgctgtaccagaccagaggccagctccatgtcctccgcgtcggcaatgatacccactgccaaccaacaaaaattggctgcaaccatcccctaccaggacccggcccctacagggtgaagttcctggtgatgaatgacgaaggacccgtggctgaaaccaagtggtccagcgacactcgcctgcagcaagcccaggcacttcgggctgtccccggcccccagagcccgggcaccgtggtcatcatcgccatcctgtctatcctcctggccgtcctcctcacggtcctcctggctgtgctcatatacacctgcttcaacagctgcaggagcacttccctatcaggcccagaggaggcagggagtgtgagaagatacaccacgcacctcgcgttcagcactcctgccgagggggcttcctgaggggttccagaggggcccacgtgtccctccacctcctccctggcccaggctgcagagcctgagctgggacacgccctgaagcttctggaccctgagagagattgtttcttttctttactatttttttttttttttttgagacggagtctcactctgtcgccaggctggcgcgatcttggctcactgcaacctctgcctcacgggttcaagcgattttcctgcttcagcctcctgagtagctgggactacaggcacacgccaccatgcccagctcatttttgtatttttagtagagatggggtttcaccatgttggccaggatggcctccatctcttgaccttgtgatccgcccgactcggcctcccaaaatgctgggattacaggcgtgagccatcaagtctggcgagagagattgtttctagatgagggtgggggcgggtgtccttagcccaaagcttgtgccagtctctatcagaaataaatgcccccaaaacctccctgcctgtccgtgacatcatacacctgggtagtctttctgcaccactgcccctggctcctcctcctgaggaggtccccaagggcgtgtaggaccagggcaaggctcaggatcctagagaaattgtcacctggggcaggacaggcctctctgccagccttactgtccctatctgtaaaatgaggatggtaaccctgaacccacaaggccacagtaaggctaaaccaaggtgaacatgccttgggaactgtgaagactgtggaccccaagccggttgcggtggctca

SEQ ID NO: 17385 - protein, 115 aa, Homo sapiens; identical to SEQ ID NO: 2068

SEQ ID NO: 17386 - DNA, 1815 bp, Homo sapiens
ggggcgatgagccgatccttgggcgggtttgccccgccggagtaatccggaagaggcctcttattagggctctggtggcggcggtggcggacacttggggtctggacgcaacggcggcgggagcatgaacgcccctccagccttcgagtcgttcttgctcttcgagggcgagaagatcaccattaacaaggacaccaaggtacccaaggcctgcttattcaccatcaacaaagaagaccacacactgggaaacatcattaaatcacgtgcctgcttccccttcgccttctgccgtgattgtcagtttcctgaggcctccccagccacgcttcctgtacagcctgcagaactctgccccagagcacatcagctatgtgccccagctctcaaacgacaccttggcggggaggctcaccctgtccaccttcacgctggagcagcctctaggccagttcagcagccacaacatctctgacttggataccatctggctggtggtggccctcagcaacgccacccagagcttcacggccccacggacaaaccaggacatccctgctcctgccaacttctcccagaggggctactatctcacactgagggccaaccgggtgctgtaccagaccagaggccagctccatgtcctccgcgtcggcaatgatacccactgccaaccaacaaaaattggctgcaaccatcccctaccaggacccggcccctacagggtgaagttcctggtgatgaatgacgaaggacccgtggctgaaaccaagtggtccagcgacactcgcctgcagcaagcccaggcacttcgggctgtccccggcccccagagcccgggcaccgtggtcatcatcgccatcctgtctatcctcctggccgtcctcctcacggtcctcctggctgtgctcatatacacctgcttcaacagctgcaggagcacttccctatcaggcccagaggaggcagggagtgtgagaagatacaccacgcacctcgcgttcagcactcctgccgagggggcttcctgaggggttccagaggggcccacgtgtccctccacctcctccctggcccaggctgcagagcctgagctgggacacgccctgaagcttctggaccctgagagagattgtttcttttctttactatttttttttttttttttgagacggagtctcactctgtcgccaggctggcgcgatcttggctcactgcaacctctgcctcacgggttcaagcgattttcctgcttcagcctcctgagtagctgggactacaggcacacgccaccatgcccagctcatttttgtatttttagtagagatggggtttcaccatgttggccaggatggcctccatctcttgaccttgtgatccgcccgactcggcctcccaaaatgctgggattacaggcgtgagccatcaagtctggcgagagagattgtttctagatgagggtgggggcgggtgtccttagcccaaagcttgtgccagtctctatcagaaataaatgcccccaaaacctccctgcctgtccgtgacatcatacacctgggtagtctttctgcaccactgcccctggctcctcctcctgaggaggtccccaagggcgtgtaggaccagggcaaggctcaggatcctagagaaattgtcacctggggcaggacaggcctctctgccagccttactgtccctatctgtaaaatgaggatggtaaccctgaacccacaaggccacagtaaggctaaaccaaggtgaacatgccttgggaactgtgaagactgtggaccccaagccggttgcggtggctca

SEQ ID NO: 17387 - protein, 116 aa, Homo sapiens; identical to SEQ ID NO: 2066

SEQ ID NO: 17388 - DNA, 1172 bp, Homo sapiens
ggagcctctggggctgcagacactgcagacggacggacagacagatggacaacagctggaggcttggcccggccatagggctctctgcgggacagtcccagctgctagtgtcgctgttgctgctactgacccgtgtccagcctgggacagacgtggccacccagagcttcacggccccacggacaaaccaggacatccctgctcctgccaacttctcccagaggggctactatctcacactgagggccaaccgggtgctgtaccagaccagaggccagctccatgtcctccgcgtcggcaatgatacccactgccaaccaacaaaaattggctgcaaccatcccctaccaggacccggcccctacagggtgaagttcctggtgatgaatgacgaaggacccgtggctgaaaccaagtggtccagcgacactcgcctgcagcaagcccaggcacttcgggctgtccccggcccccagagcccgggcaccgtggtcatcatcgccatcctgtctatcctcctggccgtcctcctcacggtcctcctggctgtgctcatatacacctgcttcaacagctgcaggagcacttccctatcaggcccagaggaggcagggagtgtgagaagatacaccacgcacctcgcgttcagcactcctgccgagggggcttcctgaggggttccagaggggcccacgtgtccctccacctcctccctggcccaggctgcagagcctgagctgggacacgccctgaagcttctggaccctgagagagattgtttcttttctttactatttttttttttttttttgagacggagtctcactctgtcgccaggctggcgcgatcttggctcactgcaacctctgcctcacgggttcaagcgattttcctgcttcagcctcctgagtagctgggactacaggcacacgccaccatgcccagctcatttttgtatttttagtagagatggggtttcaccatgttggccaggatggcctccatctcttgaccttgtgatccgcccgactcggcctcccaaaatgctgggattacaggcgtgagccatcaagtctggcgagagagattgtttctagatgagggtgggggcgggtgtccttagcccaaagcttgtgccagtctctatcagaaataaatgcccccaaaacctc

SEQ ID NO: 17389 - protein, 209 aa, Homo sapiens; identical to SEQ ID NO: 17299

SEQ ID NO: 17390 - DNA, 1297 bp, Homo sapiens
tcttccctggcaagattcttctgaattgtgctgccttggccaaaagaggaggaactaccctgccctgacagaggctggggatgaaggaggaagagacagccggtcccctggataaagagctgccccagagcacatcagctatgtgccccagctctcaaacgacaccttggcggggaggctcaccctgtccaccttcacgctggagcagcctctaggccagttcagcagccacaacatctctgacttggataccatctggctggtggtggccctcagcaacgccacccagagcttcacggccccacggacaaaccaggacatccctgctcctgccaacttctcccagaggggctactatctcacactgagggccaaccgggtgctgtaccagaccagaggccagctccatgtcctccgcgtcggcaatgatacccactgccaaccaacaaaaattggctgcaaccatcccctaccaggacccggcccctacagggtgaagttcctggtgatgaatgacgaaggacccgtggctgaaaccaagtggtccagcgacactcgcctgcagcaagcccaggcacttcgggctgtccccggcccccagagcccgggcaccgtggtcatcatcgccatcctgtctatcctcctggccgtcctcctcacggtcctcctggctgtgctcatatacacctgcttcaacagctgcaggagcacttccctatcaggcccagaggaggcagggagtgtgagaagatacaccacgcacctcgcgttcagcactcctgccgagggggcttcctgaggggttccagaggggcccacgtgtccctccacctcctccctggcccaggctgcagagcctgagctgggacacgccctgaagcttctggaccctgagagagattgtttcttttctttactatttttttttttttttttgagacggagtctcactctgtcgccaggctggcgcgatcttggctcactgcaacctctgcctcacgggttcaagcgattttcctgcttcagcctcctgagtagctgggactacaggcacacgccaccatgcccagctcatttttgtatttttagtagagatggggtttcaccatgttggccaggatggcctccatctcttgaccttgtgatccgcccgactcggcctcccaaaatgctgggattacaggcgtgagccatcaagtctggcgagagagattgtttctagatgagggtgggggcgggtgtccttagcccaaagcttgtgccagtctctatcagaaataaatgcccccaaaacctc

SEQ ID NO: 17391 - protein, 96 aa, Homo sapiens; identical to SEQ ID NO: 17383

SEQ ID NO: 17392 - DNA, 1626 bp, Homo sapiens
cggcggtggcggacacttggggtctggacgcaacggcggcgggagcatgaacgcccctccagccttcgagtcgttcttgctcttcgagggcgagaagatcaccattaacaaggacaccaaggtacccaaggcctgcttattcaccatcaacaaagaagaccacacactgggaaacatcattaaatcacaactcctaaaagacccgcaagtgctatttgctggctacaaagtcccccaccccttggagcacaagatcatcatccgagtgcagaccacgccggactacagcccccaggaagcctttaccaacgccatcaccgacctcatcagtgagctgtccctgctggaggagcgcttccggacgtgcctgcttccccttcgccttctgccgtgattgtcagtttcctgaggcctccccagccacgcttcctgtacagcctgcagaactctgccccagagcacatcagctatgtgccccagctctcaaacgacaccttggcggggaggctcaccctgtccaccttcacgctggagcagcctctaggccagttcagcagccacaacatctctgacttggataccatctggctggtggtggccctcagcaacgccacccagagcttcacggccccacggacaaaccaggacatccctgctcctgccaacttctcccagaggggctactatctcacactgagggccaaccgggtgctgtaccagaccagaggccagctccatgtcctccgcgtcggcaatgatacccactgccaaccaacaaaaattggctgcaaccatcccctaccaggacccggcccctacagggtgaagttcctggtgatgaatgacgaaggacccgtggctgaaaccaagtggtccagcgacactcgcctgcagcaagcccaggcacttcgggctgtccccggcccccagagcccgggcaccgtggtcatcatcgccatcctgtctatcctcctggccgtcctcctcacggtcctcctggctgtgctcatatacacctgcttcaacagctgcaggagcacttccctatcaggcccagaggaggcagggagtgtgagaagatacaccacgcacctcgcgttcagcactcctgccgagggggcttcctgaggggttccagaggggcccacgtgtccctccacctcctccctggcccaggctgcagagcctgagctgggacacgccctgaagcttctggaccctgagagagattgtttcttttctttactatttttttttttttttttgagacggagtctcactctgtcgccaggctggcgcgatcttggctcactgcaacctctgcctcacgggttcaagcgattttcctgcttcagcctcctgagtagctgggactacaggcacacgccaccatgcccagctcatttttgtatttttagtagagatggggtttcaccatgttggccaggatggcctccatctcttgaccttgtgatccgcccgactcggcctcccaaaatgctgggattacaggcgtgagccatcaagtctggcgagagagattgtttctagatgagggtgggggcgggtgtccttagcccaaagcttgtgccagtctctatcagaaataaatgcccccaaaacctc

SEQ ID NO: 17393 - protein, 115 aa, Homo sapiens; identical to SEQ ID NO: 2068

SEQ ID NO: 17394 - DNA, 1529 bp, Homo sapiens
ggggcgatgagccgatccttgggcgggtttgccccgccggagtaatccggaagaggcctcttattagggctctggtggcggcggtggcggacacttggggtctggacgcaacggcggcgggagcatgaacgcccctccagccttcgagtcgttcttgctcttcgagggcgagaagatcaccattaacaaggacaccaaggtacccaaggcctgcttattcaccatcaacaaagaagaccacacactgggaaacatcattaaatcacgtgcctgcttccccttcgccttctgccgtgattgtcagtttcctgaggcctccccagccacgcttcctgtacagcctgcagaactctgccccagagcacatcagctatgtgccccagctctcaaacgacaccttggcggggaggctcaccctgtccaccttcacgctggagcagcctctaggccagttcagcagccacaacatctctgacttggataccatctggctggtggtggccctcagcaacgccacccagagcttcacggccccacggacaaaccaggacatccctgctcctgccaacttctcccagaggggctactatctcacactgagggccaaccgggtgctgtaccagaccagaggccagctccatgtcctccgcgtcggcaatgatacccactgccaaccaacaaaaattggctgcaaccatcccctaccaggacccggcccctacagggtgaagttcctggtgatgaatgacgaaggacccgtggctgaaaccaagtggtccagcgacactcgcctgcagcaagcccaggcacttcgggctgtccccggcccccagagcccgggcaccgtggtcatcatcgccatcctgtctatcctcctggccgtcctcctcacggtcctcctggctgtgctcatatacacctgcttcaacagctgcaggagcacttccctatcaggcccagaggaggcagggagtgtgagaagatacaccacgcacctcgcgttcagcactcctgccgagggggcttcctgaggggttccagaggggcccacgtgtccctccacctcctccctggcccaggctgcagagcctgagctgggacacgccctgaagcttctggaccctgagagagattgtttcttttctttactatttttttttttttttttgagacggagtctcactctgtcgccaggctggcgcgatcttggctcactgcaacctctgcctcacgggttcaagcgattttcctgcttcagcctcctgagtagctgggactacaggcacacgccaccatgcccagctcatttttgtatttttagtagagatggggtttcaccatgttggccaggatggcctccatctcttgaccttgtgatccgcccgactcggcctcccaaaatgctgggattacaggcgtgagccatcaagtctggcgagagagattgtttctagatgagggtgggggcgggtgtccttagcccaaagcttgtgccagtctctatcagaaataaatgcccccaaaacctc

SEQ ID NO: 17395 - protein, 116 aa, Homo sapiens; identical to SEQ ID NO: 2066

SEQ ID NO: 17396 - DNA, 901 bp, Homo sapiens
ggtggcggcggtggcggacacttggggtctggacgcaacggcggcgggagcatgaacgcccctccagccttcgagtcgttcttgctcttcgagggcgagaagatcaccattaacaaggacaccaaggtacccaaggcctgcttattcaccatcaacaaagaagaccacacactgggaaacatcattaaatcacgtgcctgcttccccttcgccttctgccgtgattgtcagtttcctgaggcctccccagccacgcttcctgtacagcctgcagaactctgccccagagcacatcagctatgtgccccagctctcaaacgacaccttggcggggaggctcaccctgtccaccttcacgctggagcagcctctaggccagttcagcagccacaacatctctgacttggataccatctggctggtggtggccctcagcaacgccacccagagcttcacggccccacggacaaaccaggacatccctgctcctgccaacttctcccagaggggctactatctcacactgagggccaaccgggtgctgtaccagaccagaggccagctccatgtcctccgcgtcggcaatgatacccactgccaaccaacaaaaattggctgcaaccatcccctaccaggacccggcccctacagggtgaagttcctggtgatgaatgacgaaggacccgtggctgaaaccaagtggtccagcgacactcgcctgcagcaagcccaggcacttcgggctgtccccggcccccagagcccgggcaccgtggtcatcatcgccatcctgtctatcctcctggccgtcctcctcacggtcctcctggctgtgctcatatacacctggtgagtggaccgggctgagaccgcccatgcctcttgggaggggcggggccct

SEQ ID NO: 17397 - protein, 116 aa, Homo sapiens; identical to SEQ ID NO: 2066

SEQ ID NO: 17398 - DNA, 665 bp, Homo sapiens
ctctgtcatgtggacctgggaagcttgtcctcatcctccatccttccccagggtggggcctgagaatctgagaaccttgagcctgggaggtcaaggccacatggtgccatcttggctcactgcagcctcaacctcccaggctcgagtgatcctcccacctcaggtcctaaaggaagagtcgctacattggggactgtttggacaaggagatccacggggtagacttagcgggattgtccctggggcagcctggatcctgaggctgccccgcctccttcctcagcccctccctggtcaggcgctcctggtgggtggggggggtagtccaggcttgtcttgcaactgtatgttctcttcagacccctccctggcgatgccagattcactgggctggcagattctgcccccaaacctgtccaaccagttgtttgagaggagggggtagctgggaggggcagcaggagatgccaggaacagcttcccctagcacagcacagactacagacaggggagcctctggggctgcagacactgcagacggacggacagacagatggacaacagctggaggcttggcccggccatagggctctctgcgggacagtcccagctgctagtgtcgctgttgctgctactgacccgtgtccagcctgggacagacgtgg

SEQ ID NO: 17399 - protein, 145 aa, Homo sapiens [sequence omitted]

SEQ ID NO: 17400 - DNA, 628 bp, Homo sapiens
gccctgacctcctgggtgctcttagccaagccctcttccctgtgtgtgctagaaagtgagggtcactcccttccacacaagggagtgaattgagggtggggatctgagctctctgagcagcaaagctggacacaggccaaattgccaatcctgagtccctctgtcatgtggacctgggaagcttgtcctcatcctccatccttccccagggtggggcctgagaattggagtgcagtggtgccatcttggctcactgcagcctcaacctcccaggctcgagtgatcctcccacctcaggtcctaaaggaagagtcgctacattggggactgtttggacaaggagatccacggggtagacttagcgggattgtccctggggcagcctggatcctgaggctgccccgcctccttcctcagcccctccctggtcaggcgctcctggtgggtggggggggtagtccaggcttgtcttgcaactgtatgttctcttcagacccctccctggcgatgccagattcactgggctggcagattctgcccccaaacctgtccaaccagttgtttgagaggagggggtagctgggaggggcagcaggagatgccaggaacagcttcccctagcacagca

SEQ ID NO: 17401 - protein, 137 aa, Homo sapiens
MWTWEACPHPPSFPRVGPENWSAVVPSWLTAASTSQARVILPPQVLKEESLHWGLFGQGDPRGRLSGIVPGAAWILRLPRLLPQPLPGQALLVGGGGSPGLSCNCMFSSDPSLAMPDSLGWQILPPNLSNQLFERRG

SEQ ID NO: 17402 - DNA, 1333 bp, Homo sapiens
cactcgccgtcgcttcagcttcatcttgaggccacacagcatctccgccacccagatctcctcaggctcaggggcgagcaccttccgtggctcctcctccaacgactcctcagattcgtcccaccactccatcttccttttccagcaaaaggacctatgcggggggctgggatctaccccaggggctgagtaaagaaaccaggccacggtgtaatgcttctgcagttgatcacaagagcacgactccatctcaaaaacaaacaaaaaaaaagagtgtcacctggggctacttggccagacacagagagcaaggagacatccctattatctgtcaaaaataatttgctgggattacagctgtgagccaccgcacccggccgcattcttctaaatcacagtacatctggttcccagtgcccaggctctcagggcagagggtccagtgtgatcactttgcatggcctctctcccctcctgagcttgtgccagggccccagggctgacctggagaaggaaaatggcagagggtgaagatggggtgtctggtttggggaccatcctggccccccttgtcactgttggcatctcttctgcacagtggcattgctgggaggtgcttactgtgcctattcaaggggctggcagccgcagcctcactgcagatcagggacttggcttcccggttgaccacaggtccaagaacctgcagggtccagcctcccccccatccccagtcttccccaccctggcccggccctccaggtgcagaaacatgcaggcccctctccaggactgtgggaggagtgtgtccctcagactggcctgtgtcctggctcctcttaccacctcttccagaggttgtcacctgcagctgccccaggataaaggcaaggccagagaggactcctgaactcctgtgtgcctggggtggcaggggcaaacatagccaactggtggcctgagcagggccatggtgaggacacccttggtggcttgtcccacatcaagctgggaggtgacactgaggatgcattagtctgcagcgtatgataaaaaccgcatttcaggccaggcgtggtggctcatgcctgtcaccccagcaccttgggaggccgaggtgggcagatcatatgaggtcaggactttgagaccagcctggccaacatggtgaaaactcatctgtactaaaaaaacaaaaattatgtgggttggtggtgtgcgcctgtaatcccagctacttgggaggctgaggcaggagaatcacttgaacctgggaggcggaggctacaacgagccgaaattgcaccactgcactccagcctgactccgtctc

SEQ ID NO: 17403 - protein, 49 aa, Homo sapiens [sequence omitted]

SEQ ID NO: 17404 - DNA, 1438 bp, Homo sapiens
ggcggtggcggacacttggggtctggacgcaacggcggcgggagcatgaacgcccctccagccttcgagtcgttcttgctcttcgagggcgagaagatcaccattaacaaggacaccaaggtacccaaggcctgcttattcaccatcaacaaagaagaccacacactgggaaacatcattaaatcacgtgcctgcttccccttcgccttctgccgtgattgtcagtttcctgaggcctccccagccacgcttcctgtacagcctgcagaactgtgagtcaattaaacctcttttcttcataaattacccagtttctcatagttctttatagcagtgtgaaaacagactaatggacccttctggttgaaggaatgcagccattctgcttgtttgactatgtcctttctattcatctctatttcctgggaggtgtttatccaagtgcaataggaggtattggtgaccgcacagtcccctcagtgttctgctagtaaatagttgaaggttgatcattgatcttctgcgttttcagtctggcatggaaaagcccctgtgcaactggtaaagatatcaataagcaccaggaggtatctaaatccaccaggagccataggcatcacgttgacgtccatttaccagtcttccctggcaagattcttctgaattgtgctgccttggccaaaagaggtatgggaggggctgggcgcagtggcttgtgcctgtaatcccaacattttgggaaaccaattcaggtggatcgttagaggtcaggggttcaagaccatcctggccgacatggtgacatcccatctctactaaaaatacaataagttagctgggtttggtgttgggtgcctgtaatcccagctactcgagaggctgaggcaggataatcgcttgaacctgggaggaggaggtggcagtgagctgagatcgtgccattgcactccagcgtgggcaacaagagtgaaacgtcgtctcaaaaaataaaaaaaaagtccgggcttgatggctcacacctgtaatcccagcactttgggaggccaagacgggtggatcacgaggtcaggagttcaagaccagcctggcctagatggtgaaacccccatctctactaaaaatacaaaaatgagccaggcatggtggtggattcctgtaatcgcagctactctggaggctgaggcaggagaatcacttaaacccaggaggcggtggttgtagtgagctaggatcatgccattgcagtccagcctggacagcaaagctagactccatctcaaaaaaaaaagaaaagaaaaagtaaaaaatttaaaaattagatgggcatggtgacatgtgcctgtaatcccaggtactaaggaagctgaggtaggaggatgacttgagcctaggagttcgaggctgcaaacgagccgaaattgcaccactgcactccagc

SEQ ID NO: 17405 - protein, 76 aa, Homo sapiens [sequence omitted]

SEQ ID NO: 17406 - DNA, 838 bp, Homo sapiens
gatcctgggtgaatggtatctcctgccactgtcccaacctcagaccattgtccaaaagcatcttcagggactccacatccctctattccctgtcccagcagaggctgtgtcctctccactcaaagcctgaagcatgttggggtctcttcgtctctgtacatgcccatttcagagtccagtctggtgggagagggaacagagtgggaaagaaaactagggtaagcagaaacgatgaaaccttataagagtgagagtatcatgtacaagagtgagattatcatgtacaagagtgagattatcacgtacaagagatcccaggaatactgacttgatgaaaaagtcacatcagagcactcagtttggcagagcttttctgccgaatgtttactcacattcactgtccgagattctatactgggggtacacacgtcctctgccctaaggcaattttgagtccaagagacattttgaggcctaaaaatcataggaaactgcccctgagctcacacatatttccaatggtgtccccagtttcagggaatccatggattacctaagccagcccctccagttcggctaagaaactctagtctatatatcaagttttgtatcatatgtattgctctgaactcagaaatttcccttccatttatggattctatgaataaaatatcacatgtacaaaaagactaagtcaaaaaatttcagctgtgcacagtggctcatgctttaatcccagcactttgggaggccaaagtgggtggatcacttgaggtcaggagtttgagaccagcctggacaacatggtgaaaccccatctctactaaaaatacaaaaa

SEQ ID NO: 17407 - protein, 69 aa, Homo sapiens
MVSPATVPTSDHCPKASSGTPHPSIPCPSRGCVLSTQSLKHVGVSSSLYMPISESSLVGEGTEWERKLG

SEQ ID NO: 17408 - DNA, 624 bp, Homo sapiens
cctgacaccagccgacctagacacaccccctccaaagatcccatcggagcccaccatcctgggagcatcacccaaaacccttcctctggcttctcggatttgcatccgaccttcgaatacccctccatcccgcaatttccaaatgagtagtcaccccaacactgaggtcccttctctgatgggcagcccctccccagaccctcattccccctctccacaatcttcctcttccaagatgtgacctctccctctctgtgttcctttctctccatcagtatctcctggctatggtcatagcgtatttcagccgggccggcttcccctcctggcaataccaacgcattcatttcttcctggctctgtgagtggtttgctgcctcctatccgtcaatatccaatgccctgggacagcgggggaagtgggattccagcctttcatttattctttcacctatttgtcctctttactctgtgtacaaaaaagagaggattatactatcatagactgttgtttctaaacagaaactcaggctgggcacagtggaatacgcctgtaatcccagcactttgggaggccgaggcaggcaagagaaccctttgaacccaggaggtggaggttgcagt

SEQ ID NO: 17409 - protein, 67 aa, Homo sapiens [sequence omitted]

SEQ ID NO: 17410 - DNA, 233 bp, Homo sapiens
gaattctgtcccaatctgagcccctgcattgtgccttcaaatcctcctggactgcaagtccgtaagaaacaggactcctggtttcttacttttctccaaggactcctagaaggaccccacccccctccccccacccctgctcctaggaggacaacgtgatcactgtattcagctccatcaagaatggtccaggttcttctagatgatctgcacaaatggttcctctcctcctg

SEQ ID NO: 17411 - protein, 52 aa, Homo sapiens
EFCPNLSPCIVPSNPPGLQVRKKQDSWFLTFLQGLLEGPHPPPPTPAPRRTT

SEQ ID NO: 17412 - DNA, 2955 bp, Homo sapiens
ggcggacacttggggtctggacgcaacggcggcgggagcatgaacgcccctccagccttcgagtcgttcttgctcttcgagggcgagaagtaagtgacgccggctgcggagggcctaggtgcgcgggcctgcggctgtcgcattctggggtgtctcctgcccatctcttgccccgggagggaaacagcttttgcttgatcgtctgctcggcctgtgtcagccaaatttaaggccgttccgcgaggcagtcgcgagtgtgtccatgttgcagatgaggacactgaggcttggaggcgagcaagttgccccggacacaggaagtggcggcgcttgtattcgaacccagagtgtctggttctccatagcccttttcctctgggatctggcagcttcctctttttgtctctcgcccgccacctccatccttcatcccctccgatctgtcagcggcctgcgtaaaagccgcagtggctcctcgctgcctgcgggttgaaggagtccaggggagagagcttgggctcactctgtatctgtgggcgagtggcttgatctgtcggaggccctgtttcctcatctggaaaatgagtttattactgtacttaaacgtgggattcaggccgggtgcggtggctgacacctgtaatcccagcactttgggagcccgaggcgggcggatcacctgaggtcgggagttcaagaccagcctgaccaacatggagaaaccctgtctctactaaaaatacaaaattagccgggcgtggtggcagatgcctgtaatcccagctactcagaaggctgaggcaggagaatcacttgaacctgggaagtggaggttgaggatcaccattaacaaggacaccaaggtacccaaggcctgcttattcaccatcaacaaagaagaccacacactgggaaacatcattaaatcacaactcctaaaagacccgcaagtgctatttgctggctacaaagtcccccaccccttggagcacaagatcatcatccgagtgcagaccacgccggactacagcccccaggaagcctttaccaacgccatcaccgacctcatcagtgagctgtccctgctggaggagcgcttccggacgtgcctgcttccccttcgccttctgccgtgattgtcagtttcctgaggcctccccagccacgcttcctgtacagcctgcagaactgtgagtcaattaaacctcttttcttcataaattacccagtttctcatagttctttatagcagtgtgaaaacagactaatggacccttctggttgaaggaatgcagccattctgcttgtttgactatgtcctttctattcatctctatttcctgggaggtgtttatccaagtgcaataggaggtattggtgaccgcacagtcccctcagtgttctgctagtaaatagttgaaggttgatcattgatcttctgcgttttcagtctggcatggaaaagcccctgtgcaactggtaaagatatcaataagcaccaggaggtatctaaatccaccaggagccataggcatcacgttgacgtccatttaccagtcttccctggcaagattcttctgaattgtgctgccttggccaaaagaggtatgggaggggctgggcgcagtggcttgtgcctgtaatcccaacattttgggaaaccaattcaggtggatcgttagaggtcaggggttcaagaccatcctggccgacatggtgacatcccatctctactaaaaatacaataagttagctgggtttggtgttgggtgcctgtaatcccagctactcgagaggctgaggcaggataatcgcttgaacctgggaggaggaggtggcagtgagctgagatcgtgccattgcactccagcgtgggcaacaagagtgaaacgtcgtctcaaaaaataaaaaaaaagtccgggcttgatggctcacacctgtaatcccagcactttgggaggccaagacgggtggatcacgaggtcaggagttcaagaccagcctggcctagatggtgaaaccctgtctctactaaaactacaaatattagctgggcatggtggcatgcacctgtaatctcagctactcagaagtctgatgcaggagaattgctaaaacccaggagggagaggttgcagtgagccgagattgcaccactgcactctagcctgggcgacagagcaagactccgtctcgaaagaaagaaagaaaggaaattccccagggaagtacctcggctgatttcataaacaggtaccgaaggaagcagaggcatgtggaggacttccccacctcatgcagctatttgggccgtggcgtctgaaatttattatttcagagtcacccctttgatgaccttggcagtgaactgcagtcatctgtttaggcctttccatggcccacgtcaatgccgttatttctgtttgttgcacatttgatttccttgttgttggcatttagaaggccccctgcttcccagatcacaccacgggcatggaccacagagattgcatcttgtgagtctgtagaaatggtcaaggccttgtcctctcttaggtccagagctcaggtgaatgcagattttcccggccatctgtgctgaagtccctgtggggaggctcctggctggtttcctgtaggtagacagctacacgtcctgcccttcattggcttcttttcatgaagctcctgccatctacaaaacatgtctcccttcttgaatcacatctctgttattgaaactctagaagtcaaccgggcatggtggctatgcctataatcccagcattttgggatgccaaggcgggtggatcacctgaggtcaggagttcaagaccagcctggccaacatggcgaaaccccgtctctaatacaaatacaaaaattagccaagcatggtggtcactgtactccagcctgggtgacagagcaagactccgtctcaaaaaaaaaaaa

SEQ ID NO: 17413 - protein, 122 aa, Homo sapiens
MPVIPATQKAEAGESLEPGKWRLRITINKDTKVPKACLFTINKEDHTLGNIIKSQLLKDPQVLFAGYKVPHPLEHKIIIRVQTTPDYSPQEAFTNAITDLISELSLLEERFRTCLLPLRLLP

SEQ ID NO: 17414 - DNA, 1040 bp, Homo sapiens
tcttattagggctctggtggcggcggtggcggacacttggggtctggacgcaacggcggcgggagcatgaacgcccctccagccttcgagtcgttcttgctcttcgagggcgagaagatcaccattaacaaggacaccaaggtacccaaggcctgcttattcaccatcaacaaagaagaccacacactgggaaacatcattaaatcacaactcctaaaagacccgcaagtgctatttgctggctacaaagtcccccaccccttggagcacaagatcatcatccgagtgcagaccacgccggactacagcccccaggaagcctttaccaacgccatcaccgacctcatcagtgagctgtccctgctggaggagcgcttccggacgtgcctgcttccccttcgccttctgccgtgattgtcagtttcctgaggcctccccagccacgcttcctgtacagcctgcagaactgtgagtcaattaaacctcttttcttcataaattacccagtttctcatagttctttatagcagtgtgaaaacagactaatggacccttctggttgaaggaatgcagccattctgcttgtttgactatgtcctttctattcatctctatttcctgggaggtgtttatccaagtgcaataggaggtattggtgaccgcacagtcccctcagtgttctgctagtaaatagttgaaggttgatcattgatcttctgcgttttcagtctggcatggaaaagcccctgtgcaactggtaaagatatcaataagcaccaggaggtatctaaatccaccaggagccataggcatcacgttgacgtccatttaccagtcttccctggcaagattcttctgaattgtgctgccttggccaaaagaggtatgggaggggctgggcgcagtggcttgtgcctgtaatcccaacattttgggaaaccaattcaggtggatcgttagaggtcaggggttcaagaccatcctggccgacatggtgacatcccatctctactaaaaatacaataagttagctgggtttg

SEQ ID NO: 17415 - protein, 115 aa, Homo sapiens; identical to SEQ ID NO: 2068

SEQ ID NO: 17416 - DNA, 773 bp, Homo sapiens
tggcggacacttggggtctggacgcaacggcggcgggagcatgaacgcccctccagccttcgagtcgttcttgctcttcgagggcgagaaacaactcctaaaagacccgcaagtgctatttgctggctacaaagtcccccaccccttggagcacaagatcatcatccgagtgcagaccacgccggactacagcccccaggaagcctttaccaacgccatcaccgacctcatcagtgagctgtccctgctggaggagcgcttccgggtgagggcggggcctggaggggcagacggggtgggctggacactggcccgtgtgcccaggcctgggacagccctggcctgtttcttcggaggtcctcagggagaggcggcggtgatggaagaacagggacttccaccacaggctccaggacatgtggactgaggggctgtggagtctgggcctgtggctcccgtctgccccatgggacttctgtagtgctgcagggtccctcgggtgctgtgggccagatccgggcggggacctactgtcctttgggggtgctcttctacgtcccttgtcggtgattggcaaggcctggtccttccaggcctctgggaggcagctcaccccagggtggcccacacctgttcctagcagggcgcctgggaatctagaacagtttagaggggaaagagccacagcaaagaaaagccgaggcagggtgatcacgaggtcaggagttcaagaccagcctggcaaacatggtgaagccctgtttctactaaaa

SEQ ID NO: 17417 - protein, 128 aa, Homo sapiens; identical to SEQ ID NO: 17319

SEQ ID NO: 17418 - DNA, 811 bp, Homo sapiens
ggcggcggtggcggacacttggggtctggacgcaacggcggcgggagcatgaacgcccctccagccttcgagtcgttcttgctcttcgagggcgagaagatcaccattaacaaggacaccaaggtacccaaggcctgcttattcaccatcaacaaagaagaccacacactgggaaacatcattaaatcacaactcctaaaagacccgcaagtgctatttgctggctacaaagtcccccaccccttggagcacaagatcatcatccgagtgcagaccacgccggactacagcccccaggaagcctttaccaacgccatcaccgacctcatcagtgagctgtccctgctggaggagcgcttccgggtgagggcggggcctggaggggcagacggggtgggctggacactggcccgtgtgcccaggcctgggacagccctggcctgtttcttcggaggtcctcagggagaggcggcggtgatggaagaacagggacttccaccacaggctccaggacatgtggactgaggggctgtggagtctgggcctgtggctcccgtctgccccatgggacttctgtagtgctgcagggtccctcgggtgctgtgggccagatccgggcggggacctactgtcctttgggggtgctcttctacgtcccttgtcggtgattggcaaggcctggtccttccaggcctctgggaggcagctcaccccagggtggcccacacctgttcctagcagggcgcctgggaatctagaacagtttagaggggaaagagccacagcaaagaaaagccgaggcagggtgatc

SEQ ID NO: 17419 - protein, 158 aa, Homo sapiens; identical to SEQ ID NO: 2070

SEQ ID NO: 17420 - DNA, 936 bp, Homo sapiens
aatgttaagaaatgatctttttatgaggcaattggaaatttgaacactgatcaactataggatgattggaattattaattttgtaaaggtgtgataagatactgcacttggctgggcacagtggcacatgcctgtaatcccagctacttggcaggctgaggtgggagaatcgcttgagctcaggagttcgagaccagcctgggcaacgtggcgaaatccccgtctttacaaaaacaaacaaacaaacaaaaaagatattgcagttgtgttgtaagcgtccttatctttcagagctacatagtggaatgtttatggaatatttaggataaatgatataggcatttgggatttgctgcaaaatgacccagaggcaggggtcagggggagaggtagagatgagacaagaggtagaggggagaggtagaggtagccacgagctgataattacagacaagagatgcggagtatgtgggggctcattatcctgcatagtctatctttgtatatctttgaacttttcaagaataaaaaagcttaaaaagtatacatggcctggtcctaccagagactcacccaatgccagcctccagccagggagagccaagtttgcattttcacacgcatctcacactcctctgcactctcaacttggagcgctccaaacagggaaaccccaagccttgctggcttctgccaaccccctgagcagaagcatgggtccccctgatcaccacctcaccaccctcatcctgatctcactggagactccctttcccggtctgctaagtagcgggtgtttttccttgacactaacgctaccgctagaccacggtgggcttggcaacaggtgtcttcccagatgctggcgttaccgctagaccaaggagccctctggtggccctgtccgggcataacagaaagcttgcactcttgtct

SEQ ID NO: 17421 - protein, 172 aa, Homo sapiens
MTQRQGSGGEVEMRQEVEGRGRGSHELIITDKRCGVCGGSLSCIVYLCISLNFSRIKKLKKYTWPGPTRDSPNASLQPGRAKFAFSHASHTPLHSQLGALQTGKPQALLASANPLSRSMGPPDHHLTTLILISLETPFPGLLSSGCFSLTLTLPLDHGGLGNRCLPRCWRYR

SEQ ID NO: 17422 - DNA, 556 bp, Homo sapiens
atggggtttcaccatgttagtcaagctgctcttgttttgttgttgttgttgttttgtgttgtaagcgtccttatctttcagagctacatagtggaatgtttatggaatatttaggataaatgatataggcatttgggatttgctgcaaaatgacccagaggcaggggtcagggggagaggtagagatgagacaagaggtagaggggagaggtagaggtagccacgagctgataattacagacaagagatgcggagtatgtgggggctcattatcctgcatagtctatctttgtatatctttgaacttttcaagaataaaaaagcttaaaaagtatacatggcctggtcctaccagagactcacccaatgccagcctccagccagggagagccaagtttgcattttcacacgcatctcacactcctctgcactctcaacttggagcgctccaaacagggaaaccccaagccttgctggcttctgccaaccccctgagcagaagcatgggtccccctgatcaccacctcaccaccctcatcctgatctcactgtacac

SEQ ID NO: 17423 - protein, 37 aa, Homo sapiens [sequence omitted]

SEQ ID NO: 17424 - DNA, 950 bp, Homo sapiens
aagcttttttattcttgaaaagttcaaagatatacaaagatagactatgcaggataatgagcccccacatactccgcatctcttgtctgtaattatcagctcgtggctacctctacctctcccctctacctcttgtctcatctctacctctccccctgacccctgcctctgggtcattttgcagcaaatcccaaatgcctatatcatttatcctaaatattccataaacattccactatgtagctctgaaagataaggacgcttacaacacaactgcaatatcttttttgtttgtttgtttgtttttgtaaagacggggatttcgccacgttgcccaggctggtctcgaactcctgagctcaagcgattctcccacctcagcctgccaagtagctgggattacaggcatgtgccactgtgcccagccaagtgcagtatcttatcacacctttacaaaattaataattccaatcatcctatagttgatcagtgttcaaatttccaattgcctcataaaaagatcatttcttaacattttgttttgttgcaattggttgctgtaagtcacctaaatatcttctcttttttatactttttattgtagtaaaataggtataacatacaatttgccattttaaccattttaagtgtttaactcagtggtgttaattacattcacaatgtgtagccatcaccactatttagttcaaaaatttcaagtctcctttattttcctttttttttttttttttttttttaattttagggactaggttttgctatgttgcccaggctggccttaaactcctggcctcaaggtgatccttctgtcttggcctcccgagtagctgggactagagaattgcttgaacctgggaggcagaggttgcagtgaaccaagatcaagccatttgcactccagcctgggcaacacagtgagactctgtctc

SEQ ID NO: 17425 - protein, 37 aa, Homo sapiens
MLPRLALNSWPQGDPSVLASRVAGTRELLEPGRQRLQ

SEQ ID NO: 17426 - DNA, 3232 bp, Homo sapiens
atggagattgattttggccaggaatctggggtattgtcagaacaactctatttgaacaagctgtgcttagtgtttgccctgcatgtgtacctggccccctcctgggcggatacggcaggcaaacggtgcaagggcggctgccgggagaaggtgggcagctggagtgggactgggggagacaggatcaatgtgacctgcggtggtccccaggtggccgggatgcagtacctgcacggcgtcctgggccccatcatcaacaaggtgtttgaggagaagaagtacgtggagctggaccccagcaaagtggaagttaaggatgtagggtgctccaggctgcaccgcccgcagaccgaggccgaggtgctggagcagagcgcgcagacgctgcgcgcccacctgggggccctgctgagcgcgctcagccgctcggttcgcgcgtgccccgccgtggtgcgcgccaccttccgccagctcttccggcgcgtgcgcgagcgcttccccggcgcccagcacgagaatgtaccgttcatcgccgtcaccagcttcctgtgcctgcgcttcttctcccccgccatcatgtcgcccaagctcttccacctgcgggagcgccacgcggacgcccgcaccagccgcaccctgctcctgttggctaaggcagtccagaacgtgggcaacatggacacgccggcttccagggccaaggaggcttggatggagccgctgcagcccaccgtgcgccagggcgtggcgcagctgaaggacttcatcaccaagctcgtggacatcgaggagaaggacgagctggacctgcagcggacgctgagtttgcaggcgccacctgtgaaggaggggccactcttcatccacaggaccaagggcaagggccccctcatgtcctcctccttcaagaagctctacttctccctcactaccgaggccctcagcttcgcgaagacgcccagctccaagtgtgtgaatgagcttaaccagtggctgtctgcgctgtggaaggtgagcatcaacaacaccggactgctgggctcctaccaccctggcgtcttccgtggggacaagtggagctgctgccaccaaaaagagaagacaggtcagggctgcgataagacccggtcacgggtgaccctgcaggagtggaatgaccctcttgaccatgaccttgaggcccagctcatctaccggcacctgctgggcgtggaggccatgctgtgggagaggcaccgggagctgagcgggggcgcagaggcaggcacggtgcccacgagccctggcaaagtccctgaggactcattggcccggctgctccgggtgctgcaggacctccgcgaggcccatagctccagcccggccggctccccaccctcagagcccaactgcctcctggagctgcagacgtgaggcccgccctacgctccccttgctgagtcccctgccaagcgctcggagcccccccaggacactctgcaccccctcaccccggtcctcctcattagggtgcagggcctaggtctcttccaggtgggggaggggagagagtcaggaataaggggatccccagaagtgcagagctgagcaggcttgggcctgtcatggctggccggaagtgtccccagctccctacagacgctgtagccatcactgcctctccagggaccctcctctcctgcccaggacagacccagccagaaccactgctaggatgggccgcacccaggggtctggcctccagggacctagagaatgggagggagaacggggccccaggagacccggccgccaccccacccgctacccttgggtgccacagggctgtgctgttgccaacagtaaacctgctcttactgtccaggctctggggtcttgtgatgagggtctggggagaaagtgggcccggggggaccccggaggctgtcggtggatgtgccgatgatggggctgacagtatgggctctgggcatccctgttcccccctctttcttccccccactcttctggggtcgggggttcctttcccttcccagttgctgtccctgggtcccctctttcatgtcccacaggccacagagcccagtgtgtccaaccagctgttctctcctcaaagcagcccccaagcaagtcccttctctagggtgtccctgaggacagcacagaggcgggactcagagaccccattcctcttcacgcagcccttaccccaagccctctagctgtgtggctggcagtgttggccacgtaggggctcccatccccccaccattgtgtcacatgggctgccaggctcagctcccagctgcgtccacagtgacctggatcagggtggggacaaggactggaccctccttctccagaaggccttcagctcttgccttgccatgcagtcacctccttccccctctgaccccagatcccaaaggtgcaccgttgccccagcccctttctggccccatggggtttctctgatgccttcatcatagaggcccggggctggtccgatggttggcaaaacttgactccggcccagtccccactcttggggacttagaacccctgctgtcctgggatctggcctgcctttctttggtcagtccctgtggtcccccaccagctccccctcccatagggctgcccaccaagccctgcccccagcccaagaggagcccccactgcctgcggggcagtgatgtctggccaccggctcacaccaatgacttggtcctggggtggcagaagcagcaggtgacaggagcagggcccctgtccctctcttctggccctgtggtacccaggccacacgttgtgcccgctcttggggctgaccggctgtagggaccaccagccgctgctactgtgggccgccccggggcaaggtgggcagggcttttgtgggttatgaggacacagaagtccctgaggcccccagacctggctcagccaacctccttcctcccccggttgccccccactctaaagcctcctccctcccagcgtccactggctccaggctcctcacaacagcagctcatagacacggggcgtctccaggtggtcccagccctccagatgtttctagctctccaggtgggcgctgttttcacgtctgcctgcatccattcattccttcattcctcacctttatcctgttatctctatttttttaagctaccaggaaggaaagggaagaagagatcacgaaactgggacccccagaagggaggag

SEQ ID NO: 17427 - protein, 470 aa, Homo sapiens
MEIDFGQESGVLSEQLYLNKLCLVFALHVYLAPSWADTAGKRCKGGCREKVGSWSGTGGDRINVTCGGPQVAGMQYLHGVLGPIINKVFEEKKYVELDPSKVEVKDVGCSRLHRPQTEAEVLEQSAQTLRAHLGALLSALSRSVRACPAVVRATFRQLFRRVRERFPGAQHENVPFIAVTSFLCLRFFSPAIMSPKLFHLRERHADARTSRTLLLLAKAVQNVGNMDTPASRAKEAWMEPLQPTVRQGVAQLKDFITKLVDIEEKDELDLQRTLSLQAPPVKEGPLFIHRTKGKGPLMSSSFKKLYFSLTTEALSFAKTPSSKCVNELNQWLSALWKVSINNTGLLGSYHPGVFRGDKWSCCHQKEKTGQGCDKTRSRVTLQEWNDPLDHDLEAQLIYRHLLGVEAMLWERHRELSGGAEAGTVPTSPGKVPEDSLARLLRVLQDLREAHSSSPAGSPPSEPNCLLELQT

SEQ ID NO: 17428 - DNA, 1866 bp, Homo sapiens
atggagattgattttggccaggaatctggggtattgtcagaacaactctatttgaacaagctgtgcttagtgtttgccctgcatgtgtacctggccccctcctgggcggatacggcaggcaaacggtgcaagggcggctgccgggagaaggtgggcagctggagtgggactgggggagacaggatcaatgtgacctgcggtggtccccaggtggccgggatgcagtacctgcacggcgtcctgggccccatcatcaacaaggtgtttgaggagaagaagtacgtggagctggaccccagcaaagtggaagttaaggatgtagggtgctccaggctgcaccgcccgcagaccgaggccgaggtgctggagcagagcgcgcagacgctgcgcgcccacctgggggccctgctgagcgcgctcagccgctcggttcgcgcgtgccccgccgtggtgcgcgccaccttccgccagctcttccggcgcgtgcgcgagcgcttccccggcgcccagcacgagaatgtaccgttcatcgccgtcaccagcttcctgtgcctgcgcttcttctcccccgccatcatgtcgcccaagctcttccacctgcgggagcgccacgcggacgcccgcaccagccgcaccctgctcctgttggctaaggcagtccagaacgtgggcaacatggacacgccggcttccagggccaaggaggcttggatggagccgctgcagcccaccgtgcgccagggcgtggcgcagctgaaggacttcatcaccaagctcgtggacatcgaggagaaggacgagctggacctgcagcggacgctgagtttgcaggcgccacctgtgaaggaggggccactcttcatccacaggaccaagggcaagggccccctcatgtcctcctccttcaagaagctctacttctccctcactaccgaggccctcagcttcgcgaagacgcccagctccaagtgtgtgaatgagcttaaccagtggctgtctgcgctgtggaaggtgagcatcaacaacaccggactgctgggctcctaccaccctggcgtcttccgtggggacaagtggagctgctgccaccaaaaagagaagacaggtcagggctgcgataagacccggtcacgggtgaccctgcaggagtggaatgaccctcttgaccatgaccttgaggcccagctcatctaccggcacctgctgggcgtggaggccatgctgtgggagaggcaccgggagctgagcgggggcgcagaggcaggcacggtgcccacgagccctggcaaagtccctgaggactcattggcccggctgctccgggtgctgcaggacctccgcgaggcccatagctccagcccggccggctccccaccctcagagcccaactgcctcctggagctgcagacgtgaggcccgccctacgctccccttgctgagtcccctgccaagcgctcggagcccccccaggacactctgcaccccctcaccccggtcctcctcattagggtgcagggcctaggtctcttccaggtgggggaggggagagagtcaggaataaggggatccccagaagtgcagagctgagcaggcttgggcctgtcatggctggccggaagtgtccccagctccctacagacgctgtagccatcactgcctctccagggaccctcctctcctgcccaggacagacccagccagaaccactgctaggatgggccgcacccaggggtctggcctccagggacctagagaatgggagggagaacggggccccaggagacccggccgccaccccacccgctacccttgggtgccacagggctgtgctgttgccaacagtaaacctgctcttactgtccaggc

SEQ ID NO: 17429 - protein, 470 aa, Homo sapiens; identical to SEQ ID NO: 17427

SEQ ID NO: 17430 - DNA, 709 bp, Homo sapiens
tccttcagctgcgccacgccctggcgcacggtgggctgcagcggctccatccaagcctccttggccctggaagccggcgtgtccatgttgcccacgttctggactgcctggaggtgacagcaggaaggaccaggttctgctaggtttaactgacgctgctgcactggataccccaccccggtgccgggcacataggtgcagcctgagagtaagcagacccgggttggaaggtcccgcgattcaccaccgacaggatgggcggccttggcaacccccgacccctcgcaggcctgttcccttatccatgagatggagctcggacaaggtggccacaggaaggctttgcaaactgtgaagtgcagtgcctacgtgggcgtgccagtggcctcgccggagccggtagggaacactctgcagtccaggccagggccccggtaggacacccagctgtgcatcccgcccgtggccgcaaggcccgcaccttagccaacaggagcagggtgcggctggtgcgggcgtccgcgtggcgctcccgcaggtggaagagcttgggcgacatgatggcgggggagaagaagcgcaggcacaggaagctggtgacggcgatgaacggtacattctggaggggtgcggaagagcgcgggctggagtcccccagaccagggctcctggcagccccctccccttaggctctgtccctgaccctcgc

SEQ ID NO: 17431 - protein, 43 aa, Homo sapiens; identical to SEQ ID NO: 17359

SEQ ID NO: 17432 - DNA, 515 bp, Homo sapiens
ttggagagggtggagctttggagtgagacccaggacgccaaatcccaaagagaaaaataggagcctaaataaggatcaggaccaagggaagggagtgaggctcagtgtcatcaaggaacagccaatccaatgagattgacatgagaaatgatacatattcagcagaagatcagaccctaaaagcatgacaattgcagttatcttctctggcaagagaagagtgtgaagatactcctaaatagccacatatggattaattttattttagaatcgtgaaaaatggaagacagtagcacagacacagaaaaagaagaggaagaggagaaagatgaaaaggatcaagagcccatttatgccatagtgcccacaattaacattcaagatgagcggtttgttgatttatctgaaactccagctttcatttttctgcatgaggtatatttttctttatatgttactacagtaaaacccaactcaacatgtacttaaaaattcaaatgaagccaatatcatta

SEQ ID NO: 17433 - protein, 69 aa, Homo sapiens
MEDSSTDTEKEEEEEKDEKDQEPIYAIVPTINIQDERFVDLSETPAFIFLHEVYFSLYVTTVKPNSTCT

SEQ ID NO: 17434 - DNA, 796 bp, Homo sapiens
ggacttaggcaaggggtccaggtcagagtttagagctttcaaatcccaacttgcccctggggattgcgcggctgatgtttagaacgcctagtcaagccaaccggctcgctcttgtttcagcaaaccctgacttacgtctcctatttgacttgaggcggcacagtggccaagtcgattggccgtggcaagtgaccctccctgtggctgaagtgttctgaggactggcgagagaggcgcgccatgcttgccccctgctcaggttgggagcttggctgcttccgtctctgtctccgtcaggtccgactgtgggctggcgctgggcgctgggcttgctgggcttgccaagccaggccgtacagctcaggtgggagcgagcgctggcccggatcggagactgaggtccctccgcctggcccggggcgccgaactctgaaggagtggacactgcaggtttagatatcaagtcatcagggtctggctgtgtaaaagttcaaagtattgagggtgataattgcaaaattgaaacagagcatgggactagtatcttgcagtctgttaagggtcaaaaattgcatgttcaaacaaaaggaggcaaagtgatctgtctgggaacagtttatggaaatatagatattcatgcatcagataaaagtgctgtgaccatagataaactgcagggaagttctgttactgtatctaccgaagatggtttgctgaaagccaagtatctttatacagaatcatcatttctgtcttctgctgctggggatattacattaggaagtgttcatggtaa

SEQ ID NO: 17435 - protein, 71 aa, Homo sapiens
MLAPCSGWELGCFRLCLRQVRLWAGAGRWACWACQARPYSSGGSERWPGSETEVPPPGPGRRTLKEWTLQV

SEQ ID NO: 17436 - DNA, 2004 bp, Homo sapiens
ggacttaggcaaggggtccaggtcagagtttagagctttcaaatcccaacttgcccctggggattgcgcggctgatgtttagaacgcctagtcaagccaaccggctcgctcttgtttcagcaaaccctgacttacgtctcctatttgacttgaggcggcacagtggccaagtcgattggccgtggcaagtgaccctccctgtggctgaagtgttctgaggactggcgagagaggcgcgccatgcttgccccctgctcaggttgggagcttggctgcttccgtctctgtctccgtcaggtccgactgtgggctggcgctgggcgctgggcttgctgggcttgccaagccaggccgtacagctcaggtgggagcgagcgctggcccggatcggagactgaggtccctccgcctggcccggggcgccgaactctgaaggagtggacactgcaggtttagatatcaagtcatcagggtctggctgtgtaaaagttcaaagtattgagggtgataattgcaaaattgaaacagagcatgggactagtatcttgcagtctgttaagggtcaaaaattgcatgttcaaacaaaaggaggcaaagtgatctgtctgggaacagtttatggaaatatagatattcatgcatcagataaaagtgctgtgaccatagataaactgcagggaagttctgttactgtatctaccgaagatggtttgctgaaagccaagtatctttatacagaatcatcatttctgtcttctgctgctggggatattacattaggaagtgttcatggtaatataacattacaaagcaagatgggtaacatcacagtagattcgtcttctggatgtctaaaagcctcaactaatcagggtgccatagatgtttatgtcagccaactggggaaagtggaattgaaatcccataaaggttctattattgtcaaggtcccatcttcacttcaagctcatttacagttatcagggaaagaggttgatgtgaactcagaagtccatgttcaggaaatggctgaagttcgtaaagatgatgttgtaacagtgactggactcatgaatcaagcaagcaaacgtgaaaaatggattaaggctgatgccccaaaaggcactgtaagttttagaaggcaaagttggtttcagtccctgaaactgcaggactaaaactgatttgagttggatttatgatttttaacaatgattcgcagatctgtgactacaaaaatgtaaatcccaccattcatataaaggttgaaaacaacaaattgagaatgaatactggtgaactgttttgggaggctttttcaaaatttgtgctttgctattgtattcattttctactgctctgtaacaaattaccacaaatttagcagcataaaataatactcatttacagctatgtctaggttctccgctcagggaatcacaaggctagaaatcaagattttggccaggctgagttctcatctggagtctctgggaagaaatctacttccaacttcattcagattattgggaaaatccagttccttgtgactggatgactgaggtctccattttcttgctggctgtcagccagcaatcactctaagcttctagaggccacccacatgccttctcatgttgcccctccatcttcaagccagcagtgatgcgctgagttcttctcatgctttgaatatctgacttcttctgcagccagctggaagaatatatacttttaaagggctcacttgattaggtcaggcccacccaggataacctttgttttgccatataatgtaacattcataggagtgatggcccatcacattcagttttcactcccactcaaggaaaggagattatacaaaggcatccatcatgtggggacaattagcttagaattctttataatgtagctctcacatgacaggttttctacttagtaccttttatggcatcaatgtaaatttaagctgtaaataaaaaacaaatatgtgaagcagtt

SEQ ID NO: 17437 - protein, 120 aa, Homo sapiens
MGNITVDSSSGCLKASTNQGAIDVYVSQLGKVELKSHKGSIIVKVPSSLQAHLQLSGKEVDVNSEVHVQEMAEVRKDDVVTVTGLMNQASKREKWIKADAPKGTVSFRRQSWFQSLKLQD

SEQ ID NO: 17438 - DNA, 1166 bp, Homo sapiens
cttaggcaaggggtccaggtcagagtttagagctttcaaatcccaacttgcccctggggattgcgcggctgatgtttagaacgcctagtcaagccaaccggctcgctcttgtttcagcaaaccctgacttacgtctcctatttgacttgaggcggcacagtggccaagtcgattggccgtggcaagtgaccctccctgtggctgaagtgttctgaggactggcgagagaggcgcgccatgcttgccccctgctcaggttgggagcttggctgcttccgtctctgtctccgtcaggtccgactgtgggctggcgctgggcgctgggcttgctgggcttgccaagccaggccgtacagctcaggtgggagcgagcgctggcccggatcggagactgaggtccctccgcctggcccggggcgccgaactctgaaggagtggacactgcaggtgagcccgtttggtcggctgcgggcgcggctcccgtgccacctggccgtgaggcccctggaccccctcacctacccggatggcgaccgcgtgctggtcgcggtgtgcggcgtggagggcggcgtgcggggcctggacggcctgcaggtgaagtacgacgaggatctggaggagatggccattgtgtctgatactatccacccccaggcgtccgtggaggtttagatatcaagtcatcagggtctggctgtgtaaaagttcaaagtattgagggtgataattgcaaaattgaaacagagcatgggactagtatcttgcagtctgttaagacctcttagaaaatctaattgtctccttaagaagaaaaaaatgcatgtctatgaaattttacttataattttgtaagttcatgtgagcttggttaagagttcttgacttaaaacaacaagtgtgcgcctcccgtcgcccaagatgccgaaaggaaaggaggccaaggggaagaagttggctctggcccctgcttttgtgaagaagcaggaggccaagaaagtggtgaatcccctgtttgagaaaaggcctaagaattttggcattggacaggacatccagcccaaaagagacctcacctgctttgtgaaatggccccgctatatcaggttgcaatggcagagatccatactctataagcagctgaaagtgcctcctgcgattaaccagtt

SEQ ID NO: 17439 - protein, 144 aa, Homo sapiens
MLAPCSGWELGCFRLCLRQVRLWAGAGRWACWACQARPYSSGGSERWPGSETEVPPPGPGRRTLKEWTLQVSPFGRLRARLPCHLAVRPLDPLTYPDGDRVLVAVCGVEGGVRGLDGLQVKYDEDLEEMAIVSDTIHPQASVEV

SEQ ID NO: 17440 - DNA, 956 bp, Homo sapiens
cttaggcaaggggtccaggtcagagtttagagctttcaaatcccaacttgcccctggggattgcgcggctgatgtttagaacgcctagtcaagccaaccggctcgctcttgtttcagcaaaccctgacttacgtctcctatttgacttgaggcggcacagtggccaagtcgattggccgtggcaagtgaccctccctgtggctgaagtgttctgaggactggcgagagaggcgcgccatgcttgccccctgctcaggttgggagcttggctgcttccgtctctgtctccgtcaggtccgactgtgggctggcgctgggcgctgggcttgctgggcttgccaagccaggccgtacagctcaggtgggagcgagcgctggcccggatcggagactgaggtccctccgcctggcccggggcgccgaactctgaaggagtggacactgcaggtgagcccgtttggtcggctgcgggcgcggctcccgtgccacctggccgtgaggcccctggaccccctcacctacccggatggcgaccgcgtgctggtcgcggtgtgcggcgtggagggcggcgtgcggggcctggacggcctgcaggtgaagtacgacgaggatctggaggagatggccattgtgtctgatactatccacccccaggcgtccgtggaggtttagatatcaagtcatcagggtctggctgtgtaaaagttcaaagtattgagggtgataattgcaaaattgaaacagagcatgggactagtatcttgcagtctgttaagggtcaaaaattgcatgttcaaacaaaaggaggcaaagtgatctgtctgggaacagtttatggaaatatagatattcatgcatcagataaaaatggtttgctgaaagccaagtatctttatacagaatcatcatttctgtcttctgctgctggggatattacattaggaagtgttcatggt

SEQ ID NO: 17441 - protein, 144 aa, Homo sapiens; identical to SEQ ID NO: 17439

SEQ ID NO: 17442 - DNA, 1119 bp, Homo sapiens
cttaggcaaggggtccaggtcagagtttagagctttcaaatcccaacttgcccctggggattgcgcggctgatgtttagaacgcctagtcaagccaaccggctcgctcttgtttcagcaaaccctgacttacgtctcctatttgacttgaggcggcacagtggccaagtcgattggccgtggcaagtgaccctccctgtggctgaagtgttctgaggactggcgagagaggcgcgccatgcttgccccctgctcaggttgggagcttggctgcttccgtctctgtctccgtcaggtccgactgtgggctggcgctgggcgctgggcttgctgggcttgccaagccaggccgtacagctcaggtgggagcgagcgctggcccggatcggagactgaggtccctccgcctggcccggggcgccgaactctgaaggagtggacactgcaggtgagcccgtttggtcggctgcgggcgcggctcccgtgccacctggccgtgaggcccctggaccccctcacctacccggatggcgaccgcgtgctggtcgcggtgtgcggcgtggagggcggcgtgcggggcctggacggcctgcaggtgaagtacgacgaggatctggaggagatggccattgtgtctgatactatccacccccaggcgtccgtggaggtttagatatcaagtcatcagggtctggctgtgtaaaagttcaaagtattgagggtgataattgcaaaattgaaacagagcatgggactagtatcttgcagtctgttaagggtcaaaaattgcatgttcaaacaaaaggaggcaaagtgatctgtctgggaacagtttatggaaatatagatattcatgcatcagataaaagtgctgtgaccatagataaactgcagggaagttctgttactgtatctaccgaagatggtttgctgaaagccaagtatctttatacagaatcatcatttctgtcttctgctgctggggatattacattaggaagtgttcatggtaagctgacatagattcgtcttctggatgtctaaaagcctcaactaatcagggtgccatagatgtttatgtcagccaactggggaaagtggaattgaaatcccataaagg

SEQ ID NO: 17443 - protein, 144 aa, Homo sapiens; identical to SEQ ID NO: 17439

SEQ ID NO: 17444 - DNA, 2220 bp, Homo sapiens
cttaggcaaggggtccaggtcagagtttagagctttcaaatcccaacttgcccctggggattgcgcggctgatgtttagaacgcctagtcaagccaaccggctcgctcttgtttcagcaaaccctgacttacgtctcctatttgacttgaggcggcacagtggccaagtcgattggccgtggcaagtgaccctccctgtggctgaagtgttctgaggactggcgagagaggcgcgccatgcttgccccctgctcaggttgggagcttggctgcttccgtctctgtctccgtcaggtccgactgtgggctggcgctgggcgctgggcttgctgggcttgccaagccaggccgtacagctcaggtgggagcgagcgctggcccggatcggagactgaggtccctccgcctggcccggggcgccgaactctgaaggagtggacactgcaggtgagcccgtttggtcggctgcgggcgcggctcccgtgccacctggccgtgaggcccctggaccccctcacctacccggatggcgaccgcgtgctggtcgcggtgtgcggcgtggagggcggcgtgcggggcctggacggcctgcaggtgaagtacgacgaggatctggaggagatggccattgtgtctgatactatccacccccaggcgtccgtggaggtttagatatcaagtcatcagggtctggctgtgtaaaagttcaaagtattgagggtgataattgcaaaattgaaacagagcatgggactagtatcttgcagtctgttaagggtcaaaaattgcatgttcaaacaaaaggaggcaaagtgatctgtctgggaacagtttatggaaatatagatattcatgcatcagataaaagtgctgtgaccatagataaactgcagggaagttctgttactgtatctaccgaagatggtttgctgaaagccaagtatctttatacagaatcatcatttctgtcttctgctgctggggatattacattaggaagtgttcatggtaatataacattacaaagcaagatgggtaacatcacagtagattcgtcttctggatgtctaaaagcctcaactaatcagggtgccatagatgtttatgtcagccaactggggaaagtggaattgaaatcccataaaggttctattattgtcaaggtcccatcttcacttcaagctcatttacagttatcagggaaagaggttgatgtgaactcagaagtccatgttcaggaaatggctgaagttcgtaaagatgatgttgtaacagtgactggactcatgaatcaagcaagcaaacgtgaaaaatggattaaggctgatgccccaaaaggcactgtaagttttagaaggcaaagttggtttcagtccctgaaactgcaggactaaaactgatttgagttggatttatgatttttaacaatgattcgcagatctgtgactacaaaaatgtaaatcccaccattcatataaaggttgaaaacaacaaattgagaatgaatactggtgaactgttttgggaggctttttcaaaatttgtgctttgctattgtattcattttctactgctctgtaacaaattaccacaaatttagcagcataaaataatactcatttacagctatgtctaggttctccgctcagggaatcacaaggctagaaatcaagattttggccaggctgagttctcatctggagtctctgggaagaaatctacttccaacttcattcagattattgggaaaatccagttccttgtgactggatgactgaggtctccattttcttgctggctgtcagccagcaatcactctaagcttctagaggccacccacatgccttctcatgttgcccctccatcttcaagccagcagtgatgcgctgagttcttctcatgctttgaatatctgacttcttctgcagccagctggaagaatatatacttttaaagggctcacttgattaggtcaggcccacccaggataacctttgttttgccatataatgtaacattcataggagtgatggcccatcacattcagttttcactcccactcaaggaaaggagattatacaaaggcatccatcatgtggggacaattagcttagaattctttataatgtagctctcacatgacaggttttctacttagtaccttttatggcatcaatgtaaatttaagctgtaaataaaaaacaaatatgtgaagcagtt

SEQ ID NO: 17445 - protein, 144 aa, Homo sapiens; identical to SEQ ID NO: 17439

SEQ ID NO: 17446 - DNA, 685 bp, Homo sapiens
aaaggcaaaggctaaagaacttgccactaaactgggttaaatgtacactgttgtgttttctgtacataaaaataattaaaataattaaaaaataaaaaaaagtgctttgtggatagtcttttcaaaggtttatcacatatttgataaggagtatattaaatataatttgacttcagactcatgtctctgggcataacgtagttaaccatgctatagtacagattttttttctctaagagacagggtcttgatgtgttgcccacgccggagtgcagtagcacgatcctagctcactgaatcctcaaacatctgggctcaagtgatccatatctctttatgtaacaaaactaaagacgtatataatgattaagggaaaataaactactctaaaaaaaaatcagactaggccgggtgcagtggctcatgcctgtaatcccagcactttggaaggctgaggcgggtggatcacgaggtcaagagatcgagactatcctggccaacacggtgaaaccccatctctactaaaaatacaaaaaattagcctggcgtgatggcatacgcttgtagtcccagctacgtgggaggctgaggcaggagaatcgcttgaacccaggaggtggagcttgcagtgagccgagatctcaccactgcacttcagcctgggcgacagagcgagactctgtct

SEQ ID NO: 17447 - protein, 33 aa, Homo sapiens
MPVIPALWKAEAGGSRGQEIETILANTVKPHLY

SEQ ID NO: 17448 - DNA, 436 bp, Homo sapiens
tgttttctaattctcgaacttaaaaataaactgaatacatatattataatgcaaaatttaaaactaacttcgtgtgactggagtaaatcggaattttgtttggtatgtacattttaaacttgctctttcagaacaacaaattctcagtcccacaaatgtgaatcgtttttgtacatttttcattatatctggctacactggtggctgatactatttttttaaggtttgtcattggttggtttttttgttgtttgagacagagtcttactcactgcactccagcctgagtgacacagcgagactccgtctcaaaaaacaaacaaaaaagaacgttgacaaaattaaaatattttgttatggaattgtatgtggtgttaaaggtattgtttgtgaaatgtatgtgttaaaaataataaaatttcagagtaattacttt

SEQ ID NO: 17449 - protein, 41 aa, Homo sapiens [sequence omitted]

SEQ ID NO: 17450 - DNA, 2339 bp, Homo sapiens
gcagcttctccgtcaggccttgggccatggcctcgctacgcaatgccaacccgaggctgaagaactacttcaaggagaactacattcctcaggtctgcgaggcactgttatgtggtatacttgttacatgtcctgaggatccgctgaggtatttagagggaatgatcatggttataatcaaaagtggtcttcagaatcttctttggtaaagaaagtttttatggttcaccgaggataatcaactgcttcacagtctagaacctaaagactggatcttttgagaacatcagagaaagactgtgcttgccatccacactgcaacaaaactttggaaccttgaactttaagttcataatctcacaactgagaagggtccctccacactattggaactgtacacccattggaacccttaagatgactccggaattgatgataaaagcctgtagcttttatactggacatttagtaaagactcatttttgatattctattgcggatacaacagatcatctattgtcacaagctaaccattatcctaacaaaatggcggaatacagcaagacataagagtaaaaagaaagaagatgagctgatattaaaacatgaacttcaattgaaaaaatggaaaaataggttaatactcaaaagagctgctgcagaagaatccaattttcctgaacgaagttcttctgaagtctttcttgtagatgagactctaaaatgtgacatttcactgttacctgaaagagcaatattacagattttcttctacctcagtttaaaagatgtgataatatgtggtcaagttaatcatgcctggatgttgatgacacaactaaactcactgtggaatgctattgatttttcctcagtgaaaaatgtgattccagataaatatatagtgtctactttgcaaaggtggcgtttaaatgtgctgcgtttgaattttcgtggttgtcttctccgacccaaaactttcagatccctttcacctttgaagcaactgactgtgttgaatttggcaaattgtgtaagaattggtgatatgggactaaagcaatttcttgatggtcctgcaagcatgaggataagagagctaaatttaagcaactgtgtgcggctaagtgatgcctctgttatgaaactatctgagcgctgccctaatttaaactacttgagtttacgaaattgtgaacatttgactgcccaaggaattggatatattgtaaacatcttttccttggtatcaatagatctctctggaacagacatctctaatgagggtttgaatgtgctttccagacataaaaaattgaaggaactttctgtatctgaatgttatagaatcactgatgatggaattcaggcattctgcaaaagctcactgatcttggaacatttggatgtctcttattgctcccagctgtcagatatgattatcaaagcactggccatttactgcattaacctcacatctctcagcattgctggctgtccaaagattactgactcagcaatggagatgttatcggcaaaatgccattacctgcacattttggatatctctggttgtgtcttgcttactgaccaaatccttgaggaccttcagataggctgcaaacaactccggatccttaagatgcaatactgcacaaatatttccaagaaggcagctcaaagaatgtcatctaaagttcagcagcaggaatacaacactaatgaccctccacgttggtttggctatgatagggaaggaaaccctgttacagagcttgacaacataacatcatctaaaggagccttagaattaacagtgaaaaagtcaacatacagcagtgaagaccaagcagcgtgaccttcagcctcaagcaggaagaacaaaaaatcaagaacttggcaagttttctccatttgttgcaagtatgtttactagctgaatctcaataacaatgtaaacaagcaacaaaccatcttctgattcttattccaactacaaatatttccaaacacatcagtagttcttctgtctaaataatcatgatttaaaaaagaagccaggccaggagcggtggctcacacctgtaatcctagcactttggtaggccaaggcgggtggaccataagtcaggagttcaagaccagcctggccaacatggtgaaaccccatctttactaaaaatacaaaaattagccgggtgtggtggtgggcgcctgtaatcccagctactcaggaggctgaggcaggggacttgcttgaacctgagaggcggaggttgcagtgagcctagatcacgtcactgcattccagcctcggcgacagagcaagactccgtctc

SEQ ID NO: 17451 - protein, 344 aa, Homo sapiens
MLMTQLNSLWNAIDFSSVKNVIPDKYIVSTLQRWRLNVLRLNFRGCLLRPKTFRSLSPLKQLTVLNLANCVRIGDMGLKQFLDGPASMRIRELNLSNCVRLSDASVMKLSERCPNLNYLSLRNCEHLTAQGIGYIVNIFSLVSIDLSGTDISNEGLNVLSRHKKLKELSVSECYRITDDGIQAFCKSSLILEHLDVSYCSQLSDMIIKALAIYCINLTSLSIAGCPKITDSAMEMLSAKCHYLHILDISGCVLLTDQILEDLQIGCKQLRILKMQYCTNISKKAAQRMSSKVQQQEYNTNDPPRWFGYDREGNPVTELDNITSSKGALELTVKKSTYSSEDQAA

SEQ ID NO: 17452 - DNA, 3064 bp, Homo sapiens
agaatgcgagaaagtgaagtcaaattcggacttgtaggcgatcagggctgaagacgctgattagagagaaaacagagggtgatggtggctgcacgtggggaatgggtgacatctcccagggggaatgagcacaaggcccagatcggaaaccccaaactcagattttaaggtttggacaagaagtacctgaggagtggaggagtgagaaagaagtgccagagagcctgaggaggaaaatcagcagactggcattatgaagaatgttgtcagaagtagggagtaggcactagtcacctaagataaggagctggattctgcccaaggcactgttatgtggtatacttgttacatgtcctgaggatccgctgaggtatttagagggaatgatcatggttataatcaaaagtggtcttcagaatcttctttgatgactccggaattgatgataaaagcctgtagcttttatactggacatttagtaaagactcatttttgcacttggagagacatagctcgtacaaatgaaaatgtcgtcctggctgaaaaaatgaacagagcagtgacatgctacaatttcagacttcaaaaatctgtatttcatcactggcactcttatatggaagaccagaaagaaaaacttaaaaatattctattgcggatacaacagatcatctattgtcacaagctaaccattatcctaacaaaatggcggaatacagcaagacataagagtaaaaagaaagaagatgagctgatattaaaacatgaacttcaattgaaaaaatggaaaaataggttaatactcaaaagagctgctgcagaagaatccaattttcctgaacgaagttcttctgaagtctttcttgtagatgagactctaaaatgtgacatttcactgttacctgaaagagcaatattacagattttcttctacctcagtttaaaagatgtgataatatgtggtcaagttaatcatgcctggatgttgatgacacaactaaactcactgtggaatgctattgatttttcctcagtgaaaaatgtgattccagataaatatatagtgtctactttgcaaaggtggcgtttaaatgtgctgcgtttgaattttcgtggttgtcttctccgacccaaaactttcagatctgtcagccactgtaggaacttgcaagagttgaatgtctctgactgcccaacattcacagatgaatcaatgagacacatttctgagggctgcccgggggtcctgtgtctcaatctgtctaacacaactatcaccaacaggacgatgcgactcctgccgaggcacttccacaacttacagaatcttagtttggcttattgcagacggttcacagacaaaggcttacagtacctgaacttggggaatggatgccacaagctcatctatctggacctctctggctgcacccagatttcagtccaaggcttcaggtacattgcaaacagctgcactggaattatgcatcttaccattaatgacatgccaactctgacggacaactgtgtaaaagctttagttgaaaaatgctctcgtattacatcgctggttttcactggtgcaccgcatatctccgattgtactttcagagctctttctgcttgtaaactcagaaagatccgatttgaaggaaataaaagggttactgatgcatccttcaaatttatagacaagaattatccaaatctcagtcacatttatatggctgactgcaagggaataacagacagcagcctcagatccctttcacctttgaagcaactgactgtgttgaatttggcaaattgtgtaagaattggtgatatgggactaaagcaatttcttgatggtcctgcaagcatgaggataagagagctaaatttaagcaactgtgtgcggctaagtgatgcctctgttatgaaactatctgagcgctgccctaatttaaactacttgagtttacgaaattgtgaacatttgactgcccaaggaattggatatattgtaaacatcttttccttggtatcaatagatctctctggaacagacatctctaatgagggtttgaatgtgctttccagacataaaaaattgaaggaactttctgtatctgaatgttatagaatcactgatgatggaattcaggcattctgcaaaagctcactgatcttggaacatttggatgtctcttattgctcccagctgtcagatatgattatcaaagcactggccatttactgcattaacctcacatctctcagcattgctggctgtccaaagattactgactcagcaatggagatgttatcggcaaaatgccattacctgcacattttggatatctctggttgtgtcttgcttactgaccaaatccttgaggaccttcagataggctgcaaacaactccggatccttaagatgcaatactgcacaaatatttccaagaaggcagctcaaagaatgtcatctaaagttcagcagcaggaatacaacactaatgaccctccacgttggtttggctatgatagggaaggaaaccctgttacagagcttgacaacataacatcatctaaaggagccttagaattaacagtgaaaaagtcaacatacagcagtgaagaccaagcagcgtgaccttcagcctcaagcaggaagaacaaaaaatcaagaacttggcaagttttctccatttgttgcaagtatgtttactagctgaatctcaataacaatgtaaacaagcaacaaaccatcttctgattcttattccaactacaaatatttccaaacacatcagtagttcttctgtctaaataatcatgatttaaaaaagaagccaggccaggagcggtggctcacacctgtaatcctagcactttggtaggccaaggcgggtggaccataagtcaggagttcaagaccagcctggccaacatggtgaaaccccatctttactaaaaatacaaaaattagccgggtgtggtggtgggcgcctgtaatcccagctactcaggaggctgaggcaggggacttgcttgaacctgagaggcggaggttgcagtgagc

SEQ ID NO: 17453 - protein, 735 aa, Homo sapiens
MTPELMIKACSFYTGHLVKTHFCTWRDIARTNENVVLAEKMNRAVTCYNFRLQKSVFHHWHSYMEDQKEKLKNILLRIQQIIYCHKLTIILTKWRNTARHKSKKKEDELILKHELQLKKWKNRLILKRAAAEESNFPERSSSEVFLVDETLKCDISLLPERAILQIFFYLSLKDVIICGQVNHAWMLMTQLNSLWNAIDFSSVKNVIPDKYIVSTLQRWRLNVLRLNFRGCLLRPKTFRSVSHCRNLQELNVSDCPTFTDESMRHISEGCPGVLCLNLSNTTITNRTMRLLPRHFHNLQNLSLAYCRRFTDKGLQYLNLGNGCHKLIYLDLSGCTQISVQGFRYIANSCTGIMHLTINDMPTLTDNCVKALVEKCSRITSLVFTGAPHISDCTFRALSACKLRKIRFEGNKRVTDASFKFIDKNYPNLSHIYMADCKGITDSSLRSLSPLKQLTVLNLANCVRIGDMGLKQFLDGPASMRIRELNLSNCVRLSDASVMKLSERCPNLNYLSLRNCEHLTAQGIGYIVNIFSLVSIDLSGTDISNEGLNVLSRHKKLKELSVSECYRITDDGIQAFCKSSLILEHLDVSYCSQLSDMIIKALAIYCINLTSLSIAGCPKITDSAMEMLSAKCHYLHILDISGCVLLTDQILEDLQIGCKQLRILKMQYCTNISKKAAQRMSSKVQQQEYNTNDPPRWFGYDREGNPVTELDNITSSKGALELTVKKSTYSSEDQAA

SEQ ID NO: 17454 - DNA, 2740 bp, Homo sapiens
ggcccctagtcccagcgcggggagggtactatcgcagcttctccgtcaggccttgggccatggcctcgctacgcaatgccaacccgaggctgaagaactacttcaaggagaactacattcctcaggtctgcgaggcactgttatgtggtatacttgttacatgtcctgaggatccgctgaggtatttagagggaatgatcatggttataatcaaaagtggtcttcagaatcttctttgatgactccggaattgatgataaaagcctgtagcttttatactggacatttagtaaagactcatttttgcacttggagagacatagctcgtacaaatgaaaatgtcgtcctggctgaaaaaatgaacagagcagtgacatgctacaatttcagacttcaaaaatctgtatttcatcactggcactcttatatggaagaccagaaagaaaaacttaaaaatattctattgcggatacaacagatcatctattgtcacaagctaaccattatcctaacaaaatggcggaatacagcaagacataagagtaaaaagaaagaagatgagctgatattaaaacatgaacttcaattgaaaaaatggaaaaataggttaatactcaaaagagctgctgcagaagaatccaattttcctgaacgaagttcttctgaagtctttcttgtagatgagactctaaaatgtgacatttcactgttacctgaaagagcaatattacagattttcttctacctcagtttaaaagatgtgataatatgtggtcaagttaatcatgcctggatgttgatgacacaactaaactcactgtggaatgctattgatttttcctcagtgaaaaatgtgattccagataaatatatagtgtctactttgcaaaggtggcgtttaaatgtgctgcgtttgaattttcgtggttgtcttctccgacccaaaactttcagatctgtcagccactgtaggaacttgcaagagttgaatgtctctgactgcccaacattcacagatgaatcaatgagacacatttctgagggctgcccgggggtcctgtgtctcaatctgtctaacacaactatcaccaacaggacgatgcgactcctgccgaggcacttccacaacttacagaatcttagtttggcttattgcagacggttcacagacaaaggcttacagtacctgaacttggggaatggatgccacaagctcatctatctggacctctctggctgcacccagatttcagtccaaggcttcaggtacattgcaaacagctgcactggaattatgcatcttaccattaatgacatgccaactctgacggacaactgtgtaaaagctttagttgaaaaatgctctcgtattacatcgctggttttcactggtgcaccgcatatctccgattgtactttcagagctctttctgcttgtaaactcagaaagatccgatttgaaggaaataaaagggttactgatgcatccttcaaatttatagacaagaattatccaaatctcagtcacatttatatggctgactgcaagggaataacagacagcagcctcagatccctttcacctttgaagcaactgactgtgttgaatttggcaaattgtgtaagaattggtgatatgggactaaagcaatttcttgatggtcctgcaagcatgaggataagagagctaaatttaagcaactgtgtgcggctaagtgatgcctctgttatgaaactatctgagcgctgccctaatttaaactacttgagtttacgaaattgtgaacatttgactgcccaaggaattggatatattgtaaacatcttttccttggtatcaatagatctctctggaacagacatctctaatgagggtttgaatgtgctttccagacataaaaaattgaaggaactttctgtatctgaatgttatagaatcactgatgatggaattcagattactgactcagcaatggagatgttatcggcaaaatgccattacctgcacattttggatatctctggttgtgtcttgcttactgaccaaatccttgaggaccttcagataggctgcaaacaactccggatccttaagatgcaatactgcacaaatatttccaagaaggcagctcaaagaatgtcatctaaagttcagcagcaggaatacaacactaatgaccctccacgttggtttggctatgatagggaaggaaaccctgttacagagcttgacaacataacatcatctaaaggagccttagaattaacagtgaaaaagtcaacatacagcagtgaagaccaagcagcgtgaccttcagcctcaagcaggaagaacaaaaaatcaagaacttggcaagttttctccatttgttgcaagtatgtttactagctgaatctcaataacaatgtaaacaagcaacaaaccatcttctgattcttattccaactacaaatatttccaaacacatcagtagttcttctgtctaaataatcatgatttaaaaaagaagccaggccaggagcggtggctcacacctgtaatcctagcactttggtaggccaaggcgggtggaccataagtcaggagttcaagaccagcctggccaacatggtgaaaccccatctttactaaaaatacaaaaattagccgggtgtggtggtgggcgcctgtaatcccagctactcaggaggctgaggcaggggacttgcttgaacctgagaggcggaggttgcagtgagc

SEQ ID NO: 17455 - protein, 690 aa, Homo sapiens
MTPELMIKACSFYTGHLVKTHFCTWRDIARTNENVVLAEKMNRAVTCYNFRLQKSVFHHWHSYMEDQKEKLKNILLRIQQIIYCHKLTIILTKWRNTARHKSKKKEDELILKHELQLKKWKNRLILKRAAAEESNFPERSSSEVFLVDETLKCDISLLPERAILQIFFYLSLKDVIICGQVNHAWMLMTQLNSLWNAIDFSSVKNVIPDKYIVSTLQRWRLNVLRLNFRGCLLRPKTFRSVSHCRNLQELNVSDCPTFTDESMRHISEGCPGVLCLNLSNTTITNRTMRLLPRHFHNLQNLSLAYCRRFTDKGLQYLNLGNGCHKLIYLDLSGCTQISVQGFRYIANSCTGIMHLTINDMPTLTDNCVKALVEKCSRITSLVFTGAPHISDCTFRALSACKLRKIRFEGNKRVTDASFKFIDKNYPNLSHIYMADCKGITDSSLRSLSPLKQLTVLNLANCVRIGDMGLKQFLDGPASMRIRELNLSNCVRLSDASVMKLSERCPNLNYLSLRNCEHLTAQGIGYIVNIFSLVSIDLSGTDISNEGLNVLSRHKKLKELSVSECYRITDDGIQITDSAMEMLSAKCHYLHILDISGCVLLTDQILEDLQIGCKQLRILKMQYCTNISKKAAQRMSSKVQQQEYNTNDPPRWFGYDREGNPVTELDNITSSKGALELTVKKSTYSSEDQAA

SEQ ID NO: 17456 - DNA, 2029 bp, Homo sapiens
ggcccctagtcccagcgcggggagggtactatcgcagcttctccgtcaggccttgggccatggcctcgctacgcaatgccaacccgaggctgaagaactacttcaaggagaactacattcctcaggtctgcgaggcactgttatgtggtatacttgttacatgtcctgaggatccgctgaggtatttagagggaatgatcatggttataatcaaaagtggtcttcagaatcttctttgatgactccggaattgatgataaaagcctgtagcttttatactggacatttagtaaagactcatttttgcacttggagagacatagctcgtacaaatgaaaatgtcgtcctggctgaaaaaatgaacagagcagtgacatgctacaatttcagacttcaaaaatctgtatttcatcactggcactcttatatggaagaccagaaagaaaaacttaaaaatattctattgcggatacaacagatcatctattgtcacaagctaaccattatcctaacaaaatggcggaatacagcaagacataagagtaaaaagaaagaagatgagctgatattaaaacatgaacttcaattgaaaaaatggaaaaataggttaatactcaaaagagctgctgcagaagaatccaattttcctgaacgaagttcttctgaagtctttcttgtagatgagactctaaaatgtgacatttcactgttacctgaaagagcaatattacagattttcttctacctcagtttaaaagatgtgataatatgtggtcaagttaatcatgcctggatgttgatgacacaactaaactcactgtggaatgctattgatttttcctcagtgaaaaatgtgattccagataaatatatagtgtctactttgcaaaggtggcgtttaaatgtgctgcgtttgaattttcgtggttgtcttctccgacccaaaactttcagatctgtcagccactgtaggaacttgcaagagttgaatgtctctgactgcccaacattcacagatgaatcaatgagacacatttctgagggctgcccgggggtcctgtgtctcaatctgtctaacacaactatcaccaacaggacgatgcgactcctgccgaggcacttccacaacttacagaatcttagtttggcttattgcagacggttcacagacaaaggcttacagtacctgaacttggggaatggatgccacaagctcatctatctggacctctctggctgcacccagattactgactcagcaatggagatgttatcggcaaaatgccattacctgcacattttggatatctctggttgtgtcttgcttactgaccaaatccttgaggaccttcagataggctgcaaacaactccggatccttaagatgcaatactgcacaaatatttccaagaaggcagctcaaagaatgtcatctaaagttcagcagcaggaatacaacactaatgaccctccacgttggtttggctatgatagggaaggaaaccctgttacagagcttgacaacataacatcatctaaaggagccttagaattaacagtgaaaaagtcaacatacagcagtgaagaccaagcagcgtgaccttcagcctcaagcaggaagaacaaaaaatcaagaacttggcaagttttctccatttgttgcaagtatgtttactagctgaatctcaataacaatgtaaacaagcaacaaaccatcttctgattcttattccaactacaaatatttccaaacacatcagtagttcttctgtctaaataatcatgatttaaaaaagaagccaggccaggagcggtggctcacacctgtaatcctagcactttggtaggccaaggcgggtggaccataagtcaggagttcaagaccagcctggccaacatggtgaaaccccatctttactaaaaatacaaaaattagccgggtgtggtggtgggcgcctgtaatcccagctactcaggaggctgaggcaggggacttgcttgaacctgagaggcggaggttgcagtgagc

SEQ ID NO: 17457 - protein, 453 aa, Homo sapiens
MTPELMIKACSFYTGHLVKTHFCTWRDIARTNENVVLAEKMNRAVTCYNFRLQKSVFHHWHSYMEDQKEKLKNILLRIQQIIYCHKLTIILTKWRNTARHKSKKKEDELILKHELQLKKWKNRLILKRAAAEESNFPERSSSEVFLVDETLKCDISLLPERAILQIFFYLSLKDVIICGQVNHAWMLMTQLNSLWNAIDFSSVKNVIPDKYIVSTLQRWRLNVLRLNFRGCLLRPKTFRSVSHCRNLQELNVSDCPTFTDESMRHISEGCPGVLCLNLSNTTITNRTMRLLPRHFHNLQNLSLAYCRRFTDKGLQYLNLGNGCHKLIYLDLSGCTQITDSAMEMLSAKCHYLHILDISGCVLLTDQILEDLQIGCKQLRILKMQYCTNISKKAAQRMSSKVQQQEYNTNDPPRWFGYDREGNPVTELDNITSSKGALELTVKKSTYSSEDQAA

SEQ ID NO: 17458 - DNA, 2744 bp, Homo sapiens
agaatgcgagaaagtgaagtcaaattcggacttgtaggcgatcagggctgaagacgctgattagagagaaaacagagggtgatggtggctgcacgtggggaatgggtgacatctcccagggggaatgagcacaaggcccagatcggaaaccccaaactcagattttaaggtttggacaagaagtacctgaggagtggaggagtgagaaagaagtgccagagagcctgaggaggaaaatcagcagactggcattatgaagaatgttgtcagaagtagggagtaggcactagtcacctaagataaggagctggattctgcccaaggcactgttatgtggtatacttgttacatgtcctgaggatccgctgaggtatttagagggaatgatcatggttataatcaaaagtggtcttcagaatcttctttgatgactccggaattgatgataaaagcctgtagcttttatactggacatttagtaaagactcatttttgcacttggagagacatagctcgtacaaatgaaaatgtcgtcctggctgaaaaaatgaacagagcagtgacatgctacaatttcagacttcaaaaatctgtatttcatcactggcactcttatatggaagaccagaaagaaaaacttaaaaatattctattgcggatacaacagatcatctattgtcacaagctaaccattatcctaacaaaatggcggaatacagcaagacataagagtaaaaagaaagaagatgagctgatattaaaacatgaacttcaattgaaaaaatggaaaaataggttaatactcaaaagagctgctgcagaagaatccaattttcctgaacgaagttcttctgaagtctttcttgtagatgagactctaaaatgtgacatttcactgttacctgaaagagcaatattacagattttcttctacctcagtttaaaagatgtgataatatgtggtcaagttaatcatgcctggatgttgatgacacaactaaactcactgtggaatgctattgatttttcctcagtgaaaaatgtgattccagataaatatatagtgtctactttgcaaaggtggcgtttaaatgtgctgcgtttgaattttcgtggttgtcttctccgacccaaaactttcagatctgtcagccactgtaggaacttgcaagagttgaatgtctctgactgcccaacattcacagatgaatcaatgagacacatttctgagggctgcccgggggtcctgtgtctcaatctgtctaacacaactatcaccaacaggacgatgcgactcctgccgaggcacttccacaacttacagaatcttagtttggcttattgcagacggttcacagacaaaggcttacagtacctgaacttggggaatggatgccacaagctcatctatctggacctctctggctgcacccagatttcagtccaaggcttcaggtacattgcaaacagctgcactggaattatgcatcttaccattaatgacatgccaactctgacggacaactgtgtaaaagctttagttgaaaaatgctctcgtattacatcgctggttttcactggtgcaccgcatatctccgattgtactttcagagctctttctgcttgtaaactcagaaagatccgatttgaaggaaataaaagggttactgatgcatccttcaaatttatagacaagaattatccaaatctcagtcacatttatatggctgactgcaagggaataacagacagcagcctcagatccctttcacctttgaagcaactgactgtgttgaatttggcaaattgtgtaagaattggtgatatgggactaaagcaatttcttgatggtcctgcaagcatgaggataagagagctaaatttaagcaactgtgtgcggctaagtgatgcctctgttatgaaactatctgagcgctgccctaatttaaactacttgagtttacgaaattgtgaacatttgactgcccaaggaattggatatattgtaaacatcttttccttggtatcaatagatctctctggaacagacatctctaatgagggtttgaatgtgctttccagacataaaaaattgaaggaactttctgtatctgaatgttatagaatcactgatgatggaattcaggcattctgcaaaagctcactgatcttggaacatttggatgtctcttattgctcccagctgtcagatatgattatcaaagcactggccatttactgcattaacctcacatctctcagcattgctggctgtccaaagattactgactcagcaatggagatgttatcggcaaaatgccattacctgcacattttggatatctctggttgtgtcttgcttactgaccaaatccttgaggaccttcagataggctgcaaacaactccggatccttaagatgcaatactgcacaaatatttccaagaaggcagctcaaagaatgtcatctaaagttcagcagcaggaatacaacactaatgaccctccacgttggtttggctatgatagggaaggaaaccctgttacagagcttgacaacataacatcatctaaaggagccttagaattaacagtgaaaaagtcaacatacagcagtgaagaccaagcagcgtgaccttcagcctcaagcaggaagaacaaaaaatcaagaacttggcaagttttctccatttgttgcaagtatgtttactagctgaatctcaataacaatgtaaacaagcaac

SEQ ID NO: 17459 - protein, 735 aa, Homo sapiens; identical to SEQ ID NO: 17453

SEQ ID NO: 17460 - DNA, 2475 bp, Homo sapiens
gcccggcccctagtcccagcgcggggagggtactatcgcagcttctccgtcaggccttgggccatggcctcgctacgcaatgccaacccgaggctgaagaactacttcaaggagaactacattcctcaggtctgcgaggcactgttatgtggtatacttgttacatgtcctgaggatccgctgaggtatttagagggaatgatcatggttataatcaaaagtggtcttcagaatcttctttgatgactccggaattgatgataaaagcctgtagcttttatactggacatttagtaaagactcatttttgcacttggagagacatagctcgtacaaatgaaaatgtcgtcctggctgaaaaaatgaacagagcagtgacatgctacaatttcagacttcaaaaatctgtatttcatcactggcactcttatatggaagaccagaaagaaaaacttaaaaatattctattgcggatacaacagatcatctattgtcacaagctaaccattatcctaacaaaatggcggaatacagcaagacataagagtaaaaagaaagaagatgagctgatattaaaacatgaacttcaattgaaaaaatggaaaaataggttaatactcaaaagagctgctgcagaagaatccaattttcctgaacgaagttcttctgaagtctttcttgtagatgagactctaaaatgtgacatttcactgttacctgaaagagcaatattacagattttcttctacctcagtttaaaagatgtgataatatgtggtcaagttaatcatgcctggatgttgatgacacaactaaactcactgtggaatgctattgatttttcctcagtgaaaaatgtgattccagataaatatatagtgtctactttgcaaaggtggcgtttaaatgtgctgcgtttgaattttcgtggttgtcttctccgacccaaaactttcagatctgtcagccactgtaggaacttgcaagagttgaatgtctctgactgcccaacattcacagatgaatcaatgagacacatttctgagggctgcccgggggtcctgtgtctcaatctgtctaacacaactatcaccaacaggacgatgcgactcctgccgaggcacttccacaacttacagaatcttagtttggcttattgcagacggttcacagacaaaggcttacagtacctgaacttggggaatggatgccacaagctcatctatctggacctctctggctgcacccagatttcagtccaaggcttcaggtacattgcaaacagctgcactggaattatgcatcttaccattaatgacatgccaactctgacggacaactgtgtaaaagctttagttgaaaaatgctctcgtattacatcgctggttttcactggtgcaccgcatatctccgattgtactttcagagctctttctgcttgtaaactcagaaagatccgatttgaaggaaataaaagggttactgatgcatccttcaaatttatagacaagaattatccaaatctcagtcacatttatatggctgactgcaagggaataacagacagcagcctcagatccctttcacctttgaagcaactgactgtgttgaatttggcaaattgtgtaagaattggtgatatgggactaaagcaatttcttgatggtcctgcaagcatgaggataagagagctaaatttaagcaactgtgtgcggctaagtgatgcctctgttatgaaactatctgagcgctgccctaatttaaactacttgagtttacgaaattgtgaacatttgactgcccaaggaattggatatattgtaaacatcttttccttggtatcaatagatctctctggaacagacatctctaatgaggcattctgcaaaagctcactgatcttggaacatttggatgtctcttattgctcccagctgtcagatatgattatcaaagcactggccatttactgcattaacctcacatctctcagcattgctggctgtccaaagattactgactcagcaatggagatgttatcggcaaaatgccattacctgcacattttggatatctctggttgtgtcttgcttactgaccaaatccttgaggaccttcagataggctgcaaacaactccggatccttaagatgcaatactgcacaaatatttccaagaaggcagctcaaagaatgtcatctaaagttcagcagcaggaatacaacactaatgaccctccacgttggtttggctatgatagggaaggaaaccctgttacagagcttgacaacataacatcatctaaaggagccttagaattaacagtgaaaaagtcaacatacagcagtgaagaccaagcagcgtgaccttcagcctcaagcaggaagaacaaaaaatcaagaacttggcaagttttctccatttgttgcaagtatgtttactagctgaatctcaataacaatgtaaacaagcaac

SEQ ID NO: 17461 - protein, 707 aa, Homo sapiens
MTPELMIKACSFYTGHLVKTHFCTWRDIARTNENVVLAEKMNRAVTCYNFRLQKSVFHHWHSYMEDQKEKLKNILLRIQQIIYCHKLTIILTKWRNTARHKSKKKEDELILKHELQLKKWKNRLILKRAAAEESNFPERSSSEVFLVDETLKCDISLLPERAILQIFFYLSLKDVIICGQVNHAWMLMTQLNSLWNAIDFSSVKNVIPDKYIVSTLQRWRLNVLRLNFRGCLLRPKTFRSVSHCRNLQELNVSDCPTFTDESMRHISEGCPGVLCLNLSNTTITNRTMRLLPRHFHNLQNLSLAYCRRFTDKGLQYLNLGNGCHKLIYLDLSGCTQISVQGFRYIANSCTGIMHLTINDMPTLTDNCVKALVEKCSRITSLVFTGAPHISDCTFRALSACKLRKIRFEGNKRVTDASFKFIDKNYPNLSHIYMADCKGITDSSLRSLSPLKQLTVLNLANCVRIGDMGLKQFLDGPASMRIRELNLSNCVRLSDASVMKLSERCPNLNYLSLRNCEHLTAQGIGYIVNIFSLVSIDLSGTDISNEAFCKSSLILEHLDVSYCSQLSDMIIKALAIYCINLTSLSIAGCPKITDSAMEMLSAKCHYLHILDISGCVLLTDQILEDLQIGCKQLRILKMQYCTNISKKAAQRMSSKVQQQEYNTNDPPRWFGYDREGNPVTELDNITSSKGALELTVKKSTYSSEDQAA

SEQ ID NO: 17462 - DNA, 2583 bp, Homo sapiens
gcccgcacgcgcccggcccctagtcccagcgcggggagggtactatcgcagcttctccgtcaggccttgggccatggcctcgctacgcaatgccaacccgaggctgaagaactacttcaaggagaactacattcctcaggtctgcgaggcactgttatgtggtatacttgttacatgtcctgaggatccgctgaggtatttagagggaatgatcatggttataatcaaaagtggtcttcagaatcttctttgggatatgtgcattactccatcaatgaaaccaaacattcgaagattgtctgaaacttacctggaacaactttttgaattggatgatcagctgatgactccggaattgatgataaaagcctgtagcttttatactggacatttagtaaagactcatttttgcacttggagagacatagctcgtacaaatgaaaatgtcgtcctggctgaaaaaatgaacagagcagtgacatgctacaatttcagacttcaaaaatctgtatttcatcactggcactcttatatggaagaccagaaagaaaaacttaaaaatattctattgcggatacaacagatcatctattgtcacaagctaaccattatcctaacaaaatggcggaatacagcaagacataagagtaaaaagaaagaagatgagctgatattaaaacatgaacttcaattgaaaaaatggaaaaataggttaatactcaaaagagctgctgcagaagaatccaattttcctgaacgaagttcttctgaagtctttcttgtagatgagactctaaaatgtgacatttcactgttacctgaaagagcaatattacagattttcttctacctcagtttaaaagatgtgataatatgtggtcaagttaatcatgcctggatgttgatgacacaactaaactcactgtggaatgctattgatttttcctcagtgaaaaatgtgattccagataaatatatagtgtctactttgcaaaggtggcgtttaaatgtgctgcgtttgaattttcgtggttgtcttctccgacccaaaactttcagatctgtcagccactgtaggaacttgcaagagttgaatgtctctgactgcccaacattcacagatgaatcaatgagacacatttctgagggctgcccgggggtcctgtgtctcaatctgtctaacacaactatcaccaacaggacgatgcgactcctgccgaggcacttccacaacttacagaatcttagtttggcttattgcagacggttcacagacaaaggcttacagtacctgaacttggggaatggatgccacaagctcatctatctggacctctctggctgcacccagatttcagtccaaggcttcaggtacattgcaaacagctgcactggaattatgcatcttaccattaatgacatgccaactctgacggacaactgtgtaaaagctttagttgaaaaatgctctcgtattacatcgctggttttcactggtgcaccgcatatctccgattgtactttcagagctctttctgcttgtaaactcagaaagatccgatttgaaggaaataaaagggttactgatgcatccttcaaatttatagacaagaattatccaaatctcagtcacatttatatggctgactgcaagggaataacagacagcagcctcagatccctttcacctttgaagcaactgactgtgttgaatttggcaaattgtgtaagaattggtgatatgggactaaagcaatttcttgatggtcctgcaagcatgaggataagagagctaaatttaagcaactgtgtgcggctaagtgatgcctctgttatgaaactatctgagcgctgccctaatttaaactacttgagtttacgaaattgtgaacatttgactgcccaaggaattggatatattgtaaacatcttttccttggtatcaatagatctctctggaacagacatctctaatgagggtttgaatgtgctttccagacataaaaaattgaaggaactttctgtatctgaatgttatagaatcactgatgatggaattcagatagcaagaatggaggcatctgcaaataaggagggacttcccaagacaccaattgcagattactgactcagcaatggagatgttatcggcaaaatgccattacctgcacattttggatatctctggttgtgtcttgcttactgaccaaatccttgaggaccttcagataggctgcaaacaactccggatccttaagatgcaatactgcacaaatatttccaagaaggcagctcaaagaatgtcatctaaagttcagcagcaggaatacaacactaatgaccctccacgttggtttggctatgatagggaaggaaaccctgttacagagcttgacaacataacatcatctaaaggagccttagaattaacagtgaaaaagtcaacatacagcagtgaagaccaagcagcgtgaccttcagcctcaagcaggaagaacaaaaaatcaagaacttggcaagttttctccatttgttgcaagtatgtttactagctgaatctcaataacaatgtaaacaagcaac

SEQ ID NO: 17463 - protein, 684 aa, Homo sapiens
MASLRNANPRLKNYFKENYIPQVCEALLCGILVTCPEDPLRYLEGMIMVIIKSGLQNLLWDMCITPSMKPNIRRLSETYLEQLFELDDQLMTPELMIKACSFYTGHLVKTHFCTWRDIARTNENVVLAEKMNRAVTCYNFRLQKSVFHHWHSYMEDQKEKLKNILLRIQQIIYCHKLTIILTKWRNTARHKSKKKEDELILKHELQLKKWKNRLILKRAAAEESNFPERSSSEVFLVDETLKCDISLLPERAILQIFFYLSLKDVIICGQVNHAWMLMTQLNSLWNAIDFSSVKNVIPDKYIVSTLQRWRLNVLRLNFRGCLLRPKTFRSVSHCRNLQELNVSDCPTFTDESMRHISEGCPGVLCLNLSNTTITNRTMRLLPRHFHNLQNLSLAYCRRFTDKGLQYLNLGNGCHKLIYLDLSGCTQISVQGFRYIANSCTGIMHLTINDMPTLTDNCVKALVEKCSRITSLVFTGAPHISDCTFRALSACKLRKIRFEGNKRVTDASFKFIDKNYPNLSHIYMADCKGITDSSLRSLSPLKQLTVLNLANCVRIGDMGLKQFLDGPASMRIRELNLSNCVRLSDASVMKLSERCPNLNYLSLRNCEHLTAQGIGYIVNIFSLVSIDLSGTDISNEGLNVLSRHKKLKELSVSECYRITDDGIQIARMEASANKEGLPKTPIADY

SEQ ID NO: 17464 - DNA, 483 bp, Homo sapiens
acatttgtgcatctttattattattggtgtcatgtgcaaatcctgatagtagttaacatttattctttttaatggcttaaaatttttaactgacaaataaaaattgtatatatttatgaagtacaacatgctgttttgatacacacacacaacgtagatcatccttcattgaagcttacaatagagatgcgtgtactctgaccttccgattagtttttagtcctccactcttaatcgtgaacaaaaggattaccagacataagaggaaagtctctaaagtggaagatattgatcaacacaaattaacaggaaaaacttggagttagcaaaatatgaagaaggaagaaaactaagaaatttttttgaaaatcctcagaaattacaaggttattaacaatcgtgttctcttctattgtacacactgaaggcttttgtttactacagcatcacaccaactctcaagatgccctacgctttatttaa

SEQ ID NO: 17465 - protein, 68 aa, Homo sapiens [sequence omitted]

SEQ ID NO: 17466 - DNA, 235 bp, Homo sapiens
tgtaaacatcttttccttggtatcaatagatctctctggaacagacatctctaatgagggtttgaatgtgctttccagacataaaaaattgaaggaactttctgtatctgaatgttatagaatcactgatgatggaattcaggtaagatcattaagatcatctgttaaagaattaagattgaaatttttctttttttcttttttttccaatgaataaaaaggactatttttattg

SEQ ID NO: 17467 - protein, 71 aa, Homo sapiens
VNIFSLVSIDLSGTDISNEGLNVLSRHKKLKELSVSECYRITDDGIQVRSLRSSVKELRLKFFFFSFFSNE

SEQ ID NO: 17468 - DNA, 2022 bp, Homo sapiens
ggaaaatttcagcagctggggccatgtaatttaaaacctctgaaaagtgtgctgcggtccgtgcacagcattagtataacgtgagggctgaatgcagcccattctctggagaacttcctcacacaccgcagcaaagagaagactgaaagacaaacctgggtgcagccagagaggtccagatagatgagcttgtggcatccattccccaagttcagcctagggactccacgtaccccagctgggtctcattgttccagaactgcattagttaagattacccagacttggatttcaaaggaatactttcattgttccgtctgtaacacgaagtaattggggccagctggatgtcaggatgcgtgtggttaccattgtaatcttgctctgcttttgcaaagcggctgagctgcgcaaagcaagcccaggcagtgtgagaagccgagtgaatcatggccgggcgggtggaggccggagaggctccaacccggtcaaacgctacgcaccaggcctcccgtgtgacgtgtacacatatctccatgagaaatacttagattgtcaagaaagaaaattagtttatgtgctgcctggttggcctcaggatttgctgcacatgctgctagcaagaaacaagatccgcacattgaagaacaacatgttttccaagtttaaaaagctgaaaagcctggatctgcagcagaatgagatctctaaaattgagagtgaggcgttctttggtttaaacaaactcaccaccctcttactgcagcacaaccagatcaaagtcttgacggaggaagtgttcatttacacacctctcttgagctacctgcgtctttatgacaacccctggcactgtacttgtgagatagaaacgcttatttcaatgttgcagattcccaggaaccggaatttggggaactacgccaagtgtgaaagtccacaagaacaaaaaaataaaaaactgcggcagataaaatctgaacagttgtgtaatgaagaagaaaaggaacaattggacccgaaaccccaagtgtcagggagacccccagtcatcaagcctgaggtggactcaactttttgccacaattatgtgtttcccatacaaacactggactgcaaaaggaaagagttgaaaaaagtgccaaacaacatccctccagatattgttaaacttgacttgtcatacaataaaatcaaccaacttcgacccaaggaatttgaagatgttcatgagctgaagaaattaaacctcagcagcaatggcattgaattcatcgatcctgccgcttttttagggctcacacatttagaagaattagatttatcaaacaacagtctgcaaaactttgactatggcgtattagaagacttgtattttttgaaactcttgtggctcagagataacccttggagatgtgactacaacattcactacctctactactggttaaagcaccactacaatgtccattttaatggcctggaatgcaaaacgcctgaagaatacaaaggatggtctgtgggaaaatatattagaagttactatgaagaatgccccaaagacaagttaccagcatatcctgagtcatttgaccaagacacagaagatgatgaatgggaaaaaaaacatagagatcacaccgcaaagaagcaaagcgtaataattactatagtaggataaggtagaaattgttctgattgtaattagttttgtattttctatactggtgttagaaaacatatgtttacatttgattaactgtgttgcctatttatgcagggtaatccagctaaaggaagctttctttaattataagtattattgtgactattatagtaatcaagagaatgctatcatcctgcttgcctgtccatttgtggaacagcatctggtgatatgcaattccacactggtaacctgcagcagttgggtcctaatgatggcattagactttcataatgtcctgtataaatgtttttactgcttttagaaaataaagaaaaaaaacttggttcatgttt

SEQ ID NO: 17469 - protein, 441 aa, Homo sapiens; identical to SEQ ID NO: 2076

SEQ ID NO: 17470 - DNA, 2238 bp, Homo sapiens
ggaaaatttcagcagctggggccatgtaatttaaaacctctgaaaagtgtgctgcggtccgtgcacagcattagtataacgtgagggctgaatgcagcccattctctggagaacttcctcacacaccgcagcaaagagaagactgaaagacaaacctgggtgcagccagagaggtccagatagatgagcttgtggcatccattccccaagttcagcctagggactccacgtaccccagctgggtctcattgttccagaactgcattagttaagattacccagacttggatttcaaaggaatactttcattgttccgtctgtaacacgaagtaattggggccagctggatgtcaggatgcgtgtggttaccattgtaatcttgctctgcttttgcaaagcggctgagctgcgcaaagcaagcccaggcagtgtgagaagccgagtgaatcatggccgggcgggtggaggccggagaggctccaacccggtcaaacgctacgcaccaggcctcccgtgtgacgtgtacacatatctccatgagaaatacttagattgtcaagaaagaaaattagtttatgtgctgcctggttggcctcaggatttgctgcacatgctgctagcaagaaacaagatccgcacattgaagaacaacatgttttccaagtttaaaaagctgaaaagcctggatctgcagcagaatgagatctctaaaattgagagtgaggcgttctttggtttaaacaaactcaccaccctcttactgcagcacaaccagatcaaagtcttgacggaggaagtgttcatttacacacctctcttgagctacctgcgtctttatgacaacccctggcactgtacttgtgagatagaaacgcttatttcaatgttgcagattcccaggaaccggaatttggggaactacgccaagtgtgaaagtccacaagaacaaaaaaataaaaaactgcggcagataaaatctgaacagttgtgtaatgaagaagaaaaggaacaattggacccgaaaccccaagtgtcagggagacccccagtcatcaagcctgaggtggactcaactttttgccacaattatgtgtttcccatacaaacactggactgcaaaaggaaagagttgaaaaaagtgccaaacaacatccctccagatattgttaaacttgacttgtcatacaataaaatcaaccaacttcgacccaaggaatttgaagatgttcatgagctgaagaaattaaacctcagcagcaatggcattgaattcatcgatcctgggtctttgagatgaaaccctgcaagtagacttacgtgaatgatttttgctgtgccgcttttttagggctcacacatttagaagaattagatttatcaaacaacagtctgcaaaactttgactatggcgtattagaagacttgtattttttgaaactcttgtggctcagagataacccttggagatgtgactacaacattcactacctctactactggttaaagcaccactacaatgtccattttaatggcctggaatgcaaaacgcctgaagaatacaaaggatggtctgtgggaaaatatattagaagttactatgaagaatgccccaaagacaagttaccagcatatcctgagtcatttgaccaagacacagaagatgatgaatgggaaaaaaaacatagagatcacaccgcaaagaagcaaagcgtaataattactatagtaggataaggtagaaattgttctgattgtaattagttttgtattttctatactggtgttagaaaacatatgtttacatttgattaactgtgttgcctatttatgcagggtaatccagctaaaggaagctttctttaattataagtattattgtgactattatagtaatcaagagaatgctatcatcctgcttgcctgtccatttgtggaacagcatctggtgatatgcaattccacactggtaacctgcagcagttgggtcctaatgatggcattagactttcataatgtcctgtataaatgtttttactgcttttagaaaataaagaaaaaaaacttggttcatgtttacatgcctttcgatagctgtttgtgcatacttaaagatgatcaaaatgattttatacaaatgctgttataataaaatgtcattccctacccctctactttttttcagtaagtcatcttatacattaaataaatttccatttctgatttctgtgcattccaaaa

SEQ ID NO: 17471 - protein, 313 aa, Homo sapiens
MRVVTIVILLCFCKAAELRKASPGSVRSRVNHGRAGGGRRGSNPVKRYAPGLPCDVYTYLHEKYLDCQERKLVYVLPGWPQDLLHMLLARNKIRTLKNNMFSKFKKLKSLDLQQNEISKIESEAFFGLNKLTTLLLQHNQIKVLTEEVFIYTPLLSYLRLYDNPWHCTCEIETLISMLQIPRNRNLGNYAKCESPQEQKNKKLRQIKSEQLCNEEEKEQLDPKPQVSGRPPVIKPEVDSTFCHNYVFPIQTLDCKRKELKKVPNNIPPDIVKLDLSYNKINQLRPKEFEDVHELKKLNLSSNGIEFIDPGSLR

SEQ ID NO: 17472 - DNA, 2185 bp, Homo sapiens
ggaaaatttcagcagctggggccatgtaatttaaaacctctgaaaagtgtgctgcggtccgtgcacagcattagtataacgtgagggctgaatgcagcccattctctggagaacttcctcacacaccgcagcaaagagaagactgaaagacaaacctgggtgcagccagagaggtccagatagatgagcttgtggcatccattccccaagttcagcctagggactccacgtaccccagctgggtctcattgttccagaactgcattagttaagattacccagacttggatttcaaaggaatactttcattgttccgtctgtaacacgaagtaattggggccagctggatgtcaggatgcgtgtggttaccattgtaatcttgctctgcttttgcaaagcggctgagctgcgcaaagcaagcccaggcagtgtgagaagccgagtgaatcatggccgggcgggtggaggccggagaggctccaacccggtcaaacgctacgcaccaggcctcccgtgtgacgtgtacacatatctccatgagaaatacttagattgtcaagaaagaaaattagtttatgtgctgcctggttggcctcaggatttgctgcacatgctgctagcaagaaacaagatccgcacattgaagaacaacatgttttccaagtttaaaaagctgaaaagcctggatctgcagcagaatgagatctctaaaattgagagtgaggcgttctttggtttaaacaaactcaccaccctcttactgcagcacaaccagatcaaagtcttgacggaggaagtgttcatttacacacctctcttgagctacctgcgtctttatgacaacccctggcactgtacttgtgagatagaaacgcttatttcaatgttgcagattcccaggaaccggaatttggggaactacgccaagtgtgaaagtccacaagaacaaaaaaataaaaaactgcggcagataaaatctgaacagttgtgtaatgaagaagaaaaggaacaattggacccgaaaccccaagtgtcagggagacccccagtcatcaagcctgaggtggactcaactttttgccacaattatgtgtttcccatacaaacactggactgcaaaaggaaagagttgaaaaaagtgccaaacaacatccctccagatattgttaaacttgacttgtcatacaataaaatcaaccaacttcgacccaaggaatttgaagatgttcatgagctgaagaaattaaacctcagcagcaatggcattgaattcatcgatcctgccgcttttttagggctcacacatttagaagaattagatttatcaaacaacagtctgcaaaactttgactatggcgtattagaagacttgtattttttgaaactcttgtggctcagagataacccttggagatgtgactacaacattcactacctctactactggttaaagcaccactacaatgtccattttaatggcctggaatgcaaaacgcctgaagaatacaaaggatggtctgtgggaaaatatattagaagttactatgaagaatgccccaaagacaagttaccagcatatcctgagtcatttgaccaagacacagaagatgatgaatgggaaaaaaaacatagagatcacaccgcaaagaagcaaagcgtaataattactatagtaggataaggtagaaattgttctgattgtaattagttttgtattttctatactggtgttagaaaacatatgtttacatttgattaactgtgttgcctatttatgcagggtaatccagctaaaggaagctttctttaattataagtattattgtgactattatagtaatcaagagaatgctatcatcctgcttgcctgtccatttgtggaacagcatctggtgatatgcaattccacactggtaacctgcagcagttgggtcctaatgatggcattagactttcataatgtcctgtataaatgtttttactgcttttagaaaataaagaaaaaaaacttggttcatgtttacatgcctttcgatagctgtttgtgcatacttaaagatgatcaaaatgattttatacaaatgctgttataataaaatgtcattccctacccctctactttttttcagtaagtcatcttatacattaaataaatttccatttctgatttctgtgcattccaaaa

SEQ ID NO: 17473 - protein, 441 aa, Homo sapiens; identical to SEQ ID NO: 2076

SEQ ID NO: 17474 - DNA, 861 bp, Homo sapiens
aaaacctctgaaaagtgtgctgcggtccgtgcacagcattagtataacgtgagggctgaatgcagcccattctctggagaacttcctcacacaccgcagcaaagagaagactgaaagacaaacctgggtgcagccagagaggtccagatagatgagcttgtggcatccattccccaagttcagcctagggactccacgtaccccagctgggtctcattgttccagaactgcattagttaagattacccagacttggatttcaaaggaatactttcattgttccgtctgtaacacgaagtaattggggccagctggatgtcaggcctcccgtgtgacgtgtacacatatctccatgagaaatacttagattgtcaagaaagaaaattagtttatgtgctgcctggttggcctcaggatttgctgcacatgctgctagcaagaaacaagatccgcacattgaagaacaacatgttttccaagtttaaaaagctgaaaagcctggatctgcagcagaatgagatctctaaaattgagagtgaggcgttctttggtttaaacaaactcaccaccctcttactgcagcacaaccagatcaaagtcttgacggaggaagtgttcatttacacacctctcttgagctacctgcgtctttatgacaacccctggcactgtacttgtgagatagaaacgcttatttcaatgttgcagattcccaggaaccggaatttggggaactacgccaagtgtgaaagtccacaagaacaaaaaaataaaaaactgcggcagataaaatctgaacagttgtgtaatgaagaagaaaaggaacaattggacccgaaaccccaagtgtcagggagaccc

SEQ ID NO: 17475 - protein, 181 aa, Homo sapiens
MSGLPCDVYTYLHEKYLDCQERKLVYVLPGWPQDLLHMLLARNKIRTLKNNMFSKFKKLKSLDLQQNEISKIESEAFFGLNKLTTLLLQHNQIKVLTEEVFIYTPLLSYLRLYDNPWHCTCEIETLISMLQIPRNRNLGNYAKCESPQEQKNKKLRQIKSEQLCNEEEKEQLDPKPQVSGR

SEQ ID NO: 17476 - DNA, 1087 bp, Homo sapiens
ctgggacatgccattctaggctccaggtacccacacacgcatgctgtctacaacttccaggaagatagtaacattcccatttacagatgaggaaaatgaggctcaaagaggttcagtcacttgaccatggatctcacagagttgaaaaaagtgccaaacaacatccctccagatattgttaaacttgacttgtcatacaataaaatcaaccaacttcgacccaaggaatttgaagatgttcatgagctgaagaaattaaacctcagcagcaatggcattgaattcatcgatcctgggtctttgagatgaaaccctgcaagtagacttacgtgaatgatttttgctgtgccgcttttttagggctcacacatttagaagaattagatttatcaaacaacagtctgcaaaactttgactatggcgtattagaagacttgtattttttgaaactcttgtggctcagagataacccttggagatgtgactacaacattcactacctctactactggttaaagcaccactacaatgtccattttaatggcctggaatgcaaaacgcctgaagaatacaaaggatggtctgtgggaaaatatattagaagttactatgaagaatgccccaaagacaagttaccagcatatcctgagtcatttgaccaagacacagaagatgatgaatgggaaaaaaaacatagagatcacaccgcaaagaagcaaagcgtaataattactatagtaggataaggtagaaattgttctgattgtaattagttttgtattttctatactggtgttagaaaacatatgtttacatttgattaactgtgttgcctatttatgcagggtaatccagctaaaggaagctttctttaattataagtattattgtgactattatagtaatcaagagaatgctatcatcctgcttgcctgtccatttgtggaacagcatctggtgatatgcaattccacactggtaacctgcagcagttgggtcctaatgatggcattagactttcataatgtcctgtataaatgtttttactgcttttagaaaataaagaaaaaaaacttggttcatgttt

SEQ ID NO: 17477 - protein, 60 aa, Homo sapiens
MDLTELKKVPNNIPPDIVKLDLSYNKINQLRPKEFEDVHELKKLNLSSNGIEFIDPGSLR

SEQ ID NO: 17478 - DNA, 1250 bp, Homo sapiens
ctgggacatgccattctaggctccaggtacccacacacgcatgctgtctacaacttccaggaagatagtaacattcccatttacagatgaggaaaatgaggctcaaagaggttcagtcacttgaccatggatctcacagagttgaaaaaagtgccaaacaacatccctccagatattgttaaacttgacttgtcatacaataaaatcaaccaacttcgacccaaggaatttgaagatgttcatgagctgaagaaattaaacctcagcagcaatggcattgaattcatcgatcctgggtctttgagatgaaaccctgcaagtagacttacgtgaatgatttttgctgtgccgcttttttagggctcacacatttagaagaattagatttatcaaacaacagtctgcaaaactttgactatggcgtattagaagacttgtattttttgaaactcttgtggctcagagataacccttggagatgtgactacaacattcactacctctactactggttaaagcaccactacaatgtccattttaatggcctggaatgcaaaacgcctgaagaatacaaaggatggtctgtgggaaaatatattagaagttactatgaagaatgccccaaagacaagttaccagcatatcctgagtcatttgaccaagacacagaagatgatgaatgggaaaaaaaacatagagatcacaccgcaaagaagcaaagcgtaataattactatagtaggataaggtagaaattgttctgattgtaattagttttgtattttctatactggtgttagaaaacatatgtttacatttgattaactgtgttgcctatttatgcagggtaatccagctaaaggaagctttctttaattataagtattattgtgactattatagtaatcaagagaatgctatcatcctgcttgcctgtccatttgtggaacagcatctggtgatatgcaattccacactggtaacctgcagcagttgggtcctaatgatggcattagactttcataatgtcctgtataaatgtttttactgcttttagaaaataaagaaaaaaaacttggttcatgtttacatgcctttcgatagctgtttgtgcatacttaaagatgatcaaaatgattttatacaaatgctgttataataaaatgtcattccctacccctctactttttttcagtaagtcatcttatacattaaataaatttccatttctgatttctgtgcattccaaaa

SEQ ID NO: 17479 - protein, 60 aa, Homo sapiens; identical to SEQ ID NO: 17477

SEQ ID NO: 17480 - DNA, 1071 bp, Homo sapiens
cccaggcgctcattaaaacagcaggttgctccacactgcctcgtgttgtctgttggcacactctcaagagtttgaacggatacaagaatctttcatctggtgccgaaacccgggaggggctccggtcttcgtcccccgtggacctacccctccgccccagaaagcaggccacagcagccggacaaaggaagctcctcagcctccagttgcttctctgtgcatgcacatcagtcactgatctcacctactggcccagtcccaaggcgcaaggccacttgtgccagcagtgtgagtcagcaagatagcagaagcaggaagagagccggccagaagacacctactctgactgggagacacgtacccctgaagattgagaaagaggccatccagggagtgaagatggaatgagaagaacagagaaacaatgacagagtccttacaaacaccatgatacaagaaggcaatggggatatgttatcctaaaggaatcctaaaagaagtgatcaaaaaggtgaacagaaaaccaagtgggagtactgtcactgaggatgagtttccagagagaattaatgctgaagaagctattgcagacactgctgagtatgaagaactaattggagaaggaagccgttgtatagcagatgcagagcagcagcaaaaatggtaatgaaaatagaagataaattagaaaatttggaaaaacccaaacagatcagccatattgaagggaaaaagaaaaacaaaacaaagtgggagggcagaaatgtagaacggtatacactcttttaaccccaaggatgaatgtagccaagaacacagtggggacttaggagtctcagcacagagcattctctactccctactgctcaggcaaagaactccttcatcatgcagaaccaaaactggtgtagagtcttaaatgacctgggtatctctacgcagaagaaagcgctttccatgtaaaaggattaacttgaacctgggtgctcaagggacaccctaggctgcttatcccactgattctgatctgactgtgttaagtaataaatcatgtggttacatattcacatt

SEQ ID NO: 17481 - protein, 67 aa, Homo sapiens [sequence omitted]

SEQ ID NO: 17482 - DNA, 330 bp, Homo sapiens
atatacaaacatatggtcacatctatttggtgtatagggaaaagcaagtttaagagagcatctccaagggactaatatgcaagaggactccagcccagtaatgccccattccccacttaggggtgggcatgtgttgacttcactgcagctccaaggaatctctggccaatccaatcactgggcacatgtctggaccacttagtcacatggcttcacttcctccatttatgtttccaccatccacactccagccaatggcttcccacccttcacagtcgctgcatattgtttaactgcttctgactgaaaaatattcttcctctcaccttt

SEQ ID NO: 17483 - protein, 41 aa, Homo sapiens
MQEDSSPVMPHSPLRGGHVLTSLQLQGISGQSNHWAHVWTT

SEQ ID NO: 17484 - DNA, 1336 bp, Homo sapiens
accgccccgcgctccgctgccaggggcgggagggaggaatggttgcttcacgccccgggggaagagacgggaagctcggctctgggttgcgggccccggcgtctccgcgtggggcgcaccgtccgacccccccctcccggtgtgcagcgccccgcaccgccccgcctcgcctgggagaagccgccgggacgcgccgggctggagtgggcggttataggctttgagctaggccgtttccgggaggcggagctcagaccccatttcctttctccacatccaggtcaggtggcgtttgctgtggcggctaggcccgcgtgcgctggagacctccgcgctggcccccgcgagcctcctgccctggcccggcgctgcggctctgccgcggcggcagcatgggtggcccccggggcgcgggctgggtggcggcgggcctgctgctcggcgcgggcgcctgctactgcatttacaggctgacccggggtcggcggcggggcgaccgcgagctcgggatacgctcttcgaagtccgcaggtgccctggaagaagggacgtcagagggtcagttgtgcgggcgctcggcccggcctcagacgggaggtacctgggagtcacagtggtccaagacctcgcagcctgaagacttaactgatggttcatatgatgatgttctaaatgctgaacaacttcagaaactcctttacctgctggagtcaacggaggatcctgtaattattgaaagagctttgattactttgggtaacaatgcagccttttcagttaaccaaatccctatgaagttggtcactggcatcacattcgctattattcgtgaattgggtggtattccaattgttgcaaacaaaatcaaccattccaaccagagtattaaagagaaagctttaaatgcactaaataacctgagtgtgaatgttgaaaatcaaatcaagataaaggtggattcatcattcctttccctttatgacagccacgtagcaaaggagattcttcttcgagtacttacgctatttcagaatataaagaactgcctcaaaatagaaggccatttagctgtgcagcctactttcactgaaggttcattgtttttcctgttacatggagaagaatgtgcccagaaaataagagctttagttgatcaccatgatgcagaggtgaaggaaaaggttgtaacaataatacccaaaatctgattggtcatatttttccaaagagtaatgcagtctggatataaacgtattttctgtcttccttataaggggattctcccagctgctaaatttaaacagtaaatatcacattttgtcattaacacagctat

SEQ ID NO: 17485 - protein, 271 aa, Homo sapiens
MGGPRGAGWVAAGLLLGAGACYCIYRLTRGRRRGDRELGIRSSKSAGALEEGTSEGQLCGRSARPQTGGTWESQWSKTSQPEDLTDGSYDDVLNAEQLQKLLYLLESTEDPVIIERALITLGNNAAFSVNQIPMKLVTGITFAIIRELGGIPIVANKINHSNQSIKEKALNALNNLSVNVENQIKIKVDSSFLSLYDSHVAKEILLRVLTLFQNIKNCLKIEGHLAVQPTFTEGSLFFLLHGEECAQKIRALVDHHDAEVKEKVVTIIPKI

SEQ ID NO: 17486 - DNA, 1552 bp, Homo sapiens
accgccccgcgctccgctgccaggggcgggagggaggaatggttgcttcacgccccgggggaagagacgggaagctcggctctgggttgcgggccccggcgtctccgcgtggggcgcaccgtccgacccccccctcccggtgtgcagcgccccgcaccgccccgcctcgcctgggagaagccgccgggacgcgccgggctggagtgggcggttataggctttgagctaggccgtttccgggaggcggagctcagaccccatttcctttctccacatccaggtcaggtggcgtttgctgtggcggctaggcccgcgtgcgctggagacctccgcgctggcccccgcgagcctcctgccctggcccggcgctgcggctctgccgcggcggcagcatgggtggcccccggggcgcgggctgggtggcggcgggcctgctgctcggcgcgggcgcctgctactgcatttacaggctgacccggggtcggcggcggggcgaccgcgagctcgggatacgctcttcgaagtccgcaggtgccctggaagaagggacgtcagagggtcagttgtgcgggcgctcggcccggcctcagacgggaggtacctgggagtcacagtggtccaagacctcgcagcctgaagacttaactgatggttcatatgatgatgttctaaatgctgaacaacttcagaaactcctttacctgctggagtcaacggaggatcctgtaattattgaaagagctttgattactttgggtaacaatgcagccttttcagttaaccaagctattattcgtgaattgggtggtattccaattgttgcaaacaaaatcaaccattccaaccagagtattaaagagaaagctttaaatgcactaaataacctgagtgtgaatgttgaaaatcaaatcaagataaagatatacatcagtcaagtatgtgaggatgtcttctctggtcctctgaactctgctgtgcagctggctggactgacattgttgacaaacatgactgttaccaatgaccaccagcacatgcttcacagttacattacagacctgttccaggtgttacttactggaaatggaaacacgaaggtgcaagttttgaaactgcttttgaatttgtctgaaaatccagccatgacagaaggacttctccgtgcccaagtggattcatcattcctttccctttatgacagccacgtagcaaaggagattcttcttcgagtacttacgctatttcagaatataaagaactgcctcaaaatagaaggccatttagctgtgcagcctactttcactgaaggttcattgtttttcctgttacatggagaagaatgtgcccagaaaataagagctttagttgatcaccatgatgcagaggtgaaggaaaaggttgtaacaataatacccaaaatctgattggtcatatttttccaaagagtaatgcagtctggatataaacgtattttctgtcttccttataaggggattctcccagctgctaaatttaaacagtaaatatcacattttgtcattaacacagctat

SEQ ID NO: 17487 - protein, 343 aa, Homo sapiens; identical to SEQ ID NO: 2080

SEQ ID NO: 17488 - DNA, 1574 bp, Homo sapiens
accgccccgcgctccgctgccaggggcgggagggaggaatggttgcttcacgccccgggggaagagacgggaagctcggctctgggttgcgggccccggcgtctccgcgtggggcgcaccgtccgacccccccctcccggtgtgcagcgccccgcaccgccccgcctcgcctgggagaagccgccgggacgcgccgggctggagtgggcggttataggctttgagctaggccgtttccgggaggcggagctcagaccccatttcctttctccacatccaggtcaggtggcgtttgctgtggcggctaggcccgcgtgcgctggagacctccgcgctggcccccgcgagcctcctgccctggcccggcgctgcggctctgccgcggcggcagcatgggtggcccccggggcgcgggctgggtggcggcgggcctgctgctcggcgcgggcgcctgctactgcatttacaggctgacccggggtcggcggcggggcgaccgcgagctcgggatacgctcttcgaagtccgcaggtgccctggaagaagggacgtcagagggtcagttgtgcgggcgctcggcccggcctcagacgggaggtacctgggagtcacagtggtccaagacctcgcagcctgaagacttaactgatggttcatatgatgatgttctaaatgctgaacaacttcagaaactcctttacctgctggagtcaacggaggatcctgtaattattgaaagagctttgattactttgggtaacaatgcagccttttcagttaaccaaatccctatgaagttggtcactggcatcacattcgctattattcgtgaattgggtggtattccaattgttgcaaacaaaatcaaccattccaaccagagtattaaagagaaagctttaaatgcactaaataacctgagtgtgaatgttgaaaatcaaatcaagataaaggtggattcatcattcctttccctttatgacagccacgtagcaaaggagattcttcttcgagtacttacgctatttcagaatataaagaactgcctcaaaatagaaggccatttagctgtgcagcctactttcactgaaggttcattgtttttcctgttacatggagaagaatgtgcccagaaaataagagctttagttgatcaccatgatgcagaggtgaaggaaaaggttgtaacaataatacccaaaatctgattggtcatatttttccaaagagtaatgcagtctggatataaacgtattttctgtcttccttataaggggattctcccagctgctaaatttaaacagtaaatatcacattttgtcattaacacagctataacttgccgtggttctcagatttattttggactattttgatgccaagtgaatataagagcttgtactgaaaccatttatttctttctattttgctatttgcaaatgcttgttatcttccctacatgaagtggcagtaacctttttcacatttaagctacccttctaccttttgaagtgatttgcagttactcatctgagacagcatcagtatttgactaaatcattgtttcacaactg

SEQ ID NO: 17489 - protein, 271 aa, Homo sapiens; identical to SEQ ID NO: 17485

SEQ ID NO: 17490 - DNA, 1790 bp, Homo sapiens
accgccccgcgctccgctgccaggggcgggagggaggaatggttgcttcacgccccgggggaagagacgggaagctcggctctgggttgcgggccccggcgtctccgcgtggggcgcaccgtccgacccccccctcccggtgtgcagcgccccgcaccgccccgcctcgcctgggagaagccgccgggacgcgccgggctggagtgggcggttataggctttgagctaggccgtttccgggaggcggagctcagaccccatttcctttctccacatccaggtcaggtggcgtttgctgtggcggctaggcccgcgtgcgctggagacctccgcgctggcccccgcgagcctcctgccctggcccggcgctgcggctctgccgcggcggcagcatgggtggcccccggggcgcgggctgggtggcggcgggcctgctgctcggcgcgggcgcctgctactgcatttacaggctgacccggggtcggcggcggggcgaccgcgagctcgggatacgctcttcgaagtccgcaggtgccctggaagaagggacgtcagagggtcagttgtgcgggcgctcggcccggcctcagacgggaggtacctgggagtcacagtggtccaagacctcgcagcctgaagacttaactgatggttcatatgatgatgttctaaatgctgaacaacttcagaaactcctttacctgctggagtcaacggaggatcctgtaattattgaaagagctttgattactttgggtaacaatgcagccttttcagttaaccaagctattattcgtgaattgggtggtattccaattgttgcaaacaaaatcaaccattccaaccagagtattaaagagaaagctttaaatgcactaaataacctgagtgtgaatgttgaaaatcaaatcaagataaagatatacatcagtcaagtatgtgaggatgtcttctctggtcctctgaactctgctgtgcagctggctggactgacattgttgacaaacatgactgttaccaatgaccaccagcacatgcttcacagttacattacagacctgttccaggtgttacttactggaaatggaaacacgaaggtgcaagttttgaaactgcttttgaatttgtctgaaaatccagccatgacagaaggacttctccgtgcccaagtggattcatcattcctttccctttatgacagccacgtagcaaaggagattcttcttcgagtacttacgctatttcagaatataaagaactgcctcaaaatagaaggccatttagctgtgcagcctactttcactgaaggttcattgtttttcctgttacatggagaagaatgtgcccagaaaataagagctttagttgatcaccatgatgcagaggtgaaggaaaaggttgtaacaataatacccaaaatctgattggtcatatttttccaaagagtaatgcagtctggatataaacgtattttctgtcttccttataaggggattctcccagctgctaaatttaaacagtaaatatcacattttgtcattaacacagctataacttgccgtggttctcagatttattttggactattttgatgccaagtgaatataagagcttgtactgaaaccatttatttctttctattttgctatttgcaaatgcttgttatcttccctacatgaagtggcagtaacctttttcacatttaagctacccttctaccttttgaagtgatttgcagttactcatctgagacagcatcagtatttgactaaatcattgtttcacaactg

SEQ ID NO: 17491 - protein, 343 aa, Homo sapiens; identical to SEQ ID NO: 2080

SEQ ID NO: 17492 - DNA, 2351 bp, Homo sapiens
accgccccgcgctccgctgccaggggcgggagggaggaatggttgcttcacgccccgggggaagagacgggaagctcggctctgggttgcgggccccggcgtctccgcgtggggcgcaccgtccgacccccccctcccggtgtgcagcgccccgcaccgccccgcctcgcctgggagaagccgccgggacgcgccgggctggagtgggcggttataggctttgagctaggccgtttccgggaggcggagctcagaccccatttcctttctccacatccaggtcaggtggcgtttgctgtggcggctaggcccgcgtgcgctggagacctccgcgctggcccccgcgagcctcctgccctggcccggcgctgcggctctgccgcggcggcagcatgggtggcccccggggcgcgggctgggtggcggcgggcctgctgctcggcgcgggcgcctgctactgcatttacaggctgacccggggtcggcggcggggcgaccgcgagctcgggatacgctcttcgaagtccgcagaagacttaactgatggttcatatgatgatgttctaaatgctgaacaacttcagaaactcctttacctgctggagtcaacggaggatcctgtaattattgaaagagctttgattactttgggtaacaatgcagccttttcagttaaccaagctattattcgtgaattgggtggtattccaattgttgcaaacaaaatcaaccattccaaccagagtattaaagagaaagctttaaatgcactaaataacctgagtgtgaatgttgaaaatcaaatcaagataaaggtgcaagttttgaaactgcttttgaatttgtctgaaaatccagccatgacagaaggacttctccgtgcccaagtggattcatcattcctttccctttatgacagccacgtagcaaaggagattcttcttcgagtacttacgctatttcagaatataaagaactgcctcaaaatagaaggccatttagctgtgcagcctactttcactgaaggttcattgtttttcctgttacatggagaagaatgtgcccagaaaataagagctttagttgatcaccatgatgcagaggtgaaggaaaaggttgtaacaataatacccaaaatctgattggtcatatttttccaaagagtaatgcagtctggatataaacgtattttctgtcttccttataaggggattctcccagctgctaaatttaaacagtaaatatcacattttgtcattaacacagctataacttgccgtggttctcagatttattttggactattttgatgccaagtgaatataagagcttgtactgaaaccatttatttctttctattttgctatttgcaaatgcttgttatcttccctacatgaagtggcagtaacctttttcacatttaagctacccttctaccttttgaagtgatttgcagttactcatctgagacagcatcagtatttgactaaatcattgtttcacaactgaatagtcttgttcttttagtagcaacgaaatcctaagctcttgaggccattcacctgccaacctgaccatactgctttcaaaagtcttttctcatcagtagaatctattttggtcacttctagtcaatgaaaaatgtaaacttttaggagagaatgtttcttaggactcacccactccattcaatgttatatataaaatagtgtgatcaatcacaatgtccatctttagacagttggttaaataaattatctggtctttgaaaagaccgtgctgggcgcggtggctcttgcctgtaatcccagcactttgggaggctgaggcgggcagatcacctgagatcgggagtttgagaccaagcctgaccaatatggagaaaccctgtctctactaagaacacaaaattagctgggcatggtggtgcatgcctgtaatcccagctacttgggaggccgaggcaggagaattgcttgaacccgggaggcagaggttgcagtgagctgagatagcgccattgcactccagcctgggcaacaagagcaaaactctgtctcaaaaaaaaaaaaaaatgatggagctccgaatgtgcttaagtggaaagatatctatgaaatatggtggttttttaaaacacaaaaattatagaatatgggatcccgtgtgtgtgtgtgtgtgtttgaatgaaaaatgcttatgtattgacagaacacttctagaatgatacccaaactcctggagtgggagtggggaatgccttctacgtacacactgttctactgtttgaattttttaatatgagcccaaattgtataatctttttttaataaaggggagaaaaatcactt

SEQ ID NO: 17493 - protein, 249 aa, Homo sapiens
MGGPRGAGWVAAGLLLGAGACYCIYRLTRGRRRGDRELGIRSSKSAEDLTDGSYDDVLNAEQLQKLLYLLESTEDPVIIERALITLGNNAAFSVNQAIIRELGGIPIVANKINHSNQSIKEKALNALNNLSVNVENQIKIKVQVLKLLLNLSENPAMTEGLLRAQVDSSFLSLYDSHVAKEILLRVLTLFQNIKNCLKIEGHLAVQPTFTEGSLFFLLHGEECAQKIRALVDHHDAEVKEKVVTIIPKI

SEQ ID NO: 17494 - DNA, 2417 bp, Homo sapiens
accgccccgcgctccgctgccaggggcgggagggaggaatggttgcttcacgccccgggggaagagacgggaagctcggctctgggttgcgggccccggcgtctccgcgtggggcgcaccgtccgacccccccctcccggtgtgcagcgccccgcaccgccccgcctcgcctgggagaagccgccgggacgcgccgggctggagtgggcggttataggctttgagctaggccgtttccgggaggcggagctcagaccccatttcctttctccacatccaggtcaggtggcgtttgctgtggcggctaggcccgcgtgcgctggagacctccgcgctggcccccgcgagcctcctgccctggcccggcgctgcggctctgccgcggcggcagcatgggtggcccccggggcgcgggctgggtggcggcgggcctgctgctcggcgcgggcgcctgctactgcatttacaggctgacccggggtcggcggcggggcgaccgcgagctcgggatacgctcttcgaagtccgcaggtgccctggaagaagggacgtcagagggtcagttgtgcgggcgctcggcccggcctcagacgggaggtacctgggagtcacagtggtccaagacctcgcagcctgaagacttaactgatggttcatatgatgatgttctaaatgctgaacaacttcagaaactcctttacctgctggagtcaacggaggatcctgtaattattgaaagagctttgattactttgggtaacaatgcagccttttcagttaaccaaatccctatgaagttggtcactggcatcacattcgctattattcgtgaattgggtggtattccaattgttgcaaacaaaatcaaccattccaaccagagtattaaagagaaagctttaaatgcactaaataacctgagtgtgaatgttgaaaatcaaatcaagataaaggtggattcatcattcctttccctttatgacagccacgtagcaaaggagattcttcttcgagtacttacgctatttcagaatataaagaactgcctcaaaatagaaggccatttagctgtgcagcctactttcactgaaggttcattgtttttcctgttacatggagaagaatgtgcccagaaaataagagctttagttgatcaccatgatgcagaggtgaaggaaaaggttgtaacaataatacccaaaatctgattggtcatatttttccaaagagtaatgcagtctggatataaacgtattttctgtcttccttataaggggattctcccagctgctaaatttaaacagtaaatatcacattttgtcattaacacagctataacttgccgtggttctcagatttattttggactattttgatgccaagtgaatataagagcttgtactgaaaccatttatttctttctattttgctatttgcaaatgcttgttatcttccctacatgaagtggcagtaacctttttcacatttaagctacccttctaccttttgaagtgatttgcagttactcatctgagacagcatcagtatttgactaaatcattgtttcacaactgaatagtcttgttcttttagtagcaacgaaatcctaagctcttgaggccattcacctgccaacctgaccatactgctttcaaaagtcttttctcatcagtagaatctattttggtcacttctagtcaatgaaaaatgtaaacttttaggagagaatgtttcttaggactcacccactccattcaatgttatatataaaatagtgtgatcaatcacaatgtccatctttagacagttggttaaataaattatctggtctttgaaaagaccgtgctgggcgcggtggctcttgcctgtaatcccagcactttgggaggctgaggcgggcagatcacctgagatcgggagtttgagaccaagcctgaccaatatggagaaaccctgtctctactaagaacacaaaattagctgggcatggtggtgcatgcctgtaatcccagctacttgggaggccgaggcaggagaattgcttgaacccgggaggcagaggttgcagtgagctgagatagcgccattgcactccagcctgggcaacaagagcaaaactctgtctcaaaaaaaaaaaaaaatgatggagctccgaatgtgcttaagtggaaagatatctatgaaatatggtggttttttaaaacacaaaaattatagaatatgggatcccgtgtgtgtgtgtgtgtgtttgaatgaaaaatgcttatgtattgacagaacacttctagaatgatacccaaactcctggagtgggagtggggaatgccttctacgtacacactgttctactgtttgaattttttaatatgagcccaaattgtataatctttttttaataaaggggagaaaaatcactt

SEQ ID NO: 17495 - protein, 271 aa, Homo sapiens; identical to SEQ ID NO: 17485

SEQ ID NO: 17496 - DNA, 2456 bp, Homo sapiens
accgccccgcgctccgctgccaggggcgggagggaggaatggttgcttcacgccccgggggaagagacgggaagctcggctctgggttgcgggccccggcgtctccgcgtggggcgcaccgtccgacccccccctcccggtgtgcagcgccccgcaccgccccgcctcgcctgggagaagccgccgggacgcgccgggctggagtgggcggttataggctttgagctaggccgtttccgggaggcggagctcagaccccatttcctttctccacatccaggtcaggtggcgtttgctgtggcggctaggcccgcgtgcgctggagacctccgcgctggcccccgcgagcctcctgccctggcccggcgctgcggctctgccgcggcggcagcatgggtggcccccggggcgcgggctgggtggcggcgggcctgctgctcggcgcgggcgcctgctactgcatttacaggctgacccggggtcggcggcggggcgaccgcgagctcgggatacgctcttcgaagtccgcaggtgccctggaagaagggacgtcagagggtcagttgtgcgggcgctcggcccggcctcagacgggaggtacctgggagtcacagtggtccaagacctcgcagcctgaagacttaactgatggttcatatgatgatgttctaaatgctgaacaacttcagaaactcctttacctgctggagtcaacggaggatcctgtaattattgaaagagctttgattactttgggtaacaatgcagccttttcagttaaccaagctattattcgtgaattgggtggtattccaattgttgcaaacaaaatcaaccattccaaccagagtattaaagagaaagctttaaatgcactaaataacctgagtgtgaatgttgaaaatcaaatcaagataaaggtgcaagttttgaaactgcttttgaatttgtctgaaaatccagccatgacagaaggacttctccgtgcccaagtggattcatcattcctttccctttatgacagccacgtagcaaaggagattcttcttcgagtacttacgctatttcagaatataaagaactgcctcaaaatagaaggccatttagctgtgcagcctactttcactgaaggttcattgtttttcctgttacatggagaagaatgtgcccagaaaataagagctttagttgatcaccatgatgcagaggtgaaggaaaaggttgtaacaataatacccaaaatctgattggtcatatttttccaaagagtaatgcagtctggatataaacgtattttctgtcttccttataaggggattctcccagctgctaaatttaaacagtaaatatcacattttgtcattaacacagctataacttgccgtggttctcagatttattttggactattttgatgccaagtgaatataagagcttgtactgaaaccatttatttctttctattttgctatttgcaaatgcttgttatcttccctacatgaagtggcagtaacctttttcacatttaagctacccttctaccttttgaagtgatttgcagttactcatctgagacagcatcagtatttgactaaatcattgtttcacaactgaatagtcttgttcttttagtagcaacgaaatcctaagctcttgaggccattcacctgccaacctgaccatactgctttcaaaagtcttttctcatcagtagaatctattttggtcacttctagtcaatgaaaaatgtaaacttttaggagagaatgtttcttaggactcacccactccattcaatgttatatataaaatagtgtgatcaatcacaatgtccatctttagacagttggttaaataaattatctggtctttgaaaagaccgtgctgggcgcggtggctcttgcctgtaatcccagcactttgggaggctgaggcgggcagatcacctgagatcgggagtttgagaccaagcctgaccaatatggagaaaccctgtctctactaagaacacaaaattagctgggcatggtggtgcatgcctgtaatcccagctacttgggaggccgaggcaggagaattgcttgaacccgggaggcagaggttgcagtgagctgagatagcgccattgcactccagcctgggcaacaagagcaaaactctgtctcaaaaaaaaaaaaaaatgatggagctccgaatgtgcttaagtggaaagatatctatgaaatatggtggttttttaaaacacaaaaattatagaatatgggatcccgtgtgtgtgtgtgtgtgtttgaatgaaaaatgcttatgtattgacagaacacttctagaatgatacccaaactcctggagtgggagtggggaatgccttctacgtacacactgttctactgtttgaattttttaatatgagcccaaattgtataatctttttttaataaaggggagaaaaatcactt

SEQ ID NO: 17497 - protein, 284 aa, Homo sapiens
MGGPRGAGWVAAGLLLGAGACYCIYRLTRGRRRGDRELGIRSSKSAGALEEGTSEGQLCGRSARPQTGGTWESQWSKTSQPEDLTDGSYDDVLNAEQLQKLLYLLESTEDPVIIERALITLGNNAAFSVNQAIIRELGGIPIVANKINHSNQSIKEKALNALNNLSVNVENQIKIKVQVLKLLLNLSENPAMTEGLLRAQVDSSFLSLYDSHVAKEILLRVLTLFQNIKNCLKIEGHLAVQPTFTEGSLFFLLHGEECAQKIRALVDHHDAEVKEKVVTIIPKI

SEQ ID NO: 17498 - DNA, 2633 bp, Homo sapiens
accgccccgcgctccgctgccaggggcgggagggaggaatggttgcttcacgccccgggggaagagacgggaagctcggctctgggttgcgggccccggcgtctccgcgtggggcgcaccgtccgacccccccctcccggtgtgcagcgccccgcaccgccccgcctcgcctgggagaagccgccgggacgcgccgggctggagtgggcggttataggctttgagctaggccgtttccgggaggcggagctcagaccccatttcctttctccacatccaggtcaggtggcgtttgctgtggcggctaggcccgcgtgcgctggagacctccgcgctggcccccgcgagcctcctgccctggcccggcgctgcggctctgccgcggcggcagcatgggtggcccccggggcgcgggctgggtggcggcgggcctgctgctcggcgcgggcgcctgctactgcatttacaggctgacccggggtcggcggcggggcgaccgcgagctcgggatacgctcttcgaagtccgcaggtgccctggaagaagggacgtcagagggtcagttgtgcgggcgctcggcccggcctcagacgggaggtacctgggagtcacagtggtccaagacctcgcagcctgaagacttaactgatggttcatatgatgatgttctaaatgctgaacaacttcagaaactcctttacctgctggagtcaacggaggatcctgtaattattgaaagagctttgattactttgggtaacaatgcagccttttcagttaaccaagctattattcgtgaattgggtggtattccaattgttgcaaacaaaatcaaccattccaaccagagtattaaagagaaagctttaaatgcactaaataacctgagtgtgaatgttgaaaatcaaatcaagataaagatatacatcagtcaagtatgtgaggatgtcttctctggtcctctgaactctgctgtgcagctggctggactgacattgttgacaaacatgactgttaccaatgaccaccagcacatgcttcacagttacattacagacctgttccaggtgttacttactggaaatggaaacacgaaggtgcaagttttgaaactgcttttgaatttgtctgaaaatccagccatgacagaaggacttctccgtgcccaagtggattcatcattcctttccctttatgacagccacgtagcaaaggagattcttcttcgagtacttacgctatttcagaatataaagaactgcctcaaaatagaaggccatttagctgtgcagcctactttcactgaaggttcattgtttttcctgttacatggagaagaatgtgcccagaaaataagagctttagttgatcaccatgatgcagaggtgaaggaaaaggttgtaacaataatacccaaaatctgattggtcatatttttccaaagagtaatgcagtctggatataaacgtattttctgtcttccttataaggggattctcccagctgctaaatttaaacagtaaatatcacattttgtcattaacacagctataacttgccgtggttctcagatttattttggactattttgatgccaagtgaatataagagcttgtactgaaaccatttatttctttctattttgctatttgcaaatgcttgttatcttccctacatgaagtggcagtaacctttttcacatttaagctacccttctaccttttgaagtgatttgcagttactcatctgagacagcatcagtatttgactaaatcattgtttcacaactgaatagtcttgttcttttagtagcaacgaaatcctaagctcttgaggccattcacctgccaacctgaccatactgctttcaaaagtcttttctcatcagtagaatctattttggtcacttctagtcaatgaaaaatgtaaacttttaggagagaatgtttcttaggactcacccactccattcaatgttatatataaaatagtgtgatcaatcacaatgtccatctttagacagttggttaaataaattatctggtctttgaaaagaccgtgctgggcgcggtggctcttgcctgtaatcccagcactttgggaggctgaggcgggcagatcacctgagatcgggagtttgagaccaagcctgaccaatatggagaaaccctgtctctactaagaacacaaaattagctgggcatggtggtgcatgcctgtaatcccagctacttgggaggccgaggcaggagaattgcttgaacccgggaggcagaggttgcagtgagctgagatagcgccattgcactccagcctgggcaacaagagcaaaactctgtctcaaaaaaaaaaaaaaatgatggagctccgaatgtgcttaagtggaaagatatctatgaaatatggtggttttttaaaacacaaaaattatagaatatgggatcccgtgtgtgtgtgtgtgtgtttgaatgaaaaatgcttatgtattgacagaacacttctagaatgatacccaaactcctggagtgggagtggggaatgccttctacgtacacactgttctactgtttgaattttttaatatgagcccaaattgtataatctttttttaataaaggggagaaaaatcactt

SEQ ID NO: 17499 - protein, 343 aa, Homo sapiens; identical to SEQ ID NO: 2080

SEQ ID NO: 17500 - DNA, 2528 bp, Homo sapiens
accgccccgcgctccgctgccaggggcgggagggaggaatggttgcttcacgccccgggggaagagacgggaagctcggctctgggttgcgggccccggcgtctccgcgtggggcgcaccgtccgacccccccctcccggtgtgcagcgccccgcaccgccccgcctcgcctgggagaagccgccgggacgcgccgggctggagtgggcggttataggctttgagctaggccgtttccgggaggcggagctcagaccccatttcctttctccacatccaggtcaggtggcgtttgctgtggcggctaggcccgcgtgcgctggagacctccgcgctggcccccgcgagcctcctgccctggcccggcgctgcggctctgccgcggcggcagcatgggtggcccccggggcgcgggctgggtggcggcgggcctgctgctcggcgcgggcgcctgctactgcatttacaggctgacccggggtcggcggcggggcgaccgcgagctcgggatacgctcttcgaagtccgcagaagacttaactgatggttcatatgatgatgttctaaatgctgaacaacttcagaaactcctttacctgctggagtcaacggaggatcctgtaattattgaaagagctttgattactttgggtaacaatgcagccttttcagttaaccaagctattattcgtgaattgggtggtattccaattgttgcaaacaaaatcaaccattccaaccagagtattaaagagaaagctttaaatgcactaaataacctgagtgtgaatgttgaaaatcaaatcaagataaagatatacatcagtcaagtatgtgaggatgtcttctctggtcctctgaactctgctgtgcagctggctggactgacattgttgacaaacatgactgttaccaatgaccaccagcacatgcttcacagttacattacagacctgttccaggtgttacttactggaaatggaaacacgaaggtgcaagttttgaaactgcttttgaatttgtctgaaaatccagccatgacagaaggacttctccgtgcccaagtggattcatcattcctttccctttatgacagccacgtagcaaaggagattcttcttcgagtacttacgctatttcagaatataaagaactgcctcaaaatagaaggccatttagctgtgcagcctactttcactgaaggttcattgtttttcctgttacatggagaagaatgtgcccagaaaataagagctttagttgatcaccatgatgcagaggtgaaggaaaaggttgtaacaataatacccaaaatctgattggtcatatttttccaaagagtaatgcagtctggatataaacgtattttctgtcttccttataaggggattctcccagctgctaaatttaaacagtaaatatcacattttgtcattaacacagctataacttgccgtggttctcagatttattttggactattttgatgccaagtgaatataagagcttgtactgaaaccatttatttctttctattttgctatttgcaaatgcttgttatcttccctacatgaagtggcagtaacctttttcacatttaagctacccttctaccttttgaagtgatttgcagttactcatctgagacagcatcagtatttgactaaatcattgtttcacaactgaatagtcttgttcttttagtagcaacgaaatcctaagctcttgaggccattcacctgccaacctgaccatactgctttcaaaagtcttttctcatcagtagaatctattttggtcacttctagtcaatgaaaaatgtaaacttttaggagagaatgtttcttaggactcacccactccattcaatgttatatataaaatagtgtgatcaatcacaatgtccatctttagacagttggttaaataaattatctggtctttgaaaagaccgtgctgggcgcggtggctcttgcctgtaatcccagcactttgggaggctgaggcgggcagatcacctgagatcgggagtttgagaccaagcctgaccaatatggagaaaccctgtctctactaagaacacaaaattagctgggcatggtggtgcatgcctgtaatcccagctacttgggaggccgaggcaggagaattgcttgaacccgggaggcagaggttgcagtgagctgagatagcgccattgcactccagcctgggcaacaagagcaaaactctgtctcaaaaaaaaaaaaaaatgatggagctccgaatgtgcttaagtggaaagatatctatgaaatatggtggttttttaaaacacaaaaattatagaatatgggatcccgtgtgtgtgtgtgtgtgtttgaatgaaaaatgcttatgtattgacagaacacttctagaatgatacccaaactcctggagtgggagtggggaatgccttctacgtacacactgttctactgtttgaattttttaatatgagcccaaattgtataatctttttttaataaaggggagaaaaatcactt

SEQ ID NO: 17501 - protein, 308 aa, Homo sapiens
MGGPRGAGWVAAGLLLGAGACYCIYRLTRGRRRGDRELGIRSSKSAEDLTDGSYDDVLNAEQLQKLLYLLESTEDPVIIERALITLGNNAAFSVNQAIIRELGGIPIVANKINHSNQSIKEKALNALNNLSVNVENQIKIKIYISQVCEDVFSGPLNSAVQLAGLTLLTNMTVTNDHQHMLHSYITDLFQVLLTGNGNTKVQVLKLLLNLSENPAMTEGLLRAQVDSSFLSLYDSHVAKEILLRVLTLFQNIKNCLKIEGHLAVQPTFTEGSLFFLLHGEECAQKIRALVDHHDAEVKEKVVTIIPKI

SEQ ID NO: 17502 - DNA, 6017 bp, Homo sapiens
accgccccgcgctccgctgccaggggcgggagggaggaatggttgcttcacgccccgggggaagagacgggaagctcggctctgggttgcgggccccggcgtctccgcgtggggcgcaccgtccgacccccccctcccggtgtgcagcgccccgcaccgccccgcctcgcctgggagaagccgccgggacgcgccgggctggagtgggcggttataggctttgagctaggccgtttccgggaggcggagctcagaccccatttcctttctccacatccaggtcaggtggcgtttgctgtggcggctaggcccgcgtgcgctggagacctccgcgctggcccccgcgagcctcctgccctggcccggcgctgcggctctgccgcggcggcagcatgggtggcccccggggcgcgggctgggtggcggcgggcctgctgctcggcgcgggcgcctgctactgcatttacaggctgacccggggtcggcggcggggcgaccgcgagctcgggatacgctcttcgaagtccgcagaagacttaactgatggttcatatgatgatgttctaaatgctgaacaacttcagaaactcctttacctgctggagtcaacggaggatcctgtaattattgaaagagctttgattactttgggtaacaatgcagccttttcagttaaccaagctattattcgtgaattgggtggtattccaattgttgcaaacaaaatcaaccattccaaccagagtattaaagagaaagctttaaatgcactaaataacctgagtgtgaatgttgaaaatcaaatcaagataaaggtgcaagttttgaaactgcttttgaatttgtctgaaaatccagccatgacagaaggacttctccgtgcccaagtggattcatcattcctttccctttatgacagccacgtagcaaaggagattcttcttcgagtacttacgctatttcagaatataaagaactgcctcaaaatagaaggccatttagctgtgcagcctactttcactgaaggttcattgtttttcctgttacatggagaagaatgtgcccagaaaataagagctttagttgatcaccatgatgcagaggtgaaggaaaaggttgtaacaataatacccaaaatctgattggtcatatttttccaaagagtaatgcagtctggatataaacgtattttctgtcttccttataaggggattctcccagctgctaaatttaaacagtaaatatcacattttgtcattaacacagctataacttgccgtggttctcagatttattttggactattttgatgccaagtgaatataagagcttgtactgaaaccatttatttctttctattttgctatttgcaaatgcttgttatcttccctacatgaagtggcagtaacctttttcacatttaagctacccttctaccttttgaagtgatttgcagttactcatctgagacagcatcagtatttgactaaatcattgtttcacaactgaatagtcttgttcttttagtagcaacgaaatcctaagctcttgaggccattcacctgccaacctgaccatactgctttcaaaagtcttttctcatcagtagaatctattttggtcacttctagtcaatgaaaaatgtaaacttttaggagagaatgtttcttaggactcacccactccattcaatgttatatataaaatagtgtgatcaatcacaatgtccatctttagacagttggttaaataaattatctggtctttgaaaagaccgtgctgggcgcggtggctcttgcctgtaatcccagcactttgggaggctgaggcgggcagatcacctgagatcgggagtttgagaccaagcctgaccaatatggagaaaccctgtctctactaagaacacaaaattagctgggcatggtggtgcatgcctgtaatcccagctacttgggaggccgaggcaggagaattgcttgaacccgggaggcagaggttgcagtgagctgagatagcgccattgcactccagcctgggcaacaagagcaaaactctgtctcaaaaaaaaaaaaaaatgatggagctccgaatgtgcttaagtggaaagatatctatgaaatatggtggttttttaaaacacaaaaattatagaatatgggatcccgtgtgtgtgtgtgtgtgtttgaatgaaaaatgcttatgtattgacagaacacttctagaatgatacccaaactcctggagtgggagtggggaatgccttctacgtacacactgttctactgtttgaattttttaatatgagcccaaattgtataatctttttttaataaaggggagaaaaatcacttacaaggttatacatattttttcccttgacagtactttattaattttcatccatattttacttgactaaaaatacaatgtatgaaaatttatctttaatagcattttccataagctactataacaatttattgatacatctgggattcagccaggtcttatagtatttaaatttataacccctgccatgcttagcattaagtaaatcagtatgcaagcagtatttaaggcaaagctttaagaatactttaaatttcatttgtaaatacatagatgcaagactgtttccataggaagtcacaaatcctcaaacagaaatatgtgtgttctcaatgttaccctgatacagaaatcaaacttggaagaaatatttttacattagaaaaaggactcagtataaggtgaaaacaaaattcccagtgggctagacatgaacaaaagtattcattccccaaaaggcacatttctttataacggttttttcaaatctacctccctatttaatgaaagcatattcattaaatatgaaactatgcatacattaaaaaccaggatttgtttttaatgtgctttagcagcagtagattctaaaactgtgtcttcttgtcctctcattagtttgaataatcacactccctagagatcagagcattgagtctgaaatgtcaaaatgctagagaaaagagggagtaatttttaactacccagaaagaagatgcacaaatacatcttttcctacgtaggtcacggcatatgttggcttttataatttgggatttctcctaattgatgacccaccctattgggcagtgaggcatagcaaagtattcctcagttatcacaggaaacttcaataaaatcttacatattgctatgggtattcacgaagaggaaaatgaagttgacttagaggataagactgattaaaagacactacaatgcatattagactgaattgaagaagagaatggatttgtcttatttttcaaaatttgttttcactttgcacataaacccttcaaaatgtagataacaaatgaaaaataaagtggaacccactcaataaggtgagattctgtaagcagagatgaagcttgatgttcttaatgaatagtgtcagtgtagaaagaacatgagtggtaataaaaaattacagcttacaaaagggcctagaaaaatgaggcaggccagacgagtggaaatagaacacaacagtttaaagtgctttgagaccctcagttaaacagtacacgtgaatacaaaataatgttaaggccattcatggagaagaaatacttaagcaagacatacctggcttgcttcatagagaagaggtaagagatggattttcaattcggcgtgcagcagcagggaatatggctacaacaacgctggctagtattagggcaacacacctcaaagctaactcaccataaacctaacatcttgattcacatctgcttggagtgaaaaagtttatgatcagtcttttcaggaaggtttattttatgggggatttttttgtgctttagtaccccaaaatcacatatgttcgcatacatcatatacacacacattgcatacacatttccccttgactgattcgcatctttgtagataaacactaaattttgataaagattatttacacttatttaggctattactccaatttaaaaatcagtgaaagttttcaatgtttagtctcctaatatataatgcttaaatttgcaacaggaacaatacattatcaaaagcattaacctgtatttagctttcaaatatacctgtctatattaggcagtgatatcttaagaaatcattttctcccttatattttctaaagtgctttaaaaactcatttaatctacacatttttcagaggtaggtcggaattatcctcttgttgcaaatgaggaaacaggcacagtgagcactggtgacttgtttcaggttacacaaaaaaatccatgatgaaagcagggtaaaagttcagatttagtggctaacgtggcaccacacatacaggtgtgcaaataaattatagagcactgcctgggtagcatttggtgtagaaaacctattttgattattttgtatgaataaagtgctgagactggattaggaatacagaatgggcctccagtggtatctaatccacctccctcccttaggaagggtcagaataatcaagtgaatacagagtccttattaggactaaatcttatgtcaactgactccccccccgccccccaaccactggcattcatactggcttaccaaaagaatcatgcttaaggttcatttaatataaaaatgtaagacatctgaatcaggtaaaaaaaattataaatctgattgatatatttagagctaagagactccaggaaaaaaaaaatgtgtagagaaaattaaaaacaaatttaattcaaagaatatggtctattaacattttgtctgtaaaatatttcattgtagctgtatttgtgcttagaagatcttctagatttaaaaacagaaaatggcataaatcatattctcatagccacactccttcccttcctctgctcagctaaggagagggctttcttttgagacagggtctcattttgtcgcccaggctggagtgcagtggtacgatcacagctcactgcagcctctatctcctgggctcaagtgatcctcccacctcagcctcccaagtacctgtgactacaggtacacaccacctcacccggctttttcttttttctttttttttttccgagagagacgggaggtcaccatgttgcccaggttgatgtcaaactcctgggttcaagtgacccacccaccttggcctcccaaagtaagaggtcttttgggaattgtagacgtgcaatagaatatactgttccctctcatctgaaggctctaggaaaaaaagaatatactgttcttttaaaaatttaagtgaatggtggtcatgggtgcattaatgcgaaagaactgtacacttaaaaatggttaaaatggtaaatgtttaaaatggcaaatatgtatttatatattttaccacaatagagaaaatcaagtctttaaaaatgatagcccctatgtttttatgcttacctaaataaaccatatttaatatttggcatataagctaatttgatagagcaagaattgctatgtttataataagcatgttggactgaatttcatcatttattagaatgtgcatataagaaagatacttgtatttgtaggcctctgaaaaacatctaggtaggtagagagccttgactcaccttgccgaaggtcctgaagaatggaaaaaagaaaaatgaatcttcaatatcggtttttcacctcaggaaattctagtaccacaaaaatataatgttttagtaaaaacatttccattgcagtgcttatatcatgatatgaaatttaaaatccacattagccaattcattatttaaatgacccacccctgaaccctctcatagtgtacatgagctgatcatactaggaagcaagttattacacaaaacataaaacataaacttgcagaagttgtttccaaatgtaaaataatcacaatattcatgaatttctaagtcttttcatttgtttttaaacttagatgatgcctttttcattaaaagtgcctgtgctcacattta

SEQ ID NO: 17503 - protein, 249 aa, Homo sapiens; identical to SEQ ID NO: 17493

SEQ ID NO: 17504 - DNA, 6083 bp, Homo sapiens
accgccccgcgctccgctgccaggggcgggagggaggaatggttgcttcacgccccgggggaagagacgggaagctcggctctgggttgcgggccccggcgtctccgcgtggggcgcaccgtccgacccccccctcccggtgtgcagcgccccgcaccgccccgcctcgcctgggagaagccgccgggacgcgccgggctggagtgggcggttataggctttgagctaggccgtttccgggaggcggagctcagaccccatttcctttctccacatccaggtcaggtggcgtttgctgtggcggctaggcccgcgtgcgctggagacctccgcgctggcccccgcgagcctcctgccctggcccggcgctgcggctctgccgcggcggcagcatgggtggcccccggggcgcgggctgggtggcggcgggcctgctgctcggcgcgggcgcctgctactgcatttacaggctgacccggggtcggcggcggggcgaccgcgagctcgggatacgctcttcgaagtccgcaggtgccctggaagaagggacgtcagagggtcagttgtgcgggcgctcggcccggcctcagacgggaggtacctgggagtcacagtggtccaagacctcgcagcctgaagacttaactgatggttcatatgatgatgttctaaatgctgaacaacttcagaaactcctttacctgctggagtcaacggaggatcctgtaattattgaaagagctttgattactttgggtaacaatgcagccttttcagttaaccaaatccctatgaagttggtcactggcatcacattcgctattattcgtgaattgggtggtattccaattgttgcaaacaaaatcaaccattccaaccagagtattaaagagaaagctttaaatgcactaaataacctgagtgtgaatgttgaaaatcaaatcaagataaaggtggattcatcattcctttccctttatgacagccacgtagcaaaggagattcttcttcgagtacttacgctatttcagaatataaagaactgcctcaaaatagaaggccatttagctgtgcagcctactttcactgaaggttcattgtttttcctgttacatggagaagaatgtgcccagaaaataagagctttagttgatcaccatgatgcagaggtgaaggaaaaggttgtaacaataatacccaaaatctgattggtcatatttttccaaagagtaatgcagtctggatataaacgtattttctgtcttccttataaggggattctcccagctgctaaatttaaacagtaaatatcacattttgtcattaacacagctataacttgccgtggttctcagatttattttggactattttgatgccaagtgaatataagagcttgtactgaaaccatttatttctttctattttgctatttgcaaatgcttgttatcttccctacatgaagtggcagtaacctttttcacatttaagctacccttctaccttttgaagtgatttgcagttactcatctgagacagcatcagtatttgactaaatcattgtttcacaactgaatagtcttgttcttttagtagcaacgaaatcctaagctcttgaggccattcacctgccaacctgaccatactgctttcaaaagtcttttctcatcagtagaatctattttggtcacttctagtcaatgaaaaatgtaaacttttaggagagaatgtttcttaggactcacccactccattcaatgttatatataaaatagtgtgatcaatcacaatgtccatctttagacagttggttaaataaattatctggtctttgaaaagaccgtgctgggcgcggtggctcttgcctgtaatcccagcactttgggaggctgaggcgggcagatcacctgagatcgggagtttgagaccaagcctgaccaatatggagaaaccctgtctctactaagaacacaaaattagctgggcatggtggtgcatgcctgtaatcccagctacttgggaggccgaggcaggagaattgcttgaacccgggaggcagaggttgcagtgagctgagatagcgccattgcactccagcctgggcaacaagagcaaaactctgtctcaaaaaaaaaaaaaaatgatggagctccgaatgtgcttaagtggaaagatatctatgaaatatggtggttttttaaaacacaaaaattatagaatatgggatcccgtgtgtgtgtgtgtgtgtttgaatgaaaaatgcttatgtattgacagaacacttctagaatgatacccaaactcctggagtgggagtggggaatgccttctacgtacacactgttctactgtttgaattttttaatatgagcccaaattgtataatctttttttaataaaggggagaaaaatcacttacaaggttatacatattttttcccttgacagtactttattaattttcatccatattttacttgactaaaaatacaatgtatgaaaatttatctttaatagcattttccataagctactataacaatttattgatacatctgggattcagccaggtcttatagtatttaaatttataacccctgccatgcttagcattaagtaaatcagtatgcaagcagtatttaaggcaaagctttaagaatactttaaatttcatttgtaaatacatagatgcaagactgtttccataggaagtcacaaatcctcaaacagaaatatgtgtgttctcaatgttaccctgatacagaaatcaaacttggaagaaatatttttacattagaaaaaggactcagtataaggtgaaaacaaaattcccagtgggctagacatgaacaaaagtattcattccccaaaaggcacatttctttataacggttttttcaaatctacctccctatttaatgaaagcatattcattaaatatgaaactatgcatacattaaaaaccaggatttgtttttaatgtgctttagcagcagtagattctaaaactgtgtcttcttgtcctctcattagtttgaataatcacactccctagagatcagagcattgagtctgaaatgtcaaaatgctagagaaaagagggagtaatttttaactacccagaaagaagatgcacaaatacatcttttcctacgtaggtcacggcatatgttggcttttataatttgggatttctcctaattgatgacccaccctattgggcagtgaggcatagcaaagtattcctcagttatcacaggaaacttcaataaaatcttacatattgctatgggtattcacgaagaggaaaatgaagttgacttagaggataagactgattaaaagacactacaatgcatattagactgaattgaagaagagaatggatttgtcttatttttcaaaatttgttttcactttgcacataaacccttcaaaatgtagataacaaatgaaaaataaagtggaacccactcaataaggtgagattctgtaagcagagatgaagcttgatgttcttaatgaatagtgtcagtgtagaaagaacatgagtggtaataaaaaattacagcttacaaaagggcctagaaaaatgaggcaggccagacgagtggaaatagaacacaacagtttaaagtgctttgagaccctcagttaaacagtacacgtgaatacaaaataatgttaaggccattcatggagaagaaatacttaagcaagacatacctggcttgcttcatagagaagaggtaagagatggattttcaattcggcgtgcagcagcagggaatatggctacaacaacgctggctagtattagggcaacacacctcaaagctaactcaccataaacctaacatcttgattcacatctgcttggagtgaaaaagtttatgatcagtcttttcaggaaggtttattttatgggggatttttttgtgctttagtaccccaaaatcacatatgttcgcatacatcatatacacacacattgcatacacatttccccttgactgattcgcatctttgtagataaacactaaattttgataaagattatttacacttatttaggctattactccaatttaaaaatcagtgaaagttttcaatgtttagtctcctaatatataatgcttaaatttgcaacaggaacaatacattatcaaaagcattaacctgtatttagctttcaaatatacctgtctatattaggcagtgatatcttaagaaatcattttctcccttatattttctaaagtgctttaaaaactcatttaatctacacatttttcagaggtaggtcggaattatcctcttgttgcaaatgaggaaacaggcacagtgagcactggtgacttgtttcaggttacacaaaaaaatccatgatgaaagcagggtaaaagttcagatttagtggctaacgtggcaccacacatacaggtgtgcaaataaattatagagcactgcctgggtagcatttggtgtagaaaacctattttgattattttgtatgaataaagtgctgagactggattaggaatacagaatgggcctccagtggtatctaatccacctccctcccttaggaagggtcagaataatcaagtgaatacagagtccttattaggactaaatcttatgtcaactgactccccccccgccccccaaccactggcattcatactggcttaccaaaagaatcatgcttaaggttcatttaatataaaaatgtaagacatctgaatcaggtaaaaaaaattataaatctgattgatatatttagagctaagagactccaggaaaaaaaaaatgtgtagagaaaattaaaaacaaatttaattcaaagaatatggtctattaacattttgtctgtaaaatatttcattgtagctgtatttgtgcttagaagatcttctagatttaaaaacagaaaatggcataaatcatattctcatagccacactccttcccttcctctgctcagctaaggagagggctttcttttgagacagggtctcattttgtcgcccaggctggagtgcagtggtacgatcacagctcactgcagcctctatctcctgggctcaagtgatcctcccacctcagcctcccaagtacctgtgactacaggtacacaccacctcacccggctttttcttttttctttttttttttccgagagagacgggaggtcaccatgttgcccaggttgatgtcaaactcctgggttcaagtgacccacccaccttggcctcccaaagtaagaggtcttttgggaattgtagacgtgcaatagaatatactgttccctctcatctgaaggctctaggaaaaaaagaatatactgttcttttaaaaatttaagtgaatggtggtcatgggtgcattaatgcgaaagaactgtacacttaaaaatggttaaaatggtaaatgtttaaaatggcaaatatgtatttatatattttaccacaatagagaaaatcaagtctttaaaaatgatagcccctatgtttttatgcttacctaaataaaccatatttaatatttggcatataagctaatttgatagagcaagaattgctatgtttataataagcatgttggactgaatttcatcatttattagaatgtgcatataagaaagatacttgtatttgtaggcctctgaaaaacatctaggtaggtagagagccttgactcaccttgccgaaggtcctgaagaatggaaaaaagaaaaatgaatcttcaatatcggtttttcacctcaggaaattctagtaccacaaaaatataatgttttagtaaaaacatttccattgcagtgcttatatcatgatatgaaatttaaaatccacattagccaattcattatttaaatgacccacccctgaaccctctcatagtgtacatgagctgatcatactaggaagcaagttattacacaaaacataaaacataaacttgcagaagttgtttccaaatgtaaaataatcacaatattcatgaatttctaagtcttttcatttgtttttaaacttagatgatgcctttttcattaaaagtgcctgtgctcacattta

SEQ ID NO: 17505 - protein, 271 aa, Homo sapiens; identical to SEQ ID NO: 17485

SEQ ID NO: 17506 - DNA, 6122 bp, Homo sapiens
accgccccgcgctccgctgccaggggcgggagggaggaatggttgcttcacgccccgggggaagagacgggaagctcggctctgggttgcgggccccggcgtctccgcgtggggcgcaccgtccgacccccccctcccggtgtgcagcgccccgcaccgccccgcctcgcctgggagaagccgccgggacgcgccgggctggagtgggcggttataggctttgagctaggccgtttccgggaggcggagctcagaccccatttcctttctccacatccaggtcaggtggcgtttgctgtggcggctaggcccgcgtgcgctggagacctccgcgctggcccccgcgagcctcctgccctggcccggcgctgcggctctgccgcggcggcagcatgggtggcccccggggcgcgggctgggtggcggcgggcctgctgctcggcgcgggcgcctgctactgcatttacaggctgacccggggtcggcggcggggcgaccgcgagctcgggatacgctcttcgaagtccgcaggtgccctggaagaagggacgtcagagggtcagttgtgcgggcgctcggcccggcctcagacgggaggtacctgggagtcacagtggtccaagacctcgcagcctgaagacttaactgatggttcatatgatgatgttctaaatgctgaacaacttcagaaactcctttacctgctggagtcaacggaggatcctgtaattattgaaagagctttgattactttgggtaacaatgcagccttttcagttaaccaagctattattcgtgaattgggtggtattccaattgttgcaaacaaaatcaaccattccaaccagagtattaaagagaaagctttaaatgcactaaataacctgagtgtgaatgttgaaaatcaaatcaagataaaggtgcaagttttgaaactgcttttgaatttgtctgaaaatccagccatgacagaaggacttctccgtgcccaagtggattcatcattcctttccctttatgacagccacgtagcaaaggagattcttcttcgagtacttacgctatttcagaatataaagaactgcctcaaaatagaaggccatttagctgtgcagcctactttcactgaaggttcattgtttttcctgttacatggagaagaatgtgcccagaaaataagagctttagttgatcaccatgatgcagaggtgaaggaaaaggttgtaacaataatacccaaaatctgattggtcatatttttccaaagagtaatgcagtctggatataaacgtattttctgtcttccttataaggggattctcccagctgctaaatttaaacagtaaatatcacattttgtcattaacacagctataacttgccgtggttctcagatttattttggactattttgatgccaagtgaatataagagcttgtactgaaaccatttatttctttctattttgctatttgcaaatgcttgttatcttccctacatgaagtggcagtaacctttttcacatttaagctacccttctaccttttgaagtgatttgcagttactcatctgagacagcatcagtatttgactaaatcattgtttcacaactgaatagtcttgttcttttagtagcaacgaaatcctaagctcttgaggccattcacctgccaacctgaccatactgctttcaaaagtcttttctcatcagtagaatctattttggtcacttctagtcaatgaaaaatgtaaacttttaggagagaatgtttcttaggactcacccactccattcaatgttatatataaaatagtgtgatcaatcacaatgtccatctttagacagttggttaaataaattatctggtctttgaaaagaccgtgctgggcgcggtggctcttgcctgtaatcccagcactttgggaggctgaggcgggcagatcacctgagatcgggagtttgagaccaagcctgaccaatatggagaaaccctgtctctactaagaacacaaaattagctgggcatggtggtgcatgcctgtaatcccagctacttgggaggccgaggcaggagaattgcttgaacccgggaggcagaggttgcagtgagctgagatagcgccattgcactccagcctgggcaacaagagcaaaactctgtctcaaaaaaaaaaaaaaatgatggagctccgaatgtgcttaagtggaaagatatctatgaaatatggtggttttttaaaacacaaaaattatagaatatgggatcccgtgtgtgtgtgtgtgtgtttgaatgaaaaatgcttatgtattgacagaacacttctagaatgatacccaaactcctggagtgggagtggggaatgccttctacgtacacactgttctactgtttgaattttttaatatgagcccaaattgtataatctttttttaataaaggggagaaaaatcacttacaaggttatacatattttttcccttgacagtactttattaattttcatccatattttacttgactaaaaatacaatgtatgaaaatttatctttaatagcattttccataagctactataacaatttattgatacatctgggattcagccaggtcttatagtatttaaatttataacccctgccatgcttagcattaagtaaatcagtatgcaagcagtatttaaggcaaagctttaagaatactttaaatttcatttgtaaatacatagatgcaagactgtttccataggaagtcacaaatcctcaaacagaaatatgtgtgttctcaatgttaccctgatacagaaatcaaacttggaagaaatatttttacattagaaaaaggactcagtataaggtgaaaacaaaattcccagtgggctagacatgaacaaaagtattcattccccaaaaggcacatttctttataacggttttttcaaatctacctccctatttaatgaaagcatattcattaaatatgaaactatgcatacattaaaaaccaggatttgtttttaatgtgctttagcagcagtagattctaaaactgtgtcttcttgtcctctcattagtttgaataatcacactccctagagatcagagcattgagtctgaaatgtcaaaatgctagagaaaagagggagtaatttttaactacccagaaagaagatgcacaaatacatcttttcctacgtaggtcacggcatatgttggcttttataatttgggatttctcctaattgatgacccaccctattgggcagtgaggcatagcaaagtattcctcagttatcacaggaaacttcaataaaatcttacatattgctatgggtattcacgaagaggaaaatgaagttgacttagaggataagactgattaaaagacactacaatgcatattagactgaattgaagaagagaatggatttgtcttatttttcaaaatttgttttcactttgcacataaacccttcaaaatgtagataacaaatgaaaaataaagtggaacccactcaataaggtgagattctgtaagcagagatgaagcttgatgttcttaatgaatagtgtcagtgtagaaagaacatgagtggtaataaaaaattacagcttacaaaagggcctagaaaaatgaggcaggccagacgagtggaaatagaacacaacagtttaaagtgctttgagaccctcagttaaacagtacacgtgaatacaaaataatgttaaggccattcatggagaagaaatacttaagcaagacatacctggcttgcttcatagagaagaggtaagagatggattttcaattcggcgtgcagcagcagggaatatggctacaacaacgctggctagtattagggcaacacacctcaaagctaactcaccataaacctaacatcttgattcacatctgcttggagtgaaaaagtttatgatcagtcttttcaggaaggtttattttatgggggatttttttgtgctttagtaccccaaaatcacatatgttcgcatacatcatatacacacacattgcatacacatttccccttgactgattcgcatctttgtagataaacactaaattttgataaagattatttacacttatttaggctattactccaatttaaaaatcagtgaaagttttcaatgtttagtctcctaatatataatgcttaaatttgcaacaggaacaatacattatcaaaagcattaacctgtatttagctttcaaatatacctgtctatattaggcagtgatatcttaagaaatcattttctcccttatattttctaaagtgctttaaaaactcatttaatctacacatttttcagaggtaggtcggaattatcctcttgttgcaaatgaggaaacaggcacagtgagcactggtgacttgtttcaggttacacaaaaaaatccatgatgaaagcagggtaaaagttcagatttagtggctaacgtggcaccacacatacaggtgtgcaaataaattatagagcactgcctgggtagcatttggtgtagaaaacctattttgattattttgtatgaataaagtgctgagactggattaggaatacagaatgggcctccagtggtatctaatccacctccctcccttaggaagggtcagaataatcaagtgaatacagagtccttattaggactaaatcttatgtcaactgactccccccccgccccccaaccactggcattcatactggcttaccaaaagaatcatgcttaaggttcatttaatataaaaatgtaagacatctgaatcaggtaaaaaaaattataaatctgattgatatatttagagctaagagactccaggaaaaaaaaaatgtgtagagaaaattaaaaacaaatttaattcaaagaatatggtctattaacattttgtctgtaaaatatttcattgtagctgtatttgtgcttagaagatcttctagatttaaaaacagaaaatggcataaatcatattctcatagccacactccttcccttcctctgctcagctaaggagagggctttcttttgagacagggtctcattttgtcgcccaggctggagtgcagtggtacgatcacagctcactgcagcctctatctcctgggctcaagtgatcctcccacctcagcctcccaagtacctgtgactacaggtacacaccacctcacccggctttttcttttttctttttttttttccgagagagacgggaggtcaccatgttgcccaggttgatgtcaaactcctgggttcaagtgacccacccaccttggcctcccaaagtaagaggtcttttgggaattgtagacgtgcaatagaatatactgttccctctcatctgaaggctctaggaaaaaaagaatatactgttcttttaaaaatttaagtgaatggtggtcatgggtgcattaatgcgaaagaactgtacacttaaaaatggttaaaatggtaaatgtttaaaatggcaaatatgtatttatatattttaccacaatagagaaaatcaagtctttaaaaatgatagcccctatgtttttatgcttacctaaataaaccatatttaatatttggcatataagctaatttgatagagcaagaattgctatgtttataataagcatgttggactgaatttcatcatttattagaatgtgcatataagaaagatacttgtatttgtaggcctctgaaaaacatctaggtaggtagagagccttgactcaccttgccgaaggtcctgaagaatggaaaaaagaaaaatgaatcttcaatatcggtttttcacctcaggaaattctagtaccacaaaaatataatgttttagtaaaaacatttccattgcagtgcttatatcatgatatgaaatttaaaatccacattagccaattcattatttaaatgacccacccctgaaccctctcatagtgtacatgagctgatcatactaggaagcaagttattacacaaaacataaaacataaacttgcagaagttgtttccaaatgtaaaataatcacaatattcatgaatttctaagtcttttcatttgtttttaaacttagatgatgcctttttcattaaaagtgcctgtgctcacattta

SEQ ID NO: 17507 - protein, 284 aa, Homo sapiens; identical to SEQ ID NO: 17497

SEQ ID NO: 17508 - DNA, 6299 bp, Homo sapiens
accgccccgcgctccgctgccaggggcgggagggaggaatggttgcttcacgccccgggggaagagacgggaagctcggctctgggttgcgggccccggcgtctccgcgtggggcgcaccgtccgacccccccctcccggtgtgcagcgccccgcaccgccccgcctcgcctgggagaagccgccgggacgcgccgggctggagtgggcggttataggctttgagctaggccgtttccgggaggcggagctcagaccccatttcctttctccacatccaggtcaggtggcgtttgctgtggcggctaggcccgcgtgcgctggagacctccgcgctggcccccgcgagcctcctgccctggcccggcgctgcggctctgccgcggcggcagcatgggtggcccccggggcgcgggctgggtggcggcgggcctgctgctcggcgcgggcgcctgctactgcatttacaggctgacccggggtcggcggcggggcgaccgcgagctcgggatacgctcttcgaagtccgcaggtgccctggaagaagggacgtcagagggtcagttgtgcgggcgctcggcccggcctcagacgggaggtacctgggagtcacagtggtccaagacctcgcagcctgaagacttaactgatggttcatatgatgatgttctaaatgctgaacaacttcagaaactcctttacctgctggagtcaacggaggatcctgtaattattgaaagagctttgattactttgggtaacaatgcagccttttcagttaaccaagctattattcgtgaattgggtggtattccaattgttgcaaacaaaatcaaccattccaaccagagtattaaagagaaagctttaaatgcactaaataacctgagtgtgaatgttgaaaatcaaatcaagataaagatatacatcagtcaagtatgtgaggatgtcttctctggtcctctgaactctgctgtgcagctggctggactgacattgttgacaaacatgactgttaccaatgaccaccagcacatgcttcacagttacattacagacctgttccaggtgttacttactggaaatggaaacacgaaggtgcaagttttgaaactgcttttgaatttgtctgaaaatccagccatgacagaaggacttctccgtgcccaagtggattcatcattcctttccctttatgacagccacgtagcaaaggagattcttcttcgagtacttacgctatttcagaatataaagaactgcctcaaaatagaaggccatttagctgtgcagcctactttcactgaaggttcattgtttttcctgttacatggagaagaatgtgcccagaaaataagagctttagttgatcaccatgatgcagaggtgaaggaaaaggttgtaacaataatacccaaaatctgattggtcatatttttccaaagagtaatgcagtctggatataaacgtattttctgtcttccttataaggggattctcccagctgctaaatttaaacagtaaatatcacattttgtcattaacacagctataacttgccgtggttctcagatttattttggactattttgatgccaagtgaatataagagcttgtactgaaaccatttatttctttctattttgctatttgcaaatgcttgttatcttccctacatgaagtggcagtaacctttttcacatttaagctacccttctaccttttgaagtgatttgcagttactcatctgagacagcatcagtatttgactaaatcattgtttcacaactgaatagtcttgttcttttagtagcaacgaaatcctaagctcttgaggccattcacctgccaacctgaccatactgctttcaaaagtcttttctcatcagtagaatctattttggtcacttctagtcaatgaaaaatgtaaacttttaggagagaatgtttcttaggactcacccactccattcaatgttatatataaaatagtgtgatcaatcacaatgtccatctttagacagttggttaaataaattatctggtctttgaaaagaccgtgctgggcgcggtggctcttgcctgtaatcccagcactttgggaggctgaggcgggcagatcacctgagatcgggagtttgagaccaagcctgaccaatatggagaaaccctgtctctactaagaacacaaaattagctgggcatggtggtgcatgcctgtaatcccagctacttgggaggccgaggcaggagaattgcttgaacccgggaggcagaggttgcagtgagctgagatagcgccattgcactccagcctgggcaacaagagcaaaactctgtctcaaaaaaaaaaaaaaatgatggagctccgaatgtgcttaagtggaaagatatctatgaaatatggtggttttttaaaacacaaaaattatagaatatgggatcccgtgtgtgtgtgtgtgtgtttgaatgaaaaatgcttatgtattgacagaacacttctagaatgatacccaaactcctggagtgggagtggggaatgccttctacgtacacactgttctactgtttgaattttttaatatgagcccaaattgtataatctttttttaataaaggggagaaaaatcacttacaaggttatacatattttttcccttgacagtactttattaattttcatccatattttacttgactaaaaatacaatgtatgaaaatttatctttaatagcattttccataagctactataacaatttattgatacatctgggattcagccaggtcttatagtatttaaatttataacccctgccatgcttagcattaagtaaatcagtatgcaagcagtatttaaggcaaagctttaagaatactttaaatttcatttgtaaatacatagatgcaagactgtttccataggaagtcacaaatcctcaaacagaaatatgtgtgttctcaatgttaccctgatacagaaatcaaacttggaagaaatatttttacattagaaaaaggactcagtataaggtgaaaacaaaattcccagtgggctagacatgaacaaaagtattcattccccaaaaggcacatttctttataacggttttttcaaatctacctccctatttaatgaaagcatattcattaaatatgaaactatgcatacattaaaaaccaggatttgtttttaatgtgctttagcagcagtagattctaaaactgtgtcttcttgtcctctcattagtttgaataatcacactccctagagatcagagcattgagtctgaaatgtcaaaatgctagagaaaagagggagtaatttttaactacccagaaagaagatgcacaaatacatcttttcctacgtaggtcacggcatatgttggcttttataatttgggatttctcctaattgatgacccaccctattgggcagtgaggcatagcaaagtattcctcagttatcacaggaaacttcaataaaatcttacatattgctatgggtattcacgaagaggaaaatgaagttgacttagaggataagactgattaaaagacactacaatgcatattagactgaattgaagaagagaatggatttgtcttatttttcaaaatttgttttcactttgcacataaacccttcaaaatgtagataacaaatgaaaaataaagtggaacccactcaataaggtgagattctgtaagcagagatgaagcttgatgttcttaatgaatagtgtcagtgtagaaagaacatgagtggtaataaaaaattacagcttacaaaagggcctagaaaaatgaggcaggccagacgagtggaaatagaacacaacagtttaaagtgctttgagaccctcagttaaacagtacacgtgaatacaaaataatgttaaggccattcatggagaagaaatacttaagcaagacatacctggcttgcttcatagagaagaggtaagagatggattttcaattcggcgtgcagcagcagggaatatggctacaacaacgctggctagtattagggcaacacacctcaaagctaactcaccataaacctaacatcttgattcacatctgcttggagtgaaaaagtttatgatcagtcttttcaggaaggtttattttatgggggatttttttgtgctttagtaccccaaaatcacatatgttcgcatacatcatatacacacacattgcatacacatttccccttgactgattcgcatctttgtagataaacactaaattttgataaagattatttacacttatttaggctattactccaatttaaaaatcagtgaaagttttcaatgtttagtctcctaatatataatgcttaaatttgcaacaggaacaatacattatcaaaagcattaacctgtatttagctttcaaatatacctgtctatattaggcagtgatatcttaagaaatcattttctcccttatattttctaaagtgctttaaaaactcatttaatctacacatttttcagaggtaggtcggaattatcctcttgttgcaaatgaggaaacaggcacagtgagcactggtgacttgtttcaggttacacaaaaaaatccatgatgaaagcagggtaaaagttcagatttagtggctaacgtggcaccacacatacaggtgtgcaaataaattatagagcactgcctgggtagcatttggtgtagaaaacctattttgattattttgtatgaataaagtgctgagactggattaggaatacagaatgggcctccagtggtatctaatccacctccctcccttaggaagggtcagaataatcaagtgaatacagagtccttattaggactaaatcttatgtcaactgactccccccccgccccccaaccactggcattcatactggcttaccaaaagaatcatgcttaaggttcatttaatataaaaatgtaagacatctgaatcaggtaaaaaaaattataaatctgattgatatatttagagctaagagactccaggaaaaaaaaaatgtgtagagaaaattaaaaacaaatttaattcaaagaatatggtctattaacattttgtctgtaaaatatttcattgtagctgtatttgtgcttagaagatcttctagatttaaaaacagaaaatggcataaatcatattctcatagccacactccttcccttcctctgctcagctaaggagagggctttcttttgagacagggtctcattttgtcgcccaggctggagtgcagtggtacgatcacagctcactgcagcctctatctcctgggctcaagtgatcctcccacctcagcctcccaagtacctgtgactacaggtacacaccacctcacccggctttttcttttttctttttttttttccgagagagacgggaggtcaccatgttgcccaggttgatgtcaaactcctgggttcaagtgacccacccaccttggcctcccaaagtaagaggtcttttgggaattgtagacgtgcaatagaatatactgttccctctcatctgaaggctctaggaaaaaaagaatatactgttcttttaaaaatttaagtgaatggtggtcatgggtgcattaatgcgaaagaactgtacacttaaaaatggttaaaatggtaaatgtttaaaatggcaaatatgtatttatatattttaccacaatagagaaaatcaagtctttaaaaatgatagcccctatgtttttatgcttacctaaataaaccatatttaatatttggcatataagctaatttgatagagcaagaattgctatgtttataataagcatgttggactgaatttcatcatttattagaatgtgcatataagaaagatacttgtatttgtaggcctctgaaaaacatctaggtaggtagagagccttgactcaccttgccgaaggtcctgaagaatggaaaaaagaaaaatgaatcttcaatatcggtttttcacctcaggaaattctagtaccacaaaaatataatgttttagtaaaaacatttccattgcagtgcttatatcatgatatgaaatttaaaatccacattagccaattcattatttaaatgacccacccctgaaccctctcatagtgtacatgagctgatcatactaggaagcaagttattacacaaaacataaaacataaacttgcagaagttgtttccaaatgtaaaataatcacaatattcatgaatttctaagtcttttcatttgtttttaaacttagatgatgcctttttcattaaaagtgcctgtgctcacattta

SEQ ID NO: 17509 - protein, 343 aa, Homo sapiens; identical to SEQ ID NO: 2080

SEQ ID NO: 17510 - DNA, 6194 bp, Homo sapiens
accgccccgcgctccgctgccaggggcgggagggaggaatggttgcttcacgccccgggggaagagacgggaagctcggctctgggttgcgggccccggcgtctccgcgtggggcgcaccgtccgacccccccctcccggtgtgcagcgccccgcaccgccccgcctcgcctgggagaagccgccgggacgcgccgggctggagtgggcggttataggctttgagctaggccgtttccgggaggcggagctcagaccccatttcctttctccacatccaggtcaggtggcgtttgctgtggcggctaggcccgcgtgcgctggagacctccgcgctggcccccgcgagcctcctgccctggcccggcgctgcggctctgccgcggcggcagcatgggtggcccccggggcgcgggctgggtggcggcgggcctgctgctcggcgcgggcgcctgctactgcatttacaggctgacccggggtcggcggcggggcgaccgcgagctcgggatacgctcttcgaagtccgcagaagacttaactgatggttcatatgatgatgttctaaatgctgaacaacttcagaaactcctttacctgctggagtcaacggaggatcctgtaattattgaaagagctttgattactttgggtaacaatgcagccttttcagttaaccaagctattattcgtgaattgggtggtattccaattgttgcaaacaaaatcaaccattccaaccagagtattaaagagaaagctttaaatgcactaaataacctgagtgtgaatgttgaaaatcaaatcaagataaagatatacatcagtcaagtatgtgaggatgtcttctctggtcctctgaactctgctgtgcagctggctggactgacattgttgacaaacatgactgttaccaatgaccaccagcacatgcttcacagttacattacagacctgttccaggtgttacttactggaaatggaaacacgaaggtgcaagttttgaaactgcttttgaatttgtctgaaaatccagccatgacagaaggacttctccgtgcccaagtggattcatcattcctttccctttatgacagccacgtagcaaaggagattcttcttcgagtacttacgctatttcagaatataaagaactgcctcaaaatagaaggccatttagctgtgcagcctactttcactgaaggttcattgtttttcctgttacatggagaagaatgtgcccagaaaataagagctttagttgatcaccatgatgcagaggtgaaggaaaaggttgtaacaataatacccaaaatctgattggtcatatttttccaaagagtaatgcagtctggatataaacgtattttctgtcttccttataaggggattctcccagctgctaaatttaaacagtaaatatcacattttgtcattaacacagctataacttgccgtggttctcagatttattttggactattttgatgccaagtgaatataagagcttgtactgaaaccatttatttctttctattttgctatttgcaaatgcttgttatcttccctacatgaagtggcagtaacctttttcacatttaagctacccttctaccttttgaagtgatttgcagttactcatctgagacagcatcagtatttgactaaatcattgtttcacaactgaatagtcttgttcttttagtagcaacgaaatcctaagctcttgaggccattcacctgccaacctgaccatactgctttcaaaagtcttttctcatcagtagaatctattttggtcacttctagtcaatgaaaaatgtaaacttttaggagagaatgtttcttaggactcacccactccattcaatgttatatataaaatagtgtgatcaatcacaatgtccatctttagacagttggttaaataaattatctggtctttgaaaagaccgtgctgggcgcggtggctcttgcctgtaatcccagcactttgggaggctgaggcgggcagatcacctgagatcgggagtttgagaccaagcctgaccaatatggagaaaccctgtctctactaagaacacaaaattagctgggcatggtggtgcatgcctgtaatcccagctacttgggaggccgaggcaggagaattgcttgaacccgggaggcagaggttgcagtgagctgagatagcgccattgcactccagcctgggcaacaagagcaaaactctgtctcaaaaaaaaaaaaaaatgatggagctccgaatgtgcttaagtggaaagatatctatgaaatatggtggttttttaaaacacaaaaattatagaatatgggatcccgtgtgtgtgtgtgtgtgtttgaatgaaaaatgcttatgtattgacagaacacttctagaatgatacccaaactcctggagtgggagtggggaatgccttctacgtacacactgttctactgtttgaattttttaatatgagcccaaattgtataatctttttttaataaaggggagaaaaatcacttacaaggttatacatattttttcccttgacagtactttattaattttcatccatattttacttgactaaaaatacaatgtatgaaaatttatctttaatagcattttccataagctactataacaatttattgatacatctgggattcagccaggtcttatagtatttaaatttataacccctgccatgcttagcattaagtaaatcagtatgcaagcagtatttaaggcaaagctttaagaatactttaaatttcatttgtaaatacatagatgcaagactgtttccataggaagtcacaaatcctcaaacagaaatatgtgtgttctcaatgttaccctgatacagaaatcaaacttggaagaaatatttttacattagaaaaaggactcagtataaggtgaaaacaaaattcccagtgggctagacatgaacaaaagtattcattccccaaaaggcacatttctttataacggttttttcaaatctacctccctatttaatgaaagcatattcattaaatatgaaactatgcatacattaaaaaccaggatttgtttttaatgtgctttagcagcagtagattctaaaactgtgtcttcttgtcctctcattagtttgaataatcacactccctagagatcagagcattgagtctgaaatgtcaaaatgctagagaaaagagggagtaatttttaactacccagaaagaagatgcacaaatacatcttttcctacgtaggtcacggcatatgttggcttttataatttgggatttctcctaattgatgacccaccctattgggcagtgaggcatagcaaagtattcctcagttatcacaggaaacttcaataaaatcttacatattgctatgggtattcacgaagaggaaaatgaagttgacttagaggataagactgattaaaagacactacaatgcatattagactgaattgaagaagagaatggatttgtcttatttttcaaaatttgttttcactttgcacataaacccttcaaaatgtagataacaaatgaaaaataaagtggaacccactcaataaggtgagattctgtaagcagagatgaagcttgatgttcttaatgaatagtgtcagtgtagaaagaacatgagtggtaataaaaaattacagcttacaaaagggcctagaaaaatgaggcaggccagacgagtggaaatagaacacaacagtttaaagtgctttgagaccctcagttaaacagtacacgtgaatacaaaataatgttaaggccattcatggagaagaaatacttaagcaagacatacctggcttgcttcatagagaagaggtaagagatggattttcaattcggcgtgcagcagcagggaatatggctacaacaacgctggctagtattagggcaacacacctcaaagctaactcaccataaacctaacatcttgattcacatctgcttggagtgaaaaagtttatgatcagtcttttcaggaaggtttattttatgggggatttttttgtgctttagtaccccaaaatcacatatgttcgcatacatcatatacacacacattgcatacacatttccccttgactgattcgcatctttgtagataaacactaaattttgataaagattatttacacttatttaggctattactccaatttaaaaatcagtgaaagttttcaatgtttagtctcctaatatataatgcttaaatttgcaacaggaacaatacattatcaaaagcattaacctgtatttagctttcaaatatacctgtctatattaggcagtgatatcttaagaaatcattttctcccttatattttctaaagtgctttaaaaactcatttaatctacacatttttcagaggtaggtcggaattatcctcttgttgcaaatgaggaaacaggcacagtgagcactggtgacttgtttcaggttacacaaaaaaatccatgatgaaagcagggtaaaagttcagatttagtggctaacgtggcaccacacatacaggtgtgcaaataaattatagagcactgcctgggtagcatttggtgtagaaaacctattttgattattttgtatgaataaagtgctgagactggattaggaatacagaatgggcctccagtggtatctaatccacctccctcccttaggaagggtcagaataatcaagtgaatacagagtccttattaggactaaatcttatgtcaactgactccccccccgccccccaaccactggcattcatactggcttaccaaaagaatcatgcttaaggttcatttaatataaaaatgtaagacatctgaatcaggtaaaaaaaattataaatctgattgatatatttagagctaagagactccaggaaaaaaaaaatgtgtagagaaaattaaaaacaaatttaattcaaagaatatggtctattaacattttgtctgtaaaatatttcattgtagctgtatttgtgcttagaagatcttctagatttaaaaacagaaaatggcataaatcatattctcatagccacactccttcccttcctctgctcagctaaggagagggctttcttttgagacagggtctcattttgtcgcccaggctggagtgcagtggtacgatcacagctcactgcagcctctatctcctgggctcaagtgatcctcccacctcagcctcccaagtacctgtgactacaggtacacaccacctcacccggctttttcttttttctttttttttttccgagagagacgggaggtcaccatgttgcccaggttgatgtcaaactcctgggttcaagtgacccacccaccttggcctcccaaagtaagaggtcttttgggaattgtagacgtgcaatagaatatactgttccctctcatctgaaggctctaggaaaaaaagaatatactgttcttttaaaaatttaagtgaatggtggtcatgggtgcattaatgcgaaagaactgtacacttaaaaatggttaaaatggtaaatgtttaaaatggcaaatatgtatttatatattttaccacaatagagaaaatcaagtctttaaaaatgatagcccctatgtttttatgcttacctaaataaaccatatttaatatttggcatataagctaatttgatagagcaagaattgctatgtttataataagcatgttggactgaatttcatcatttattagaatgtgcatataagaaagatacttgtatttgtaggcctctgaaaaacatctaggtaggtagagagccttgactcaccttgccgaaggtcctgaagaatggaaaaaagaaaaatgaatcttcaatatcggtttttcacctcaggaaattctagtaccacaaaaatataatgttttagtaaaaacatttccattgcagtgcttatatcatgatatgaaatttaaaatccacattagccaattcattatttaaatgacccacccctgaaccctctcatagtgtacatgagctgatcatactaggaagcaagttattacacaaaacataaaacataaacttgcagaagttgtttccaaatgtaaaataatcacaatattcatgaatttctaagtcttttcatttgtttttaaacttagatgatgcctttttcattaaaagtgcctgtgctcacattta

SEQ ID NO: 17511 - protein, 308 aa, Homo sapiens; identical to SEQ ID NO: 17501

SEQ ID NO: 17512 - DNA, 896 bp, Homo sapiens
tccgctgccaggggcgggagggaggaatggttgcttcacgccccgggggaagagacgggaagctcggctctgggttgcgggccccggcgtctccgcgtggggcgcaccgtccgacccccccctcccggtgtgcagcgccccgcaccgccccgcctcgcctgggagaagccgccgggacgcgccgggctggagtgggcggttataggctttgagctaggccgtttccgggaggcggagctcagaccccatttcctttctccacatccaggtcaggtggcgtttgctgtggcggctaggcccgcgtgcgctggagacctccgcgctggcccccgcgagcctcctgccctggcccggcgctgcggctctgccgcggcggcagcatgggtggcccccggggcgcgggctgggtggcggcgggcctgctgctcggcgcgggcgcctgctactgcatttacaggctgacccggggtcggcggcggggcgaccgcgagctcgggatacgctcttcgaagtccgcagatgagaaaactgagacccccaaaaatagtaagtgttcattggatgggtgtacctcgtttttaaaaggagaagcaaaatgttatcagcatttgagaagacttaactgatggttcatatgatgatgttctaaatgctgaacaacttcagaaactcctttacctgctggagtcaacggaggatcctgtaattattgaaagagctttgattactttgggtaacaatgcagccttttcagttaaccaagtaagtacctcaactcagcaagcaagctctttccattcttacacactagcggtaattgtgaccctgaataaattacttaacctctcagaccctcaatttcctcatctgtgcaatgtggctacttatacttaaaa

SEQ ID NO: 17513 - protein, 81 aa, Homo sapiens
MGGPRGAGWVAAGLLLGAGACYCIYRLTRGRRRGDRELGIRSSKSADEKTETPKNSKCSLDGCTSFLKGEAKCYQHLRRLN

SEQ ID NO: 17514 - DNA, 1435 bp, Homo sapiens
tccgctgccaggggcgggagggaggaatggttgcttcacgccccgggggaagagacgggaagctcggctctgggttgcgggccccggcgtctccgcgtggggcgcaccgtccgacccccccctcccggtgtgcagcgccccgcaccgccccgcctcgcctgggagaagccgccgggacgcgccgggctggagtgggcggttataggctttgagctaggccgtttccgggaggcggagctcagaccccatttcctttctccacatccaggtcaggtggcgtttgctgtggcggctaggcccgcgtgcgctggagacctccgcgctggcccccgcgagcctcctgccctggcccggcgctgcggctctgccgcggcggcagcatgggtggcccccggggcgcgggctgggtggcggcgggcctgctgctcggcgcgggcgcctgctactgcatttacaggctgacccggggtcggcggcggggcgaccgcgagctcgggatacgctcttcgaagtccgcagaagacttaactgatggttcatatgatgatgttctaaatgctgaacaacttcagaaactcctttacctgctggagtcaacggaggatcctgtaattattgaaagagctttgattactttgggtaacaatgcagccttttcagttaaccaagctattattcgtgaattgggtggtattccaattgttgcaaacaaaatcaaccattccaaccagagtattaaagagaaagctttaaatgcactaaataacctgagtgtgaatgttgaaaatcaaatcaagataaagatatacatcagtcaagtatgtgaggatgtcttctctggtcctctgaactctgctgtgcagctggctggactgacattgttgacaaacatgactgttaccaatgaccaccagcacatgcttcacagttacattacagacctgttccaggtgttacttactggaaatggaaacacgaaggtgcaagttttgaaactgcttttgaatttgtctgaaaatccagccatgacagaaggacttctccgtgcccaagtggattcatcattcctttccctttatgacagccacgtagcaaaggagattcttcttcgagtacttacgctatttcagaatataaagaactgcctcaaaatagaaggccatttagctgtgcagcctactttcactgaaggttcattgtttttcctgttacatggagaagaatgtgcccagaaaataagagctttagttgatcaccatgatgcagaggtgaaggaaaaggttgtaacaataatacccaaaatctgattggtcatatttttccaaagagtaatgcagtctggatataaacgtattttctgtcttccttataaggggattctcccagctgctaaatttaaacagtaaatatcacattttgtcattaacacagctat

SEQ ID NO: 17515 - protein, 308 aa, Homo sapiens; identical to SEQ ID NO: 17501

SEQ ID NO: 17516 - DNA, 1496 bp, Homo sapiens
tccgctgccaggggcgggagggaggaatggttgcttcacgccccgggggaagagacgggaagctcggctctgggttgcgggccccggcgtctccgcgtggggcgcaccgtccgacccccccctcccggtgtgcagcgccccgcaccgccccgcctcgcctgggagaagccgccgggacgcgccgggctggagtgggcggttataggctttgagctaggccgtttccgggaggcggagctcagaccccatttcctttctccacatccaggtcaggtggcgtttgctgtggcggctaggcccgcgtgcgctggagacctccgcgctggcccccgcgagcctcctgccctggcccggcgctgcggctctgccgcggcggcagcatgggtggcccccggggcgcgggctgggtggcggcgggcctgctgctcggcgcgggcgcctgctactgcatttacaggctgacccggggtcggcggcggggcgaccgcgagctcgggatacgctcttcgaagtccgcagaagacttaactgatggttcatatgatgatgttctaaatgctgaacaacttcagaaactcctttacctgctggagtcaacggaggatcctgtaattattgaaagagctttgattactttgggtaacaatgcagccttttcagttaaccaagctattattcgtgaattgggtggtattccaattgttgcaaacaaaatcaaccattccaaccagagtattaaagagaaagctttaaatgcactaaataacctgagtgtgaatgttgaaaatcaaatcaagataaaggtgcaagttttgaaactgcttttgaatttgtctgaaaatccagccatgacagaaggacttctccgtgcccaagtggattcatcattcctttccctttatgacagccacgtagcaaaggagattcttcttcgagtacttacgctatttcagaatataaagaactgcctcaaaatagaaggccatttagctgtgcagcctactttcactgaaggttcattgtttttcctgttacatggagaagaatgtgcccagaaaataagagctttagttgatcaccatgatgcagaggtgaaggaaaaggttgtaacaataatacccaaaatctgattggtcatatttttccaaagagtaatgcagtctggatataaacgtattttctgtcttccttataaggggattctcccagctgctaaatttaaacagtaaatatcacattttgtcattaacacagctataacttgccgtggttctcagatttattttggactattttgatgccaagtgaatataagagcttgtactgaaaccatttatttctttctattttgctatttgcaaatgcttgttatcttccctacatgaagtggcagtaacctttttcacatttaagctacccttctaccttttgaagtgatttgcagttactcatctgagacagcatcagtatttgactaaatcattgtttcacaactg

SEQ ID NO: 17517 - protein, 249 aa, Homo sapiens; identical to SEQ ID NO: 17493

SEQ ID NO: 17518 - DNA, 1673 bp, Homo sapiens
tccgctgccaggggcgggagggaggaatggttgcttcacgccccgggggaagagacgggaagctcggctctgggttgcgggccccggcgtctccgcgtggggcgcaccgtccgacccccccctcccggtgtgcagcgccccgcaccgccccgcctcgcctgggagaagccgccgggacgcgccgggctggagtgggcggttataggctttgagctaggccgtttccgggaggcggagctcagaccccatttcctttctccacatccaggtcaggtggcgtttgctgtggcggctaggcccgcgtgcgctggagacctccgcgctggcccccgcgagcctcctgccctggcccggcgctgcggctctgccgcggcggcagcatgggtggcccccggggcgcgggctgggtggcggcgggcctgctgctcggcgcgggcgcctgctactgcatttacaggctgacccggggtcggcggcggggcgaccgcgagctcgggatacgctcttcgaagtccgcagaagacttaactgatggttcatatgatgatgttctaaatgctgaacaacttcagaaactcctttacctgctggagtcaacggaggatcctgtaattattgaaagagctttgattactttgggtaacaatgcagccttttcagttaaccaagctattattcgtgaattgggtggtattccaattgttgcaaacaaaatcaaccattccaaccagagtattaaagagaaagctttaaatgcactaaataacctgagtgtgaatgttgaaaatcaaatcaagataaagatatacatcagtcaagtatgtgaggatgtcttctctggtcctctgaactctgctgtgcagctggctggactgacattgttgacaaacatgactgttaccaatgaccaccagcacatgcttcacagttacattacagacctgttccaggtgttacttactggaaatggaaacacgaaggtgcaagttttgaaactgcttttgaatttgtctgaaaatccagccatgacagaaggacttctccgtgcccaagtggattcatcattcctttccctttatgacagccacgtagcaaaggagattcttcttcgagtacttacgctatttcagaatataaagaactgcctcaaaatagaaggccatttagctgtgcagcctactttcactgaaggttcattgtttttcctgttacatggagaagaatgtgcccagaaaataagagctttagttgatcaccatgatgcagaggtgaaggaaaaggttgtaacaataatacccaaaatctgattggtcatatttttccaaagagtaatgcagtctggatataaacgtattttctgtcttccttataaggggattctcccagctgctaaatttaaacagtaaatatcacattttgtcattaacacagctataacttgccgtggttctcagatttattttggactattttgatgccaagtgaatataagagcttgtactgaaaccatttatttctttctattttgctatttgcaaatgcttgttatcttccctacatgaagtggcagtaacctttttcacatttaagctacccttctaccttttgaagtgatttgcagttactcatctgagacagcatcagtatttgactaaatcattgtttcacaactg

SEQ ID NO: 17519 - protein, 308 aa, Homo sapiens; identical to SEQ ID NO: 17501

SEQ ID NO: 17520 - DNA, 445 bp, Homo sapiens
agctggctggactgacattgttgacaaacatgactgttaccaatgaccaccagcacatgcttcacagttacattacagacctgttccaggtgttacttactggaaatggaaacacgaaggtgcaagttttgaaactgcttttgaatttgtctgaaaatccagccatgacagaaggacttctccgtgcccaagtggattcatcattcctttccctttatgacagccacgtagcaaaggagattcttcttcgagtacttacgctatttcatgatgcagaggtgaaggaaaaggttgtaacaataatacccaaaatctgattggtcatatttttccaaagagtaatgcagtctggatataaacgtattttctgtcttccttataaggggattctcccagctgctaaatttaaacagtaaatatcacattttgtcattaacacagctat

SEQ ID NO: 17521 - protein, 95 aa, Homo sapiens
MTVTNDHQHMLHSYITDLFQVLLTGNGNTKVQVLKLLLNLSENPAMTEGLLRAQVDSSFLSLYDSHVAKEILLRVLTLFHDAEVKEKVVTIIPKI

SEQ ID NO: 17522 - DNA, 2243 bp, Homo sapiens
atatacaccatggaatactatgcagccataaaaaatgatgagttcatgtcctttgtagggacatggacaaaattggaaatcatcattctcagtaaactatcgcaagaacaaaaaaccaaacactgtatattctcactcataggtgggaattgaacaatgagaacacatggacacaggaaggggaacatcacactctggggactgttgtggggtggggggaggggggagggatagcattgggagatatacctaatgctagatgacgagttagtgggtgcagtgcaccagcatggcacaagtatacatatgtaactaacctgcacattgtgcacatgtaccctaaaacttaagaataataattaataaattaaaaagaggcattctatttgagtcttgttattactgacttttcagttataagtgataagaatgctgatattttagctagtcacccattagataacatttatttgcttattatttatatcattgctgggcatggtggctcattgcctgtaatcctagttactttgggaggccaaagtgagaggattgcttgaggccaggagttcaagaccagcttcagcaatatagtgagacccccatctcaatcaatcaaccgatctatcagtttttatcactgtgcttatttatatgattgtaaaacactttcacattaaaagataacctcaaaaattcatggtagcttaccaaaaggggccatattgttatttatttagtcttggtaaccaaacagttccaaaatttttactgtttaagtagaaatgagctgagctttgagagatttttttgttgttgttttaaagattatatttctttatttcttttttgtcgggggtgaagatggggtctaagggtctcactatattgcccaggctggagtgcagtggctgttcacaggcacaatcatagcttactacatccttgaacttgaacatccttgagatgggaaggctcaagagatcctcccccgctcagcttcccaagtacctaggactacaggccgacaccatcatgcctggccatacttcacttaccagtaatcataatgaagatcgtgtatttaacagatgttaagcttaccaactgttcagatgtgcatgtgaattgggggtagattgtgaagacatttgcaatattctatctccctgacattataattgggaaaaattaggtttaaataaccgtgtgatagaaaacctgtatctctgtgataagttctctaagagtggtacaagacatttgcaatattctctctatctccctaacgatgtaattggaaaaatgaggtttaaataacactgttctatgataggttctctaagagtgctgccaagtgttataagagttcagaatgagacctttaaagtagaatgaacggagaaggtttcctggagtagagagaatttgagccaggcctggaagcttaggcaggactttaacaggaagacatggtgagagaacagcatgcctgagagagaaaattcatgcttgccagtctgagataagccagtatcatcttctttcaggtgcaagttttgaaactgcttttgaatttgtctgaaaatccagccatgacagaaggacttctccgtgcccaagtggattcatcattcctttccctttatgacagccacgtagcaaaggagattcttcttcgagtacttacgctatttcagaatataaagaactgcctcaaaatagaaggccatttagctgtgcagcctactttcactgaaggttcattgtttttcctgttacatggagaagaatgtgcccagaaaataagagctttagttgatcaccatgatgcagaggtgaaggaaaaggttgtaacaataatacccaaaatctgattggtcatatttttccaaagagtaatgcagtctggatataaacgtattttctgtcttccttataaggggattctcccagctgctaaatttaaacagtaaatatcacattttgtcattaacacagctataacttgccgtggttctcagatttattttggactattttgatgccaagtgaatataagagcttgtactgaaaccatttatttctttctattttgctatttgcaaatgcttgttatcttccctacatgaagtggcagtaacctttttcacatttaagctacccttctaccttttgaagtgatttgcagttactcatctgagacagcatcagtatttgactaaatcattgtttcacaactg

SEQ ID NO: 17523 - protein, 93 aa, Homo sapiens [sequence omitted]

SEQ ID NO: 17524 - DNA, 3086 bp, Homo sapiens
atatacaccatggaatactatgcagccataaaaaatgatgagttcatgtcctttgtagggacatggacaaaattggaaatcatcattctcagtaaactatcgcaagaacaaaaaaccaaacactgtatattctcactcataggtgggaattgaacaatgagaacacatggacacaggaaggggaacatcacactctggggactgttgtggggtggggggaggggggagggatagcattgggagatatacctaatgctagatgacgagttagtgggtgcagtgcaccagcatggcacaagtatacatatgtaactaacctgcacattgtgcacatgtaccctaaaacttaagaataataattaataaattaaaaagaggcattctatttgagtcttgttattactgacttttcagttataagtgataagaatgctgatattttagctagtcacccattagataacatttatttgcttattatttatatcattgctgggcatggtggctcattgcctgtaatcctagttactttgggaggccaaagtgagaggattgcttgaggccaggagttcaagaccagcttcagcaatatagtgagacccccatctcaatcaatcaaccgatctatcagtttttatcactgtgcttatttatatgattgtaaaacactttcacattaaaagataacctcaaaaattcatggtagcttaccaaaaggggccatattgttatttatttagtcttggtaaccaaacagttccaaaatttttactgtttaagtagaaatgagctgagctttgagagatttttttgttgttgttttaaagattatatttctttatttcttttttgtcgggggtgaagatggggtctaagggtctcactatattgcccaggctggagtgcagtggctgttcacaggcacaatcatagcttactacatccttgaacttgaacatccttgagatgggaaggctcaagagatcctcccccgctcagcttcccaagtacctaggactacaggccgacaccatcatgcctggccatacttcacttaccagtaatcataatgaagatcgtgtatttaacagatgttaagcttaccaactgttcagatgtgcatgtgaattgggggtagattgtgaagacatttgcaatattctatctccctgacattataattgggaaaaattaggtttaaataaccgtgtgatagaaaacctgtatctctgtgataagttctctaagagtggtacaagacatttgcaatattctctctatctccctaacgatgtaattggaaaaatgaggtttaaataacactgttctatgataggttctctaagagtgctgccaagtgttataagagttcagaatgagacctttaaagtagaatgaacggagaaggtttcctggagtagagagaatttgagccaggcctggaagcttaggcaggactttaacaggaagacatggtgagagaacagcatgcctgagagagaaaattcatgcttgccagtctgagataagccagtatcatcttctttcaggtgcaagttttgaaactgcttttgaatttgtctgaaaatccagccatgacagaaggacttctccgtgcccaagtggattcatcattcctttccctttatgacagccacgtagcaaaggagattcttcttcgagtacttacgctatttcagaatataaagaactgcctcaaaatagaaggccatttagctgtgcagcctactttcactgaaggttcattgtttttcctgttacatggagaagaatgtgcccagaaaataagagctttagttgatcaccatgatgcagaggtgaaggaaaaggttgtaacaataatacccaaaatctgattggtcatatttttccaaagagtaatgcagtctggatataaacgtattttctgtcttccttataaggggattctcccagctgctaaatttaaacagtaaatatcacattttgtcattaacacagctataacttgccgtggttctcagatttattttggactattttgatgccaagtgaatataagagcttgtactgaaaccatttatttctttctattttgctatttgcaaatgcttgttatcttccctacatgaagtggcagtaacctttttcacatttaagctacccttctaccttttgaagtgatttgcagttactcatctgagacagcatcagtatttgactaaatcattgtttcacaactgaatagtcttgttcttttagtagcaacgaaatcctaagctcttgaggccattcacctgccaacctgaccatactgctttcaaaagtcttttctcatcagtagaatctattttggtcacttctagtcaatgaaaaatgtaaacttttaggagagaatgtttcttaggactcacccactccattcaatgttatatataaaatagtgtgatcaatcacaatgtccatctttagacagttggttaaataaattatctggtctttgaaaagaccgtgctgggcgcggtggctcttgcctgtaatcccagcactttgggaggctgaggcgggcagatcacctgagatcgggagtttgagaccaagcctgaccaatatggagaaaccctgtctctactaagaacacaaaattagctgggcatggtggtgcatgcctgtaatcccagctacttgggaggccgaggcaggagaattgcttgaacccgggaggcagaggttgcagtgagctgagatagcgccattgcactccagcctgggcaacaagagcaaaactctgtctcaaaaaaaaaaaaaaatgatggagctccgaatgtgcttaagtggaaagatatctatgaaatatggtggttttttaaaacacaaaaattatagaatatgggatcccgtgtgtgtgtgtgtgtgtttgaatgaaaaatgcttatgtattgacagaacacttctagaatgatacccaaactcctggagtgggagtggggaatgccttctacgtacacactgttctactgtttgaattttttaatatgagcccaaattgtataatctttttttaataaaggggagaaaaatcactt

SEQ ID NO: 17525 - protein, 93 aa, Homo sapiens [sequence omitted]

SEQ ID NO: 17526 - DNA, 6752 bp, Homo sapiens
atatacaccatggaatactatgcagccataaaaaatgatgagttcatgtcctttgtagggacatggacaaaattggaaatcatcattctcagtaaactatcgcaagaacaaaaaaccaaacactgtatattctcactcataggtgggaattgaacaatgagaacacatggacacaggaaggggaacatcacactctggggactgttgtggggtggggggaggggggagggatagcattgggagatatacctaatgctagatgacgagttagtgggtgcagtgcaccagcatggcacaagtatacatatgtaactaacctgcacattgtgcacatgtaccctaaaacttaagaataataattaataaattaaaaagaggcattctatttgagtcttgttattactgacttttcagttataagtgataagaatgctgatattttagctagtcacccattagataacatttatttgcttattatttatatcattgctgggcatggtggctcattgcctgtaatcctagttactttgggaggccaaagtgagaggattgcttgaggccaggagttcaagaccagcttcagcaatatagtgagacccccatctcaatcaatcaaccgatctatcagtttttatcactgtgcttatttatatgattgtaaaacactttcacattaaaagataacctcaaaaattcatggtagcttaccaaaaggggccatattgttatttatttagtcttggtaaccaaacagttccaaaatttttactgtttaagtagaaatgagctgagctttgagagatttttttgttgttgttttaaagattatatttctttatttcttttttgtcgggggtgaagatggggtctaagggtctcactatattgcccaggctggagtgcagtggctgttcacaggcacaatcatagcttactacatccttgaacttgaacatccttgagatgggaaggctcaagagatcctcccccgctcagcttcccaagtacctaggactacaggccgacaccatcatgcctggccatacttcacttaccagtaatcataatgaagatcgtgtatttaacagatgttaagcttaccaactgttcagatgtgcatgtgaattgggggtagattgtgaagacatttgcaatattctatctccctgacattataattgggaaaaattaggtttaaataaccgtgtgatagaaaacctgtatctctgtgataagttctctaagagtggtacaagacatttgcaatattctctctatctccctaacgatgtaattggaaaaatgaggtttaaataacactgttctatgataggttctctaagagtgctgccaagtgttataagagttcagaatgagacctttaaagtagaatgaacggagaaggtttcctggagtagagagaatttgagccaggcctggaagcttaggcaggactttaacaggaagacatggtgagagaacagcatgcctgagagagaaaattcatgcttgccagtctgagataagccagtatcatcttctttcaggtgcaagttttgaaactgcttttgaatttgtctgaaaatccagccatgacagaaggacttctccgtgcccaagtggattcatcattcctttccctttatgacagccacgtagcaaaggagattcttcttcgagtacttacgctatttcagaatataaagaactgcctcaaaatagaaggccatttagctgtgcagcctactttcactgaaggttcattgtttttcctgttacatggagaagaatgtgcccagaaaataagagctttagttgatcaccatgatgcagaggtgaaggaaaaggttgtaacaataatacccaaaatctgattggtcatatttttccaaagagtaatgcagtctggatataaacgtattttctgtcttccttataaggggattctcccagctgctaaatttaaacagtaaatatcacattttgtcattaacacagctataacttgccgtggttctcagatttattttggactattttgatgccaagtgaatataagagcttgtactgaaaccatttatttctttctattttgctatttgcaaatgcttgttatcttccctacatgaagtggcagtaacctttttcacatttaagctacccttctaccttttgaagtgatttgcagttactcatctgagacagcatcagtatttgactaaatcattgtttcacaactgaatagtcttgttcttttagtagcaacgaaatcctaagctcttgaggccattcacctgccaacctgaccatactgctttcaaaagtcttttctcatcagtagaatctattttggtcacttctagtcaatgaaaaatgtaaacttttaggagagaatgtttcttaggactcacccactccattcaatgttatatataaaatagtgtgatcaatcacaatgtccatctttagacagttggttaaataaattatctggtctttgaaaagaccgtgctgggcgcggtggctcttgcctgtaatcccagcactttgggaggctgaggcgggcagatcacctgagatcgggagtttgagaccaagcctgaccaatatggagaaaccctgtctctactaagaacacaaaattagctgggcatggtggtgcatgcctgtaatcccagctacttgggaggccgaggcaggagaattgcttgaacccgggaggcagaggttgcagtgagctgagatagcgccattgcactccagcctgggcaacaagagcaaaactctgtctcaaaaaaaaaaaaaaatgatggagctccgaatgtgcttaagtggaaagatatctatgaaatatggtggttttttaaaacacaaaaattatagaatatgggatcccgtgtgtgtgtgtgtgtgtttgaatgaaaaatgcttatgtattgacagaacacttctagaatgatacccaaactcctggagtgggagtggggaatgccttctacgtacacactgttctactgtttgaattttttaatatgagcccaaattgtataatctttttttaataaaggggagaaaaatcacttacaaggttatacatattttttcccttgacagtactttattaattttcatccatattttacttgactaaaaatacaatgtatgaaaatttatctttaatagcattttccataagctactataacaatttattgatacatctgggattcagccaggtcttatagtatttaaatttataacccctgccatgcttagcattaagtaaatcagtatgcaagcagtatttaaggcaaagctttaagaatactttaaatttcatttgtaaatacatagatgcaagactgtttccataggaagtcacaaatcctcaaacagaaatatgtgtgttctcaatgttaccctgatacagaaatcaaacttggaagaaatatttttacattagaaaaaggactcagtataaggtgaaaacaaaattcccagtgggctagacatgaacaaaagtattcattccccaaaaggcacatttctttataacggttttttcaaatctacctccctatttaatgaaagcatattcattaaatatgaaactatgcatacattaaaaaccaggatttgtttttaatgtgctttagcagcagtagattctaaaactgtgtcttcttgtcctctcattagtttgaataatcacactccctagagatcagagcattgagtctgaaatgtcaaaatgctagagaaaagagggagtaatttttaactacccagaaagaagatgcacaaatacatcttttcctacgtaggtcacggcatatgttggcttttataatttgggatttctcctaattgatgacccaccctattgggcagtgaggcatagcaaagtattcctcagttatcacaggaaacttcaataaaatcttacatattgctatgggtattcacgaagaggaaaatgaagttgacttagaggataagactgattaaaagacactacaatgcatattagactgaattgaagaagagaatggatttgtcttatttttcaaaatttgttttcactttgcacataaacccttcaaaatgtagataacaaatgaaaaataaagtggaacccactcaataaggtgagattctgtaagcagagatgaagcttgatgttcttaatgaatagtgtcagtgtagaaagaacatgagtggtaataaaaaattacagcttacaaaagggcctagaaaaatgaggcaggccagacgagtggaaatagaacacaacagtttaaagtgctttgagaccctcagttaaacagtacacgtgaatacaaaataatgttaaggccattcatggagaagaaatacttaagcaagacatacctggcttgcttcatagagaagaggtaagagatggattttcaattcggcgtgcagcagcagggaatatggctacaacaacgctggctagtattagggcaacacacctcaaagctaactcaccataaacctaacatcttgattcacatctgcttggagtgaaaaagtttatgatcagtcttttcaggaaggtttattttatgggggatttttttgtgctttagtaccccaaaatcacatatgttcgcatacatcatatacacacacattgcatacacatttccccttgactgattcgcatctttgtagataaacactaaattttgataaagattatttacacttatttaggctattactccaatttaaaaatcagtgaaagttttcaatgtttagtctcctaatatataatgcttaaatttgcaacaggaacaatacattatcaaaagcattaacctgtatttagctttcaaatatacctgtctatattaggcagtgatatcttaagaaatcattttctcccttatattttctaaagtgctttaaaaactcatttaatctacacatttttcagaggtaggtcggaattatcctcttgttgcaaatgaggaaacaggcacagtgagcactggtgacttgtttcaggttacacaaaaaaatccatgatgaaagcagggtaaaagttcagatttagtggctaacgtggcaccacacatacaggtgtgcaaataaattatagagcactgcctgggtagcatttggtgtagaaaacctattttgattattttgtatgaataaagtgctgagactggattaggaatacagaatgggcctccagtggtatctaatccacctccctcccttaggaagggtcagaataatcaagtgaatacagagtccttattaggactaaatcttatgtcaactgactccccccccgccccccaaccactggcattcatactggcttaccaaaagaatcatgcttaaggttcatttaatataaaaatgtaagacatctgaatcaggtaaaaaaaattataaatctgattgatatatttagagctaagagactccaggaaaaaaaaaatgtgtagagaaaattaaaaacaaatttaattcaaagaatatggtctattaacattttgtctgtaaaatatttcattgtagctgtatttgtgcttagaagatcttctagatttaaaaacagaaaatggcataaatcatattctcatagccacactccttcccttcctctgctcagctaaggagagggctttcttttgagacagggtctcattttgtcgcccaggctggagtgcagtggtacgatcacagctcactgcagcctctatctcctgggctcaagtgatcctcccacctcagcctcccaagtacctgtgactacaggtacacaccacctcacccggctttttcttttttctttttttttttccgagagagacgggaggtcaccatgttgcccaggttgatgtcaaactcctgggttcaagtgacccacccaccttggcctcccaaagtaagaggtcttttgggaattgtagacgtgcaatagaatatactgttccctctcatctgaaggctctaggaaaaaaagaatatactgttcttttaaaaatttaagtgaatggtggtcatgggtgcattaatgcgaaagaactgtacacttaaaaatggttaaaatggtaaatgtttaaaatggcaaatatgtatttatatattttaccacaatagagaaaatcaagtctttaaaaatgatagcccctatgtttttatgcttacctaaataaaccatatttaatatttggcatataagctaatttgatagagcaagaattgctatgtttataataagcatgttggactgaatttcatcatttattagaatgtgcatataagaaagatacttgtatttgtaggcctctgaaaaacatctaggtaggtagagagccttgactcaccttgccgaaggtcctgaagaatggaaaaaagaaaaatgaatcttcaatatcggtttttcacctcaggaaattctagtaccacaaaaatataatgttttagtaaaaacatttccattgcagtgcttatatcatgatatgaaatttaaaatccacattagccaattcattatttaaatgacccacccctgaaccctctcatagtgtacatgagctgatcatactaggaagcaagttattacacaaaacataaaacataaacttgcagaagttgtttccaaatgtaaaataatcacaatattcatgaatttctaagtcttttcatttgtttttaaacttagatgatgcctttttcattaaaagtgcctgtgctcacattta

SEQ ID NO: 17527 - protein, 93 aa, Homo sapiens [sequence omitted]

SEQ ID NO: 17528 - DNA, 5725 bp, Homo sapiens
actattcagaggggagtttgcttgagacttacttattttatagcaatttgtacaagaaagacttttgcttgttttatttttcagcagaaagtgtaccaaagggagatggttttgcctcctgtgacttaattcctgtgcagaatttgttttgtttttacaatctagccttgacctggccttcagacttggtttctagctcatcctccccaaaactgcatgttttatcccagtggttcttaattctcaacatccatagtcctgcgcagaatcttaaagtttggttaagtgaaacagattttagaatttagtgtatatctcaaaggtcagaattaagaaattgccatgtttcttcaggtggtttatgaaataccagcatgtagacccagaagaagctgtaaggattcacactgatgtccaaacaaagaaatctatggcaattcactggggaacttttgccttagcaaatgagcattacttagagcctccagtgaagctgaatgaagctctagagagatacggacttaacgctgaagatttttttgtcttgaagcatggagaatcaagatacctaaataatgatgatgaaaacttttaataaatgtgagcacaggcacttttaatgaaaaaggcatcatctaagtttaaaaacaaatgaaaagacttagaaattcatgaatattgtgattattttacatttggaaacaacttctgcaagtttatgttttatgttttgtgtaataacttgcttcctagtatgatcagctcatgtacactatgagagggttcaggggtgggtcatttaaataatgaattggctaatgtggattttaaatttcatatcatgatataagcactgcaatggaaatgtttttactaaaacattatatttttgtggtactagaatttcctgaggtgaaaaaccgatattgaagattcatttttcttttttccattcttcaggaccttcggcaaggtgagtcaaggctctctacctacctagatgtttttcagaggcctacaaatacaagtatctttcttatatgcacattctaataaatgatgaaattcagtccaacatgcttattataaacatagcaattcttgctctatcaaattagcttatatgccaaatattaaatatggtttatttaggtaagcataaaaacataggggctatcatttttaaagacttgattttctctattgtggtaaaatatataaatacatatttgccattttaaacatttaccattttaaccatttttaagtgtacagttctttcgcattaatgcacccatgaccaccattcacttaaatttttaaaagaacagtatattctttttttcctagagccttcagatgagagggaacagtatattctattgcacgtctacaattcccaaaagacctcttactttgggaggccaaggtgggtgggtcacttgaacccaggagtttgacatcaacctgggcaacatggtgacctcccgtctctctcggaaaaaaaaaaagaaaaaagaaaaagccgggtgaggtggtgtgtacctgtagtcacaggtacttgggaggctgaggtgggaggatcacttgagcccaggagatagaggctgcagtgagctgtgatcgtaccactgcactccagcctgggcgacaaaatgagaccctgtctcaaaagaaagccctctccttagctgagcagaggaagggaaggagtgtggctatgagaatatgatttatgccattttctgtttttaaatctagaagatcttctaagcacaaatacagctacaatgaaatattttacagacaaaatgttaatagaccatattctttgaattaaatttgtttttaattttctctacacattttttttttcctggagtctcttagctctaaatatatcaatcagatttataattttttttacctgattcagatgtcttacatttttatattaaatgaaccttaagcatgattcttttggtaagccagtatgaatgccagtggttggggggcggggggggagtcagttgacataagatttagtcctaataaggactctgtattcacttgattattctgacccttcctaagggagggaggtggattagataccactggaggcccattctgtattcctaatccagtctcagcactttattcatacaaaataatcaaaataggttttctacaccaaatgctacccaggcagtgctctataatttatttgcacacctgtatgtgtggtgccacgttagccactaaatctgaacttttaccctgctttcatcatggatttttttgtgtaacctgaaacaagtcaccagtgctcactgtgcctgtttcctcatttgcaacaagaggataattccgacctacctctgaaaaatgtgtagattaaatgagtttttaaagcactttagaaaatataagggagaaaatgatttcttaagatatcactgcctaatatagacaggtatatttgaaagctaaatacaggttaatgcttttgataatgtattgttcctgttgcaaatttaagcattatatattaggagactaaacattgaaaactttcactgatttttaaattggagtaatagcctaaataagtgtaaataatctttatcaaaatttagtgtttatctacaaagatgcgaatcagtcaaggggaaatgtgtatgcaatgtgtgtgtatatgatgtatgcgaacatatgtgattttggggtactaaagcacaaaaaaatcccccataaaataaaccttcctgaaaagactgatcataaactttttcactccaagcagatgtgaatcaagatgttaggtttatggtgagttagctttgaggtgtgttgccctaatactagccagcgttgttgtagccatattccctgctgctgcacgccgaattgaaaatccatctcttacctcttctctatgaagcaagccaggtatgtcttgcttaagtatttcttctccatgaatggccttaacattattttgtattcacgtgtactgtttaactgagggtctcaaagcactttaaactgttgtgttctatttccactcgtctggcctgcctcatttttctaggcccttttgtaagctgtaattttttattaccactcatgttctttctacactgacactattcattaagaacatcaagcttcatctctgcttacagaatctcaccttattgagtgggttccactttatttttcatttgttatctacattttgaagggtttatgtgcaaagtgaaaacaaattttgaaaaataagacaaatccattctcttcttcaattcagtctaatatgcattgtagtgtcttttaatcagtcttatcctctaagtcaacttcattttcctcttcgtgaatacccatagcaatatgtaagattttattgaagtttcctgtgataactgaggaatactttgctatgcctcactgcccaatagggtgggtcatcaattaggagaaatcccaaattataaaagccaacatatgccgtgacctacgtaggaaaagatgtatttgtgcatcttctttctgggtagttaaaaattactccctcttttctctagcattttgacatttcagactcaatgctctgatctctagggagtgtgattattcaaactaatgagaggacaagaagacacagttttagaatctactgctgctaaagcacattaaaaacaaatcctggtttttaatgtatgcatagtttcatatttaatgaatatgctttcattaaatagggaggtagatttgaaaaaaccgttataaagaaatgtgccttttggggaatgaatacttttgttcatgtctagcccactgggaattttgttttcaccttatactgagtcctttttctaatgtaaaaatatttcttccaagtttgatttctgtatcagggtaacattgagaacacacatatttctgtttgaggatttgtgacttcctatggaaacagtcttgcatctatgtatttacaaatgaaatttaaagtattcttaaagctttgccttaaatactgcttgcatactgatttacttaatgctaagcatggcaggggttataaatttaaatactataagacctggctgaatcccagatgtatcaataaattgttatagtagcttatggaaaatgctattaaagataaattttcatacattgtatttttagtcaagtaaaatatggatgaaaattaataaagtactgtcaagggaaaaaatatgtataaccttgtaagtgatttttctcccctttattaaaaaaagattatacaatttgggctcatattaaaaaattcaaacagtagaacagtgtgtacgtagaaggcattccccactcccactccaggagtttgggtatcattctagaagtgttctgtcaatacataagcatttttcattcaaacacacacacacacacacgggatcccatattctataatttttgtgttttaaaaaaccaccatatttcatagatatctttccacttaagcacattcggagctccatcatttttttttttttttgagacagagttttgctcttgttgcccaggctggagtgcaatggcgctatctcagctcactgcaacctctgcctcccgggttcaagcaattctcctgcctcggcctcccaagtagctgggattacaggcatgcaccaccatgcccagctaattttgtgttcttagtagagacagggtttctccatattggtcaggcttggtctcaaactcccgatctcaggtgatctgcccgcctcagcctcccaaagtgctgggattacaggcaagagccaccgcgcccagcacggtcttttcaaagaccagataatttatttaaccaactgtctaaagatggacattgtgattgatcacactattttatatataacattgaatggagtgggtgagtcctaagaaacattctctcctaaaagtttacatttttcattgactagaagtgaccaaaatagattctactgatgagaaaagacttttgaaagcagtatggtcaggttggcaggtgaatggcctcaagagcttaggatttcgttgctactaaaagaacaagactattcagttgtgaaacaatgatttagtcaaatactgatgctgtctcagatgagtaactgcaaatcacttcaaaaggtagaagggtagcttaaatgtgaaaaaggttactgccacttcatgtagggaagataacaagcatttgcaaatagcaaaatagaaagaaataaatggtttcagtacaagctcttatattcacttggcatcaaaatagtccaaaataaatctgagaaccacggcaagttatagctgtgttaatgacaaaatgtgatatttactgtttaaatttagcagctgggagaatccccttataaggaagacagaaaatacgtttatatccagactgcattactctttggaaaaatatgaccaatcagattttgggtattattgttacaaccttttccttcacctctgcatcatggtgatcaactaaagctcttattttctgggcacattcttctccatgtaacaggaaaaacaatgaaccttcagtgaaagtaggctgcacagctaaatggccttctattttgaggcagttctttatattctgaaatagcgtaagtactcgaagaagaatctcctttgctacgtggctgtcataaagggaaaggaatgatgaatccac

SEQ ID NO: 17529 - protein, 77 aa, Homo sapiens
MKYQHVDPEEAVRIHTDVQTKKSMAIHWGTFALANEHYLEPPVKLNEALERYGLNAEDFFVLKHGESRYLNNDDENF

SEQ ID NO: 17530 - DNA, 5488 bp, Homo sapiens
ttggaatcgattttttttcgcaggagatactggttattgccctgcttttgaagagataggaaaaagatttggaccttttgaccttgcagctattcccatcggagcttatgaaccgaggtggtttatgaaataccagcatgtagacccagaagaagctgtaaggattcacactgatgtccaaacaaagaaatctatggcaattcactggggaacttttgccttagcaaatgagcattacttagagcctccagtgaagctgaatgaagctctagagagatacggacttaacgctgaagatttttttgtcttgaagcatggagaatcaagatacctaaataatgatgatgaaaacttttaataaatgtgagcacaggcacttttaatgaaaaaggcatcatctaagtttaaaaacaaatgaaaagacttagaaattcatgaatattgtgattattttacatttggaaacaacttctgcaagtttatgttttatgttttgtgtaataacttgcttcctagtatgatcagctcatgtacactatgagagggttcaggggtgggtcatttaaataatgaattggctaatgtggattttaaatttcatatcatgatataagcactgcaatggaaatgtttttactaaaacattatatttttgtggtactagaatttcctgaggtgaaaaaccgatattgaagattcatttttcttttttccattcttcaggaccttcggcaaggtgagtcaaggctctctacctacctagatgtttttcagaggcctacaaatacaagtatctttcttatatgcacattctaataaatgatgaaattcagtccaacatgcttattataaacatagcaattcttgctctatcaaattagcttatatgccaaatattaaatatggtttatttaggtaagcataaaaacataggggctatcatttttaaagacttgattttctctattgtggtaaaatatataaatacatatttgccattttaaacatttaccattttaaccatttttaagtgtacagttctttcgcattaatgcacccatgaccaccattcacttaaatttttaaaagaacagtatattctttttttcctagagccttcagatgagagggaacagtatattctattgcacgtctacaattcccaaaagacctcttactttgggaggccaaggtgggtgggtcacttgaacccaggagtttgacatcaacctgggcaacatggtgacctcccgtctctctcggaaaaaaaaaaagaaaaaagaaaaagccgggtgaggtggtgtgtacctgtagtcacaggtacttgggaggctgaggtgggaggatcacttgagcccaggagatagaggctgcagtgagctgtgatcgtaccactgcactccagcctgggcgacaaaatgagaccctgtctcaaaagaaagccctctccttagctgagcagaggaagggaaggagtgtggctatgagaatatgatttatgccattttctgtttttaaatctagaagatcttctaagcacaaatacagctacaatgaaatattttacagacaaaatgttaatagaccatattctttgaattaaatttgtttttaattttctctacacattttttttttcctggagtctcttagctctaaatatatcaatcagatttataattttttttacctgattcagatgtcttacatttttatattaaatgaaccttaagcatgattcttttggtaagccagtatgaatgccagtggttggggggcggggggggagtcagttgacataagatttagtcctaataaggactctgtattcacttgattattctgacccttcctaagggagggaggtggattagataccactggaggcccattctgtattcctaatccagtctcagcactttattcatacaaaataatcaaaataggttttctacaccaaatgctacccaggcagtgctctataatttatttgcacacctgtatgtgtggtgccacgttagccactaaatctgaacttttaccctgctttcatcatggatttttttgtgtaacctgaaacaagtcaccagtgctcactgtgcctgtttcctcatttgcaacaagaggataattccgacctacctctgaaaaatgtgtagattaaatgagtttttaaagcactttagaaaatataagggagaaaatgatttcttaagatatcactgcctaatatagacaggtatatttgaaagctaaatacaggttaatgcttttgataatgtattgttcctgttgcaaatttaagcattatatattaggagactaaacattgaaaactttcactgatttttaaattggagtaatagcctaaataagtgtaaataatctttatcaaaatttagtgtttatctacaaagatgcgaatcagtcaaggggaaatgtgtatgcaatgtgtgtgtatatgatgtatgcgaacatatgtgattttggggtactaaagcacaaaaaaatcccccataaaataaaccttcctgaaaagactgatcataaactttttcactccaagcagatgtgaatcaagatgttaggtttatggtgagttagctttgaggtgtgttgccctaatactagccagcgttgttgtagccatattccctgctgctgcacgccgaattgaaaatccatctcttacctcttctctatgaagcaagccaggtatgtcttgcttaagtatttcttctccatgaatggccttaacattattttgtattcacgtgtactgtttaactgagggtctcaaagcactttaaactgttgtgttctatttccactcgtctggcctgcctcatttttctaggcccttttgtaagctgtaattttttattaccactcatgttctttctacactgacactattcattaagaacatcaagcttcatctctgcttacagaatctcaccttattgagtgggttccactttatttttcatttgttatctacattttgaagggtttatgtgcaaagtgaaaacaaattttgaaaaataagacaaatccattctcttcttcaattcagtctaatatgcattgtagtgtcttttaatcagtcttatcctctaagtcaacttcattttcctcttcgtgaatacccatagcaatatgtaagattttattgaagtttcctgtgataactgaggaatactttgctatgcctcactgcccaatagggtgggtcatcaattaggagaaatcccaaattataaaagccaacatatgccgtgacctacgtaggaaaagatgtatttgtgcatcttctttctgggtagttaaaaattactccctcttttctctagcattttgacatttcagactcaatgctctgatctctagggagtgtgattattcaaactaatgagaggacaagaagacacagttttagaatctactgctgctaaagcacattaaaaacaaatcctggtttttaatgtatgcatagtttcatatttaatgaatatgctttcattaaatagggaggtagatttgaaaaaaccgttataaagaaatgtgccttttggggaatgaatacttttgttcatgtctagcccactgggaattttgttttcaccttatactgagtcctttttctaatgtaaaaatatttcttccaagtttgatttctgtatcagggtaacattgagaacacacatatttctgtttgaggatttgtgacttcctatggaaacagtcttgcatctatgtatttacaaatgaaatttaaagtattcttaaagctttgccttaaatactgcttgcatactgatttacttaatgctaagcatggcaggggttataaatttaaatactataagacctggctgaatcccagatgtatcaataaattgttatagtagcttatggaaaatgctattaaagataaattttcatacattgtatttttagtcaagtaaaatatggatgaaaattaataaagtactgtcaagggaaaaaatatgtataaccttgtaagtgatttttctcccctttattaaaaaaagattatacaatttgggctcatattaaaaaattcaaacagtagaacagtgtgtacgtagaaggcattccccactcccactccaggagtttgggtatcattctagaagtgttctgtcaatacataagcatttttcattcaaacacacacacacacacacgggatcccatattctataatttttgtgttttaaaaaaccaccatatttcatagatatctttccacttaagcacattcggagctccatcatttttttttttttttgagacagagttttgctcttgttgcccaggctggagtgcaatggcgctatctcagctcactgcaacctctgcctcccgggttcaagcaattctcctgcctcggcctcccaagtagctgggattacaggcatgcaccaccatgcccagctaattttgtgttcttagtagagacagggtttctccatattggtcaggcttggtctcaaactcccgatctcaggtgatctgcccgcctcagcctcccaaagtgctgggattacaggcaagagccaccgcgcccagcacggtcttttcaaagaccagataatttatttaaccaactgtctaaagatggacattgtgattgatcacactattttatatataacattgaatggagtgggtgagtcctaagaaacattctctcctaaaagtttacatttttcattgactagaagtgaccaaaatagattctactgatgagaaaagacttttgaaagcagtatggtcaggttggcaggtgaatggcctcaagagcttaggatttcgttgctactaaaagaacaagactattcagttgtgaaacaatgatttagtcaaatactgatgctgtctcagatgagtaactgcaaatcacttcaaaaggtagaagggtagcttaaatgtgaaaaaggttactgccacttcatgtagggaagataacaagcatttgcaaatagcaaaatagaaagaaataaatggtttcagtacaagctcttatattcacttggcatcaaaatagtccaaaataaatctgagaaccacggcaagttatagctgtgttaatgacaaaatgtgatatttactgtttaaatttagcagctgggagaatccccttataaggaagacagaaaatacgtttatatccagactgcattactctttggaaaaatatgaccaatcagattttgggtattattgttacaaccttttccttcacctctgcatcatggtgatcaactaaagctcttattttctgggcacattcttctccatgtaacaggaaaaacaatgaaccttcagtgaaagtaggctgcacagctaaatggccttctattttgaggcagttctttatattctgaaatagcgtaagtactcgaagaagaatctcctttgctacgtggctgtcataaagggaaaggaatgatgaatccac

SEQ ID NO: 17531 - protein, 77 aa, Homo sapiens; identical to SEQ ID NO: 17529

SEQ ID NO: 17532 - DNA, 4493 bp, Homo sapiens
ggagcaatccacactgctgagcctggggtggtttggaattcttcggcgaagtggagcgggctgagagtgggtttcccgtccccgagccctccctcatctcggagatgccgcacttgtgagcgacagggcttcatttgaattttcgcacctcgcgagttgcggagcctgcatctctgaagctgcctcggtgaagagccacagcattattttttttctctttgggagagtagctgtctgggatttgagatcctatcttccctgcaaattaccaggttgcatcttcactgataggaatacatttcttcaccaaaggacatggatgaaaatgaaagcaaccagtctctgatgacaagcagccaatatcctaaagaagcagtaagaaaacgtcaaaattcagcacggaattccggagcaagtgattcttctaggttttctaggaaaagcttcaaactggattatagactagaagaagatgtaactaaatccaagaaaggaaaagatgggagatttgtgaatccgtggccaacatggaaaaacccctctattccaaatgttctcagatggctgataatggagaaagatcacagcagtgttccaagttctaaagaggaactagacaaagaactcccagtgcttaagccatattttatcactaaccctgaagaagctggagtgagggaagctggcttaagagtcacatggctgggacatgccacggtaatggtggaaatggatgagctcatatttctcacggatcccatctttagctctcgtgcttcaccatcgcagtacatgggtccaaagcgatttcgtcgttccccgtgcacaataagtgaactccctccaatagatgcggtccttatcagtcacaaccactatgaccatctggactacaattctgtcattgctttgaatgagcgatttggtaatgagttgagatggtttgtgcctttgggtctccttgactggatgcaaaaatgtggctgtgagaatgtgattgagttggactggtgggaggagaattgtgtccccggacatgataaggtcacttttgtctttacaccttcccagcactggtgtaaaaggactctaatggatgacaacaaggtgctatggggcagctggtctgtcttggggccttggaatcgattttttttcgcaggagatactggttattgccctgcttttgaagagataggaaaaagatttggaccttttgaccttgcagctattcccatcggagcttatgaaccgaggtggtttatgaaataccagcatgtagacccagaagaagctgtaaggattcacactgatgtccaaacaaagaaatctatggcaattcactggggaacttttgccttagcaaatgagcattacttagagcctccagtgaagctgaatgaagctctagagagatacggacttaacgctgaagatttttttgtcttgaagcatggagaatcaagatacctaaataatgatgatgaaaacttttaataaataatttcctgaggtgaaaaaccgatattgaagattcatttttcttttttccattcttcaggaccttcggcaagatgtgaatcaagatgttaggtttatggtgagttagctttgaggtgtgttgccctaatactagccagcgttgttgtagccatattccctgctgctgcacgccgaattgaaaatccatctcttacctcttctctatgaagcaagccaggtatgtcttgcttaagtatttcttctccatgaatggccttaacattattttgtattcacgtgtactgtttaactgagggtctcaaagcactttaaactgttgtgttctatttccactcgtctggcctgcctcatttttctaggcccttttgtaagctgtaattttttattaccactcatgttctttctacactgacactattcattaagaacatcaagcttcatctctgcttacagaatctcaccttattgagtgggttccactttatttttcatttgttatctacattttgaagggtttatgtgcaaagtgaaaacaaattttgaaaaataagacaaatccattctcttcttcaattcagtctaatatgcattgtagtgtcttttaatcagtcttatcctctaagtcaacttcattttcctcttcgtgaatacccatagcaatatgtaagattttattgaagtttcctgtgataactgaggaatactttgctatgcctcactgcccaatagggtgggtcatcaattaggagaaatcccaaattataaaagccaacatatgccgtgacctacgtaggaaaagatgtatttgtgcatcttctttctgggtagttaaaaattactccctcttttctctagcattttgacatttcagactcaatgctctgatctctagggagtgtgattattcaaactaatgagaggacaagaagacacagttttagaatctactgctgctaaagcacattaaaaacaaatcctggtttttaatgtatgcatagtttcatatttaatgaatatgctttcattaaatagggaggtagatttgaaaaaaccgttataaagaaatgtgccttttggggaatgaatacttttgttcatgtctagcccactgggaattttgttttcaccttatactgagtcctttttctaatgtaaaaatatttcttccaagtttgatttctgtatcagggtaacattgagaacacacatatttctgtttgaggatttgtgacttcctatggaaacagtcttgcatctatgtatttacaaatgaaatttaaagtattcttaaagctttgccttaaatactgcttgcatactgatttacttaatgctaagcatggcaggggttataaatttaaatactataagacctggctgaatcccagatgtatcaataaattgttatagtagcttatggaaaatgctattaaagataaattttcatacattgtatttttagtcaagtaaaatatggatgaaaattaataaagtactgtcaagggaaaaaatatgtataaccttgtaagtgatttttctcccctttattaaaaaaagattatacaatttgggctcatattaaaaaattcaaacagtagaacagtgtgtacgtagaaggcattccccactcccactccaggagtttgggtatcattctagaagtgttctgtcaatacataagcatttttcattcaaacacacacacacacacacgggatcccatattctataatttttgtgttttaaaaaaccaccatatttcatagatatctttccacttaagcacattcggagctccatcatttttttttttttttgagacagagttttgctcttgttgcccaggctggagtgcaatggcgctatctcagctcactgcaacctctgcctcccgggttcaagcaattctcctgcctcggcctcccaagtagctgggattacaggcatgcaccaccatgcccagctaattttgtgttcttagtagagacagggtttctccatattggtcaggcttggtctcaaactcccgatctcaggtgatctgcccgcctcagcctcccaaagtgctgggattacaggcaagagccaccgcgcccagcacggtcttttcaaagaccagataatttatttaaccaactgtctaaagatggacattgtgattgatcacactattttatatataacattgaatggagtgggtgagtcctaagaaacattctctcctaaaagtttacatttttcattgactagaagtgaccaaaatagattctactgatgagaaaagacttttgaaagcagtatggtcaggttggcaggtgaatggcctcaagagcttaggatttcgttgctactaaaagaacaagactattcagttgtgaaacaatgatttagtcaaatactgatgctgtctcagatgagtaactgcaaatcacttcaaaaggtagaagggtagcttaaatgtgaaaaaggttactgccacttcatgtagggaagataacaagcatttgcaaatagcaaaatagaaagaaataaatggtttcagtacaagctcttatattcacttggcatcaaaatagtccaaaataaatctgagaaccacggcaagttatagctgtgttaatgacaaaatgtgatatttactgtttaaatttagcagctgggagaatccccttataaggaagacagaaaatacgtttatatccagactgcattactctttggaaaaatatgaccaatcagattttgggtattattgttacaaccttttccttcacctctgcatcatggtgatcaactaaagctcttattttctgggcacattcttctccatgtaacaggaaaaacaatgaaccttcagtgaaagtaggctgcacagctaaatggccttctattttgaggcagttctttatattctgaaatagcgtaagtactcgaagaagaatctcctttgctacgtggctgtcataaagggaaaggaatgatgaatccac

SEQ ID NO: 17533 - protein, 393 aa, Homo sapiens
MDENESNQSLMTSSQYPKEAVRKRQNSARNSGASDSSRFSRKSFKLDYRLEEDVTKSKKGKDGRFVNPWPTWKNPSIPNVLRWLIMEKDHSSVPSSKEELDKELPVLKPYFITNPEEAGVREAGLRVTWLGHATVMVEMDELIFLTDPIFSSRASPSQYMGPKRFRRSPCTISELPPIDAVLISHNHYDHLDYNSVIALNERFGNELRWFVPLGLLDWMQKCGCENVIELDWWEENCVPGHDKVTFVFTPSQHWCKRTLMDDNKVLWGSWSVLGPWNRFFFAGDTGYCPAFEEIGKRFGPFDLAAIPIGAYEPRWFMKYQHVDPEEAVRIHTDVQTKKSMAIHWGTFALANEHYLEPPVKLNEALERYGLNAEDFFVLKHGESRYLNNDDENF

SEQ ID NO: 17534 - DNA, 4240 bp, Homo sapiens
actattcagaggggagtttgcttgagacttacttattttatagcaatttgtacaagaaagacttttgcttgttttatttttcagcagaaagtgtaccaaagggagatggttttgcctcctgtgacttaattcctgtgcagaatttgttttgtttttacaatctagccttgacctggccttcagacttggtttctagctcatcctccccaaaactgcatgttttatcccagtggttcttaattctcaacatccatagtcctgcgcagaatcttaaagtttggttaagtgaaacagattttagaatttagtgtatatctcaaaggtcagaattaagaaattgccatgtttcttcaggtggtttatgaaataccagcatgtagacccagaagaagctgtaaggattcacactgatgtccaaacaaagaaatctatggcaattcactggggaacttttgccttagcaaatgagcattacttagagcctccagtgaagctgaatgaagctctagagagatacggacttaacgctgaagatttttttgtcttgaagcatggagaatcaagatacctaaataatgatgatgaaaacttttaataaatgtgagcacaggcacttttaatgaaaaaggcatcatctaagtttaaaaacaaatgaaaagacttagaaattcatgaatattgtgattattttacatttggaaacaacttctgcaagtttatgttttatgttttgtgtaataacttgcttcctagtatgatcagctcatgtacactatgagagggttcaggggtgggtcatttaaataatgaattggctaatgtggattttaaatttcatatcatgatataagcactgcaatggaaatgtttttactaaaacattatatttttgtggtactagaatttcctgaggtgaaaaaccgatattgaagattcatttttcttttttccattcttcaggaccttcggcaaggtgagtcaaggctctctacctacctagatgtttttcagaggcctacaaatacaagtatctttcttatatgcacattctaataaatgatgaaattcagtccaacatgcttattataaacatagcaattcttgctctatcaaattagcttatatgccaaatattaaatatggtttatttaggtaagcataaaaacataggggctatcatttttaaagacttgattttctctattgtggtaaaatatataaatacatatttgccattttaaacatttaccattttaaccatttttaagtgtacagttctttcgcattaatgcacccatgaccaccattcacttaaatttttaaaagaacagtatattctttttttcctagagccttcagatgagagggaacagtatattctattgcacgtctacaattcccaaaagacctcttactttgggaggccaaggtgggtgggtcacttgaacccaggagtttgacatcaacctgggcaacatggtgacctcccgtctctctcggaaaaaaaaaaagaaaaaagaaaaagccgggtgaggtggtgtgtacctgtagtcacaggtacttgggaggctgaggtgggaggatcacttgagcccaggagatagaggctgcagtgagctgtgatcgtaccactgcactccagcctgggcgacaaaatgagaccctgtctcaaaagaaagccctctccttagctgagcagaggaagggaaggagtgtggctatgagaatatgatttatgccattttctgtttttaaatctagaagatcttctaagcacaaatacagctacaatgaaatattttacagacaaaatgttaatagaccatattctttgaattaaatttgtttttaattttctctacacattttttttttcctggagtctcttagctctaaatatatcaatcagatttataattttttttacctgattcagatgtcttacatttttatattaaatgaaccttaagcatgattcttttggtaagccagtatgaatgccagtggttggggggcggggggggagtcagttgacataagatttagtcctaataaggactctgtattcacttgattattctgacccttcctaagggagggaggtggattagataccactggaggcccattctgtattcctaatccagtctcagcactttattcatacaaaataatcaaaataggttttctacaccaaatgctacccaggcagtgctctataatttatttgcacacctgtatgtgtggtgccacgttagccactaaatctgaacttttaccctgctttcatcatggatttttttgtgtaacctgaaacaagtcaccagtgctcactgtgcctgtttcctcatttgcaacaagaggataattccgacctacctctgaaaaatgtgtagattaaatgagtttttaaagcactttagaaaatataagggagaaaatgatttcttaagatatcactgcctaatatagacaggtatatttgaaagctaaatacaggttaatgcttttgataatgtattgttcctgttgcaaatttaagcattatatattaggagactaaacattgaaaactttcactgatttttaaattggagtaatagcctaaataagtgtaaataatctttatcaaaatttagtgtttatctacaaagatgcgaatcagtcaaggggaaatgtgtatgcaatgtgtgtgtatatgatgtatgcgaacatatgtgattttggggtactaaagcacaaaaaaatcccccataaaataaaccttcctgaaaagactgatcataaactttttcactccaagcagatgtgaatcaagatgttaggtttatggtgagttagctttgaggtgtgttgccctaatactagccagcgttgttgtagccatattccctgctgctgcacgccgaattgaaaatccatctcttacctcttctctatgaagcaagccaggtatgtcttgcttaagtatttcttctccatgaatggccttaacattattttgtattcacgtgtactgtttaactgagggtctcaaagcactttaaactgttgtgttctatttccactcgtctggcctgcctcatttttctaggcccttttgtaagctgtaattttttattaccactcatgttctttctacactgacactattcattaagaacatcaagcttcatctctgcttacagaatctcaccttattgagtgggttccactttatttttcatttgttatctacattttgaagggtttatgtgcaaagtgaaaacaaattttgaaaaataagacaaatccattctcttcttcaattcagtctaatatgcattgtagtgtcttttaatcagtcttatcctctaagtcaacttcattttcctcttcgtgaatacccatagcaatatgtaagattttattgaagtttcctgtgataactgaggaatactttgctatgcctcactgcccaatagggtgggtcatcaattaggagaaatcccaaattataaaagccaacatatgccgtgacctacgtaggaaaagatgtatttgtgcatcttctttctgggtagttaaaaattactccctcttttctctagcattttgacatttcagactcaatgctctgatctctagggagtgtgattattcaaactaatgagaggacaagaagacacagttttagaatctactgctgctaaagcacattaaaaacaaatcctggtttttaatgtatgcatagtttcatatttaatgaatatgctttcattaaatagggaggtagatttgaaaaaaccgttataaagaaatgtgccttttggggaatgaatacttttgttcatgtctagcccactgggaattttgttttcaccttatactgagtcctttttctaatgtaaaaatatttcttccaagtttgatttctgtatcagggtaacattgagaacacacatatttctgtttgaggatttgtgacttcctatggaaacagtcttgcatctatgtatttacaaatgaaatttaaagtattcttaaagctttgccttaaatactgcttgcatactgatttacttaatgctaagcatggcaggggttataaatttaaatactataagacctggctgaatcccagatgtatcaataaattgttatagtagcttatggaaaatgctattaaagataaattttcatacattgtatttttagtcaagtaaaatatggatgaaaattaataaagtactgtcaaggg

SEQ ID NO: 17535 - protein, 77 aa, Homo sapiens; identical to SEQ ID NO: 17529

SEQ ID NO: 17536 - DNA, 4003 bp, Homo sapiens
ttggaatcgattttttttcgcaggagatactggttattgccctgcttttgaagagataggaaaaagatttggaccttttgaccttgcagctattcccatcggagcttatgaaccgaggtggtttatgaaataccagcatgtagacccagaagaagctgtaaggattcacactgatgtccaaacaaagaaatctatggcaattcactggggaacttttgccttagcaaatgagcattacttagagcctccagtgaagctgaatgaagctctagagagatacggacttaacgctgaagatttttttgtcttgaagcatggagaatcaagatacctaaataatgatgatgaaaacttttaataaatgtgagcacaggcacttttaatgaaaaaggcatcatctaagtttaaaaacaaatgaaaagacttagaaattcatgaatattgtgattattttacatttggaaacaacttctgcaagtttatgttttatgttttgtgtaataacttgcttcctagtatgatcagctcatgtacactatgagagggttcaggggtgggtcatttaaataatgaattggctaatgtggattttaaatttcatatcatgatataagcactgcaatggaaatgtttttactaaaacattatatttttgtggtactagaatttcctgaggtgaaaaaccgatattgaagattcatttttcttttttccattcttcaggaccttcggcaaggtgagtcaaggctctctacctacctagatgtttttcagaggcctacaaatacaagtatctttcttatatgcacattctaataaatgatgaaattcagtccaacatgcttattataaacatagcaattcttgctctatcaaattagcttatatgccaaatattaaatatggtttatttaggtaagcataaaaacataggggctatcatttttaaagacttgattttctctattgtggtaaaatatataaatacatatttgccattttaaacatttaccattttaaccatttttaagtgtacagttctttcgcattaatgcacccatgaccaccattcacttaaatttttaaaagaacagtatattctttttttcctagagccttcagatgagagggaacagtatattctattgcacgtctacaattcccaaaagacctcttactttgggaggccaaggtgggtgggtcacttgaacccaggagtttgacatcaacctgggcaacatggtgacctcccgtctctctcggaaaaaaaaaaagaaaaaagaaaaagccgggtgaggtggtgtgtacctgtagtcacaggtacttgggaggctgaggtgggaggatcacttgagcccaggagatagaggctgcagtgagctgtgatcgtaccactgcactccagcctgggcgacaaaatgagaccctgtctcaaaagaaagccctctccttagctgagcagaggaagggaaggagtgtggctatgagaatatgatttatgccattttctgtttttaaatctagaagatcttctaagcacaaatacagctacaatgaaatattttacagacaaaatgttaatagaccatattctttgaattaaatttgtttttaattttctctacacattttttttttcctggagtctcttagctctaaatatatcaatcagatttataattttttttacctgattcagatgtcttacatttttatattaaatgaaccttaagcatgattcttttggtaagccagtatgaatgccagtggttggggggcggggggggagtcagttgacataagatttagtcctaataaggactctgtattcacttgattattctgacccttcctaagggagggaggtggattagataccactggaggcccattctgtattcctaatccagtctcagcactttattcatacaaaataatcaaaataggttttctacaccaaatgctacccaggcagtgctctataatttatttgcacacctgtatgtgtggtgccacgttagccactaaatctgaacttttaccctgctttcatcatggatttttttgtgtaacctgaaacaagtcaccagtgctcactgtgcctgtttcctcatttgcaacaagaggataattccgacctacctctgaaaaatgtgtagattaaatgagtttttaaagcactttagaaaatataagggagaaaatgatttcttaagatatcactgcctaatatagacaggtatatttgaaagctaaatacaggttaatgcttttgataatgtattgttcctgttgcaaatttaagcattatatattaggagactaaacattgaaaactttcactgatttttaaattggagtaatagcctaaataagtgtaaataatctttatcaaaatttagtgtttatctacaaagatgcgaatcagtcaaggggaaatgtgtatgcaatgtgtgtgtatatgatgtatgcgaacatatgtgattttggggtactaaagcacaaaaaaatcccccataaaataaaccttcctgaaaagactgatcataaactttttcactccaagcagatgtgaatcaagatgttaggtttatggtgagttagctttgaggtgtgttgccctaatactagccagcgttgttgtagccatattccctgctgctgcacgccgaattgaaaatccatctcttacctcttctctatgaagcaagccaggtatgtcttgcttaagtatttcttctccatgaatggccttaacattattttgtattcacgtgtactgtttaactgagggtctcaaagcactttaaactgttgtgttctatttccactcgtctggcctgcctcatttttctaggcccttttgtaagctgtaattttttattaccactcatgttctttctacactgacactattcattaagaacatcaagcttcatctctgcttacagaatctcaccttattgagtgggttccactttatttttcatttgttatctacattttgaagggtttatgtgcaaagtgaaaacaaattttgaaaaataagacaaatccattctcttcttcaattcagtctaatatgcattgtagtgtcttttaatcagtcttatcctctaagtcaacttcattttcctcttcgtgaatacccatagcaatatgtaagattttattgaagtttcctgtgataactgaggaatactttgctatgcctcactgcccaatagggtgggtcatcaattaggagaaatcccaaattataaaagccaacatatgccgtgacctacgtaggaaaagatgtatttgtgcatcttctttctgggtagttaaaaattactccctcttttctctagcattttgacatttcagactcaatgctctgatctctagggagtgtgattattcaaactaatgagaggacaagaagacacagttttagaatctactgctgctaaagcacattaaaaacaaatcctggtttttaatgtatgcatagtttcatatttaatgaatatgctttcattaaatagggaggtagatttgaaaaaaccgttataaagaaatgtgccttttggggaatgaatacttttgttcatgtctagcccactgggaattttgttttcaccttatactgagtcctttttctaatgtaaaaatatttcttccaagtttgatttctgtatcagggtaacattgagaacacacatatttctgtttgaggatttgtgacttcctatggaaacagtcttgcatctatgtatttacaaatgaaatttaaagtattcttaaagctttgccttaaatactgcttgcatactgatttacttaatgctaagcatggcaggggttataaatttaaatactataagacctggctgaatcccagatgtatcaataaattgttatagtagcttatggaaaatgctattaaagataaattttcatacattgtatttttagtcaagtaaaatatggatgaaaattaataaagtactgtcaaggg

SEQ ID NO: 17537 - protein, 77 aa, Homo sapiens; identical to SEQ ID NO: 17529

SEQ ID NO: 17538 - DNA, 3008 bp, Homo sapiens
ggagcaatccacactgctgagcctggggtggtttggaattcttcggcgaagtggagcgggctgagagtgggtttcccgtccccgagccctccctcatctcggagatgccgcacttgtgagcgacagggcttcatttgaattttcgcacctcgcgagttgcggagcctgcatctctgaagctgcctcggtgaagagccacagcattattttttttctctttgggagagtagctgtctgggatttgagatcctatcttccctgcaaattaccaggttgcatcttcactgataggaatacatttcttcaccaaaggacatggatgaaaatgaaagcaaccagtctctgatgacaagcagccaatatcctaaagaagcagtaagaaaacgtcaaaattcagcacggaattccggagcaagtgattcttctaggttttctaggaaaagcttcaaactggattatagactagaagaagatgtaactaaatccaagaaaggaaaagatgggagatttgtgaatccgtggccaacatggaaaaacccctctattccaaatgttctcagatggctgataatggagaaagatcacagcagtgttccaagttctaaagaggaactagacaaagaactcccagtgcttaagccatattttatcactaaccctgaagaagctggagtgagggaagctggcttaagagtcacatggctgggacatgccacggtaatggtggaaatggatgagctcatatttctcacggatcccatctttagctctcgtgcttcaccatcgcagtacatgggtccaaagcgatttcgtcgttccccgtgcacaataagtgaactccctccaatagatgcggtccttatcagtcacaaccactatgaccatctggactacaattctgtcattgctttgaatgagcgatttggtaatgagttgagatggtttgtgcctttgggtctccttgactggatgcaaaaatgtggctgtgagaatgtgattgagttggactggtgggaggagaattgtgtccccggacatgataaggtcacttttgtctttacaccttcccagcactggtgtaaaaggactctaatggatgacaacaaggtgctatggggcagctggtctgtcttggggccttggaatcgattttttttcgcaggagatactggttattgccctgcttttgaagagataggaaaaagatttggaccttttgaccttgcagctattcccatcggagcttatgaaccgaggtggtttatgaaataccagcatgtagacccagaagaagctgtaaggattcacactgatgtccaaacaaagaaatctatggcaattcactggggaacttttgccttagcaaatgagcattacttagagcctccagtgaagctgaatgaagctctagagagatacggacttaacgctgaagatttttttgtcttgaagcatggagaatcaagatacctaaataatgatgatgaaaacttttaataaataatttcctgaggtgaaaaaccgatattgaagattcatttttcttttttccattcttcaggaccttcggcaagatgtgaatcaagatgttaggtttatggtgagttagctttgaggtgtgttgccctaatactagccagcgttgttgtagccatattccctgctgctgcacgccgaattgaaaatccatctcttacctcttctctatgaagcaagccaggtatgtcttgcttaagtatttcttctccatgaatggccttaacattattttgtattcacgtgtactgtttaactgagggtctcaaagcactttaaactgttgtgttctatttccactcgtctggcctgcctcatttttctaggcccttttgtaagctgtaattttttattaccactcatgttctttctacactgacactattcattaagaacatcaagcttcatctctgcttacagaatctcaccttattgagtgggttccactttatttttcatttgttatctacattttgaagggtttatgtgcaaagtgaaaacaaattttgaaaaataagacaaatccattctcttcttcaattcagtctaatatgcattgtagtgtcttttaatcagtcttatcctctaagtcaacttcattttcctcttcgtgaatacccatagcaatatgtaagattttattgaagtttcctgtgataactgaggaatactttgctatgcctcactgcccaatagggtgggtcatcaattaggagaaatcccaaattataaaagccaacatatgccgtgacctacgtaggaaaagatgtatttgtgcatcttctttctgggtagttaaaaattactccctcttttctctagcattttgacatttcagactcaatgctctgatctctagggagtgtgattattcaaactaatgagaggacaagaagacacagttttagaatctactgctgctaaagcacattaaaaacaaatcctggtttttaatgtatgcatagtttcatatttaatgaatatgctttcattaaatagggaggtagatttgaaaaaaccgttataaagaaatgtgccttttggggaatgaatacttttgttcatgtctagcccactgggaattttgttttcaccttatactgagtcctttttctaatgtaaaaatatttcttccaagtttgatttctgtatcagggtaacattgagaacacacatatttctgtttgaggatttgtgacttcctatggaaacagtcttgcatctatgtatttacaaatgaaatttaaagtattcttaaagctttgccttaaatactgcttgcatactgatttacttaatgctaagcatggcaggggttataaatttaaatactataagacctggctgaatcccagatgtatcaataaattgttatagtagcttatggaaaatgctattaaagataaattttcatacattgtatttttagtcaagtaaaatatggatgaaaattaataaagtactgtcaaggg

SEQ ID NO: 17539 - protein, 393 aa, Homo sapiens; identical to SEQ ID NO: 17533

SEQ ID NO: 17540 - DNA, 977 bp, Homo sapiens
caatgagggcagctagggatcacttctgtcaccatctgctggtttttgccagttttttctttttttctttttttttttttctgagattgagtctcactctgtcgcccaggctagagtgcagtgccgcgatcccagctcatgcactccaacctgggcaacagagtgagactccatctcaaacaaccaaccaaaaaaggaacatacatcgagtaaagaccaattttatgttacaaatacataactgatttgtaacagttctaaaaatatataagttgacaggttttgagaggtttcattagaattataactatttaattagaaaagtaaaattcaagcaccaatattgatttgtaatcattttaataattatcaagaaccaaaaaagggtaaaaatatctagcccctccaaataaggaaactagcaaaaaacaaaaagggataaataagcattagtaaataaaaatagggacaaaatcgttttagtgaatgtaaaaatttagcaaataacaaaatcagatgaaaacaaaagtttagattcattcaattcatctatgtattagagaaatacttgttcttccacttatggaattacctaaacaaaatgttgttgtatgtatctgtccatgcactatagaatacaatatttttaaaattatccattgctttgttactattagtgttttgttttctctttatttgcacatataaaccagagttgactgaaatctaacttaattctttgaaatcacttctcttttccctaaacagagaatattaaggaaaacaaagacagtggatgagtctcctaggtgtccaatgagagtgtgacctttcgctgctctgaaataggtcaatagtatgtcaaggttggaggatgagtggtgagtagtacaacaccaccatgaccagattaacttcagtgctgactgaaataaaaccctcaccagggactaatgctataggccaattccttgctt

SEQ ID NO: 17541 - protein, 80 aa, Homo sapiens
MRAARDHFCHHLLVFASFFFFSFFFFLRLSLTLSPRLECSAAIPAHALQPGQQSETPSQTTNQKRNIHRVKTNFMLQIHN

SEQ ID NO: 17542 - DNA, 2151 bp, Homo sapiens
tttgaattttcgcacctcgcgagttgcggagcctgcatctctgaagctgcctcggtgaagagccacagcattattttttttctctttgggagagtagctgtctgggatttgagatcctatcttccctgcaaattaccaggttgcatcttcactgataggaatacatttcttcaccaaaggacatggatgaaaatgaaagcaaccagtctctgatgacaagcagccaatatcctaaagaagcagtaagaaaacgtcaaaattcagcacggaattccggagcaagtgattcttctaggttttctaggaaaagcttcaaactggattatagactagaagaagatgtaactaaatccaagaaaggaaaagatgggagatttgtgaatccgtggccaacatggaaaaacccctctattccaaatgttctcagatggctgataatggagaaagatcacagcagtgttccaagttctaaagaggtagcgcttggcttttttgagtgctttatatttgctcttcatatatgacactctagttatttgagcccttgtatatcataaggcatagaattaggtctgaggagataaagtggataggtgtaacctaggccctaaagttcatcgttcagtagcagagtacatataggaataaccaaccctgatctggtggcaactagaggtaggaacagagtgctttagaggtacaggaaagaacgtgatgctgacaggaagagctggagatggcttcacagaggaggtgaatatttcagctgggcctagtcaactaaaaagtattttgacagtgattttccaggtagatgatggcatgaacaaggtcatgaaggtgagacagtgtattacctgctctggaaggtagtagcctggtacgtgtgtagaatatggatcatgagggtgaaggcatggcctggagtgcttggcttttaacccttggataaggctaccaaagctgtgaaagggagcttcagatgacctttccagaccttgaaaagttgactttaggttcctagcctttaaatgtactagttttacttaagatgattctacttggccttcttctattctgttagaatagacagatcacagttttgggttaagttgatttcatggtttacattgagtatatcaatatttttcattggtgaatgaagtaagtactatgactgtgtctcctttccttatatacctctccctctgctgtgttaacaacatctctttcatctgcttgactttctgtgtatttatgacaattatttccctgcctcctatggcctctcaatgccattttcctgagggaaagactctcaggtggtcgttcagcagtgggctgtagtctgagctgatgccttcccagggtctctgccgacttacattctagggcacccttcaccagcctcctgggctcccttgtgtcttctatggtcacccttgttttctgcatcccacttgttcctctttctgtgtcattttctcattttggtggagcatattttcagtgaacttcctgagaaagggtacatggaaagtaagttttttgaattcttgcttgtctgaaatgtctttattctcattcataattgataatttgggtatagaatttttgtttagaaacagttttctctcagaatttgagagtattgcctccataactttatttctagtgtggctgtggggaagttcagtgccgtccttactcttgatcctttgaacaggccctttgttttctctctagagactttgagaatcctctctttggcaccagtgttctgaaaattgccacgatgtgtagttctttatttattcattgtgctctgtgtgtggtgggccctttcagtctgaaaatccatttccttcagttctaggaaatttcatctgtatctttgaaaatgtccttccctatatgtttttattctaaaatgactattagttatagtagttctattttggacctcctggatcaattctctgtaatttaagaaaatttcttctatgttttatctttttaaaaatattacatggctaggtgcagtagctcatgcctataatacccacactttgggaggctgaggcaggtggattgcttgagctgaggagttcgagaccagccggggcaacatagcaaaatgccatctctacc

SEQ ID NO: 17543 - protein, 113 aa, Homo sapiens [sequence omitted]

SEQ ID NO: 17544 - DNA, 656 bp, Homo sapiens
gcggcaggcgctcgggttcttcctaacccgagcccgccgcgctggctccgccgaggacgccagcagctgcaggcagcgcttcagctctcgccgcctcgccatcgttggggcgagtcgtcgccgggtcactcccttattatgaccttcgaatctgacagcagggccagcggtggcctccttcaggctgcctctccagcccttaccaagatggccgcccctgtgggccggggcgccgaagccatcttggtaaaggaagcgcctgggagcacgcggcctgccccggcccgcctcgcgactcaaacactctgcagggaccctcctaagatcaaattggttccccccgctgtcctaagccagaggcttactttcagatcgcatgaacgcattcctggacaccagccacagttgctaaaactaaatgggatcctgcagacccattgacggactgtcatagccaactcaatcacagtcgagaagcatttgaatacttacagcctatggcgctaggatcctggtagcgaagaaactaaactctaatttgaaatgttgtacagctagcttagagtggctgctgaacttaagggtgattaagagctgcttgcacctgggtggagctgaaactgcataaggtgaataatacctttgtgcaacagaag

SEQ ID NO: 17545 - protein, 100 aa, Homo sapiens [sequence omitted]

SEQ ID NO: 17546 - DNA, 912 bp, Homo sapiens
atggcaaggcagtcaccaggggacccatgtcctcagaggacctggctcctcagagaaaccgcaggttcactgggggagattatcaggactttagacctcaggatgaagagacacactccaggaggggctgtggatagttaccatggtgccccagaaaggtgtcagggtagtgcatggggaaagccccccagggtcctggccagcttagaggcaatgaccaccaggggagaacacctcccacatgaggtagtgccagagcaagacgctggacctgacaacaaagccttcagtggtgaagacagcagagactccaagctccctgtgaaggaagtgactcatcccgtccctagcccagctcctttcctaaggaggaaaaaggtgagaattccaaaaagaaaaactctgtcagtaaattctaacatgggagatctcaaggagccctacttggcccccgtccaacagccagtaacacaaaaagctggctgctcagagaccacagcactgtctgttcttaggacagaagagcagatgggtggcacacaggccataaccaccaacatggagttgctgtgccagaagagcgtccccaggagaaacaagcttgaccactatgctgtcacagagtttcctctgaccactgagtctgccatgaagaagatagaagacaacaacacacttgtgttcactgtggatgttaaagccaccaagcaccagatcaaacaggctgtgaagaagctctatgacactgatgtggccaaagtccatgccctgattaggcctgatgcaggaagaaggcataagctccactggctcctgattacaatgctttggatattgccaacaaaattgggatcaactttgttgctgacccaacaaaactgggatattgccaacaaaattggggtcatctaa

SEQ ID NO: 17547 - protein, 303 aa, Homo sapiens
MARQSPGDPCPQRTWLLRETAGSLGEIIRTLDLRMKRHTPGGAVDSYHGAPERCQGSAWGKPPRVLASLEAMTTRGEHLPHEVVPEQDAGPDNKAFSGEDSRDSKLPVKEVTHPVPSPAPFLRRKKVRIPKRKTLSVNSNMGDLKEPYLAPVQQPVTQKAGCSETTALSVLRTEEQMGGTQAITTNMELLCQKSVPRRNKLDHYAVTEFPLTTESAMKKIEDNNTLVFTVDVKATKHQIKQAVKKLYDTDVAKVHALIRPDAGRRHKLHWLLITMLWILPTKLGSTLLLTQQNWDIANKIGVI

SEQ ID NO: 17548 - DNA, 1898 bp, Homo sapiens
agagcgctcccgggtaggcatttgccccggtgggacacctcaccacagcagtgtgtggcaggcccccgtggagaatcaacgcagtggctgaacaccgggaaggaatgggcacttggagtctggacatctaaaacttgaaatggcggctgcggcggctcgagtggtgttgtcatccgcggcgcggcggcggctctggggtttcagcgagagtcttctaatccgaggcgctgcgggacggtcattatattttggagagaacagattaagaagtacacaggctgctacccaagttgttctgaatgttcctgaaacaagagtaacatgtttagaaagtggactcagagtagcttcggaagactctgggctctcaacatgcacagttggactctggattgatgctggaagtagatacgaaaatgagaagaacaatggaacagcacactttctggagcatatggctttcaagggcaccaagaagagatcccagttagatctggaacttgagattgaaaatatgggtgctcatctcaatgcctatacctccagagagcagactgtatactatgccaaagcattctctaaagacttgccaagagctgtagaaattcttgctgatataatacaaaacagcacattgggagaagcagagattgaacgtgagcgtggagtaatccttagagagatgcaggaagttgaaaccaatttacaagaagttgtttttgattatcttcatgccacagcttatcaaaatactgcacttggacggacaattttgggaccaactgaaaatatcaaatctataagtcgtaaggacttagtggattatataaccacacattataaggggccaagaatagtgcttgctgctgctggaggtgtttcccatgatgaattgcttgacttagcaaagtttcatttcggtgactctttatgcacacacaaaggagaaataccagctctgcctccctgcaaattcacaggaagtgagattcgtgtgagggatgacaagatgcctttggcgcaccttgcaatagctgttgaagctgttggttgggcacatccagatacaatctgtctcatggttgcaaacacgctgattggcaactgggatcgctcttttgggggaggaatgaatttatctagcaagctggcccagctcacttgtcatggcaatctttgccatagctttcagtctttcaacacttcctacacagatacaggattatggggactgtatatggtttgtgaatcatccactgttgcagacatgctacatgttgttcaaaaagaatggatgcgactctgtacaagtgtcacagaaagtgaggttgcacgagccagaaatcttctgaaaacaaacatgttgttgcagcttgatggttcaactccaatttgtgaagatattggtaggcaaatgttatgctataatagaaggattcccatccctgagcttgaagcaagaattgatgctgtgaatgctgagacaattcgagaagtatgtaccaaatacatttataataggagtccagctattgctgctgttggtcccattaagcaactaccagattttaaacagatacgcagtaacatgtgttggcttcgtgattaaaatgctcctaatcaagattgtttgaacacatgtatttataaaacagagctagagaaaaataaaaatgaacatgtatatacatttggaaatttgaattaaatactgtatcatactttcaaaggataaaaagactacccctctgaaggttgttttgtattaatggtcagtctttgttctctgagaaattatgttggaagcagcatactttcaaattattaccatgagtataattttaagaatgaaaatgtttacagtattttcagttttattataaaaatgcacacacaac

SEQ ID NO: 17549 - protein, 489 aa, Homo sapiens; identical to SEQ ID NO: 2086

SEQ ID NO: 17550 - DNA, 2805 bp, Homo sapiens
agagcgctcccgggtaggcatttgccccggtgggacacctcaccacagcagtgtgtggcaggcccccgtggagaatcaacgcagtggctgaacaccgggaaggaatgggcacttggagtctggacatctaaaacttgaaatggcggctgcggcggctcgagtggtgttgtcatccgcggcgcggcggcggctctggggtttcagcgagagtcttctaatccgaggcgctgcgggacggtcattatattttggagagaacagattaagaagtacacaggctgctacccaagttgttctgaatgttcctgaaacaagagtaacatgtttagaaagtggactcagagtagcttcggaagactctgggctctcaacatgcacagttggactctggattgatgctggaagtagatacgaaaatgagaagaacaatggaacagcacactttctggagcatatggctttcaagggcaccaagaagagatcccagttagatctggaacttgagattgaaaatatgggtgctcatctcaatgcctatacctccagagagcagactgtatactatgccaaagcattctctaaagacttgccaagagctgtagaaattcttgctgatataatacaaaacagcacattgggagaagcagagattgaacgtgagcgtggagtaatccttagagagatgcaggaagttgaaaccaatttacaagaagttgtttttgattatcttcatgccacagcttatcaaaatactgcacttggacggacaattttgggaccaactgaaaatatcaaatctataagtcgtaaggacttagtggattatataaccacacattataaggggccaagaatagtgcttgctgctgctggaggtgtttcccatgatgaattgcttgacttagcaaagtttcatttcggtgactctttatgcacacacaaaggagaaataccagctctgcctccctgcaaattcacaggaagtgagattcgtgtgagggatgacaagatgcctttggcgcaccttgcaatagctgttgaagctgttggttgggcacatccagatacaatctgtctcatggttgcaaacacgctgattggcaactgggatcgctcttttgggggaggaatgaatttatctagcaagctggcccagctcacttgtcatggcaatctttgccatagctttcagtctttcaacacttcctacacagatacaggattatggggactgtatatggtttgtgaatcatccactgttgcagacatgctacatgttgttcaaaaagaatggatgcgactctgtacaagtgtcacagaaagtgaggttgcacgagccagaaatcttctgaaaacaaacatgttgttgcagcttgatggttcaactccaatttgtgaagatattggtaggcaaatgttatgctataatagaaggattcccatccctgagcttgaagcaagaattgatgctgtgaatgctgagacaattcgagaagtatgtaccaaatacatttataataggagtccagctattgctgctgttggtcccattaagcaactaccagattttaaacagatacgcagtaacatgtgttggcttcgtgattaaaatgctcctaatcaagattgtttgaacacatgtatttataaaacagagctagagaaaaataaaaatgaacatgtatatacatttggaaatttgaattaaatactgtatcatactttcaaaggataaaaagactacccctctgaaggttgttttgtattaatggtcagtctttgttctctgagaaattatgttggaagcagcatactttcaaattattaccatgagtataattttaagaatgaaaatgtttacagtattttcagttttattataaaaatgcacacacaacaaagattgtcatttcttggctctacttgcattcagcacttgttcttgagcagctttctttgcttttaccatctcgacaagttcctaggaagggagaaaggtgtgatttaagaagttgcgatttaaaaacagacattttaatctagtgtttggtgtaaagaattcaagcaactaagatagatagtactaaatatactgatttcattatctgccagggcctagaaagtttctaaggttgctcatttcttcctcataatattgaccccataactactggttttgaaataagcactatattattaaccacttaatagacataaaatatgagctatatcacccaagctacaatttaaaatacaacaatctataaacgcttaagtctgcaaccttgtatcgtttcatgcagtccttctttgtcctgccaggcaccgcttctgctattttttcccatctttcaggtgtatttactgggtatgttttcaaagcttgttccaaaagcttctgttcttctgttgtccaaggggtgaagtctgtatatggacctgattaagaaaaatttttatttgaaaactgtctttgaacatgttctcagacaagtcttgtggtccacaagtattcgctaagtgcccatttcaatctgggatgtgtcattttgaaaataaacttgtagagatgagagatacatatagccctctgagtgttaataagagaaaaaatttcagatagctcacatcccagaaaataaaatctcaaaggcttttaaaacacaatagtaaagatctaccttgtactgtttatctcttaaaaatcaatgtaatacactcaccagactggtaaaaagccatatttaaatttatagtactgttggactcttggactcaaaaacacaaccacaattcattaagagt

SEQ ID NO: 17551 - protein, 489 aa, Homo sapiens; identical to SEQ ID NO: 2086

SEQ ID NO: 17552 - DNA, 595 bp, Homo sapiens
atgctgtctttgcaggtgccatgcctacaatggcaagtgtcaagctgtctacacttcatcccattgtgaatcatccacattacgaagatgcagacttgagatttatacttcaagatggacaagaagttctatcagctgatgagaaatgatgccagatggtaactcagatatacaagaaatactgaaatgcgctggaaaaggcctggttgcagcatgcttgaaatctgggatgtggaagacccttccaatgcagctaaccctcccttatgtagcgtcctccttgagccgagattgtgccactgcactccagcctgggcgacaaatcaagaccccgtctccaaaaaaaaaaaaaacaaaacttgattgggatccaaaatcatacaactatacactaaaatcagtgaatattaccttatgtaaattaaaaattaggaaatcaaaagaaaagcatacatataaaaaacagttttttctaagcatttctcatttgtagggtgtttgaattacgttgtatgttgtctcatttcacccccataacaaatctatgaaagaggtacttttatccccatgttaacgtgaataaacccaggtttgg

SEQ ID NO: 17553 - protein, 115 aa, Homo sapiens
MMPDGNSDIQEILKCAGKGLVAACLKSGMWKTLPMQLTLPYVASSLSRDCATALQPGRQIKTPSPKKKKTKLDWDPKSYNYTLKSVNITLCKLKIRKSKEKHTYKKQFFLSISHL

SEQ ID NO: 17554 - DNA, 540 bp, Homo sapiens
tgttggtgatatttcgcgtgttttagctacaaacgtttatctaagatgctgtctttgcaggtgccatgcctacaatggcaagtgtcaagctgtctacacttcatcccattgtgaatcatccacattacgaagatgcagacttgaggcctggttgcagcatgcttgaaatctgggatgtggaagacccttccaatgcagctaaccctcccttatgtagcgtcctccttgagccgagattgtgccactgcactccagcctgggcgacaaatcaagaccccgtctccaaaaaaaaaaaaaacaaaacttgattgggatccaaaatcatacaactatacactaaaatcagtgaatattaccttatgtaaattaaaaattaggaaatcaaaagaaaagcatacatataaaaaacagttttttctaagcatttctcatttgtagggtgtttgaattacgttgtatgttgtctcatttcacccccataacaaatctatgaaagaggtacttttatccccatgttaacgtgaataaacccaggtttgg

SEQ ID NO: 17555 - protein, 80 aa, Homo sapiens
MPTMASVKLSTLHPIVNHPHYEDADLRPGCSMLEIWDVEDPSNAANPPLCSVLLEPRLCHCTPAWATNQDPVSKKKKNKT

SEQ ID NO: 17556 - DNA, 1768 bp, Homo sapiens
ttaaatggactaatgatgggattgttcttcatatatggaacatacctaagtggtactgaactgggaggtcttattacagtactgtgcttctttttcaaccatggagaggccacctgtgtgatgtggacaccacctctccgtgaaagtttttcctatcctttccttgtacttcagatgtatgttttaactttgattctcaggacctcaagcaatgatagaaggcccttcattgcactctgtctttccaatgttgcttttatgcttccctggcaatttgctcagtttatactttttacacagatagcatcattatttcccatgtatgttgtgggatacattgaaccaagcaaatttcagaagatcatttatatgaacatgatttcagttacccttagtttcattttgatgtttggaaattcaatgtacttatcttcttattattcttcatctttgttaatgacatgggcaataattctaaagagaaatgaaattcaaaaactgggagtatctaaactcaactgctggctaattcaaggtagtgcctggtggtgtggaacaatcattttgaaatttctgacatctaaaatcttaggcgtttcagaccatatttgcctgagtgatcttatagcagccggaatcttaaggtatacagattttgatactttaaaatacacctgttctcccgaatttgacttcatggaaaaagcgactctgctgatatacacaaagacattattgcttccagttgttatggtgattacatgttttatctttaaaaagactgttggtgatatttcgcgtgttttagctacaaacgtttatctaagaaaacagctccttgaacacagtgagctggcttttcacacattgcagttgttagcatttactgcccttgccattttaattttgaggctaaagctgtttttgacacagcacatgtgtgttatggcttccttgatatgctcttgacggctctttggctggctttttcgcagagttcgcagagagaatgttatctttggcattctaacagtgatgtcaatacaaggttatgcaaacctctgtaatcaatggagcataacaggagaatttaatgatttgcctcaggaagaacttttacagtggatcaaatacaataccgtaccagatgctgtctttgcaggtgccatgcctacaatggcaagtgtcaagctgtctacacttcatcccattgtgaatcatccacattacgaagatgcagacttgagggcttggacaaaaatagtttattctacatatagtggaaaatctgccaaagaagtaagagataaattgttggagttacatgtgaattattatgttttagaagaggcatggtgtgttgtgagaactaagcctggttgcagcatgcttgaaatctgggatgtggaagacccttccaatgcagctaaccctcccttatgtagcgtcctccttgagccgagattgtgccactgcactccagcctgggcgacaaatcaagaccccgtctccaaaaaaaaaaaaaacaaaacttgattgggatccaaaatcatacaactatacactaaaatcagtgaatattaccttatgtaaattaaaaattaggaaatcaaaagaaaagcatacatataaaaaacagttttttctaagcatttctcatttgtagggtgtttgaattacgttgtatgttgtctcatttcacccccataacaaatctatgaaagaggtacttttatccccatgttaacgtgaataaacccaggtttgg

SEQ ID NO: 17557 - protein, 318 aa, Homo sapiens
MMGLFFIYGTYLSGTELGGLITVLCFFFNHGEATCVMWTPPLRESFSYPFLVLQMYVLTLILRTSSNDRRPFIALCLSNVAFMLPWQFAQFILFTQIASLFPMYVVGYIEPSKFQKIIYMNMISVTLSFILMFGNSMYLSSYYSSSLLMTWAIILKRNEIQKLGVSKLNCWLIQGSAWWCGTIILKFLTSKILGVSDHICLSDLIAAGILRYTDFDTLKYTCSPEFDFMEKATLLIYTKTLLLPVVMVITCFIFKKTVGDISRVLATNVYLRKQLLEHSELAFHTLQLLAFTALAILILRLKLFLTQHMCVMASLICS

SEQ ID NO: 17558 - DNA, 1283 bp, Homo sapiens
gcacagtgcctagaatacagtaggtgtactataaatattttgtaaagagacaacttttctgaaactaaaaatatttatgttttacccaataatttttcttctggaaatttatgctaaggaaatattcagagatgcttacaaagttttatgcatgagtgtccgtgttatttgtaattgtgaaaaatgaaaataactcaaaagtttcagtggtcatctaaagtattgtatacactgtatatataggttgaatagaaggtcatcctattcatttattaatgagaggtacaatctccagggatctgtaaaatctattttgtcttaaccaaagaacaaatttttgacatatcttgaataggatgactataaattatgacttttaaattgtcgtaatttttgtactattatgtgatatttttatttttatgtatgttcctaagtagtttagagatagtcacattttaaaaatccaagatcaaacaaatgaatcttatttttatgtattcatagtatagaagaccttcagtaaatagataatatttttgttttattctagaaaacagctccttgaacacagtgagctggcttttcacacattgcagttgttagcatttactgcccttgccattttaattttgaggctaaagctgtttttgacacagcacatgtgtgttatggcttccttgatatgctcttgacgggtaagggattcattcttgtataacaatactataaaaactatagcagctatacttagtagttaccgtggctttgctgactaattcaaaatataaacacactaagtgtttttaacttaactaagttaaatgatttaaaatattacttcgtgattcactataagcaagaaaagcaatttcaagtggctttgaaaagtatttctggattttaattgatatttctataacaagtgattaggcaaacatttcccctctgttaatatcctgtccatgaacataaccttttagagttcaggtttgtgtaagagtgcctggcacagtggctcacacctgtaatcccagcactttgggaggccgagatgggcagatcacttgaggccaggagttcgagaccagcccggccaacatggtgaaactccatctctactaaaaatacaaaaattagccgggtgtggtggcgagtgcctgtaattccagctacttgggaggctgaggcaggagaatcgcttgaacctgggaggcagaggctgcagtcagccaagatcgcaccacagcactctaacctgggtgacagagtgagactgtctc

SEQ ID NO: 17559 - protein, 36 aa, Homo sapiens
MFYPIIFLLEIYAKEIFRDAYKVLCMSVRVICNCEK

SEQ ID NO: 17560 - DNA, 667 bp, Homo sapiens
tattaatgaatcagagcattttaaatattgcagtattccttacaaaagtttcattgatttgattctattcacagactgttggtgatatttcgcgtgttttagctacaaacgtttatctaagaaaacagctccttgaacacagtgaggtaaagctttcattttaatctctggtagacttgtgtattaaattctagtttgagggtaattgacaaaggtataaccttgctgctgatgcaccatcagtagtgagttgttcagcattggtgataaatttctgctgatccttctcactctttcatctgctcttacttttgaatagtaataaggatttaaaagctagaaggctgatttatgactatactacagaattaaattaaattgcattcatttaacaataacaagcatttggtttctagcctgctgagctaatcagctacagtccattggggcaggcacccttggccctgtgactggtggccatctgccaccacgtagatttgctggtcagtcagtgacaagctcagaagtgttgaaggatacaaaagatactaaagtcatgttcctgcccttcggtatgtgtaattttacaaaggagacaaataagacaacattttatgtcgtgtaaaattattttgtggcataaaaaggaaaagatcagtgtgggctg

SEQ ID NO: 17561 - protein, 33 aa, Homo sapiens
FYSQTVGDISRVLATNVYLRKQLLEHSEVKLSF

SEQ ID NO: 17562 - DNA, 503 bp, Homo sapiens
ggacacaaatactcagttcatagcactgcaggtatagttttgaggaccctagctttatgtattagtctcaattccaacttcttaccttgcatagacccaaggcctcttctgctgccctccccttacaatacaagcctatagttggaaccttattctacaggcctttataaagactgccaggggtggtgcttctctgctgattaatactgtattttttaaaaataatcttttttctagcatcggagaagttctctttcacatgagcaataattctaaagagaaatgaaattcaaaaactgggagtatctaaactcaactgctggctaattcaaggtagtgcctggtggtgtggaacaatcattttgaaatttctgacatctaaaatcttaggcgtttcagaccatatttgcctgagtgatcttatagcagccggaatcttaaggtatacagattttgatactttaaaatacacctgttctcccgaatttgacttcatggaaaaa

SEQ ID NO: 17563 - protein, 46 aa, Homo sapiens
GHKYSVHSTAGIVLRTLALCISLNSNFLPCIDPRPLLLPSPYNTSL

SEQ ID NO: 17564 - DNA, 452 bp, Homo sapiens
aatgacaggcttactgaatatcctcttgtaattaatgcagtaaaacgcttccatatttatccagaggtaatcatagcctcctggtatcgcacattcatgggaatagtgaatttatttggactagaaactaagacctgctggaatgtcaccagaatagaacctcttaatgaagttcaaagctgtgaaggattgcgagatcctgcttgcttttatgttggtgtaatctttattttaaatggactaatgatgggattgttcttcatatatggaacatacctaaggatgtcatgcccagagctgtagcagtcatcttgtgaccataagggaaaggtcataaaaatagcggatatatctggcctaccatccttctgctgctgaaccaatgccaacagatacttacctttcattttcttgttgaatgatataataaacaacatccatattgtgtaagc

SEQ ID NO: 17565 - protein, 68 aa, Homo sapiens
MGIVNLFGLETKTCWNVTRIEPLNEVQSCEGLRDPACFYVGVIFILNGLMMGLFFIYGTYLRMSCPEL

SEQ ID NO: 17566 - DNA, 600 bp, Homo sapiens
tttgggaggactgtggatgattatgaatgacaggcttactgaatatcctcttgtaattaatgcagtaaaacgcttccatatttatccagaggtaatcatagcctcctggtatcgcacattcatgggaatagtgaatttatttggactagaaactaagacctgctggaatgtcaccagaatagaacctcttaatgaagttcaaagctgtgaaggcatgtttcctccaaaaatgctgtcatttgtaaacattcataaacatttaataatattatgattcacttttaagaattattgtaaaattctgttgttgatttaaaaaacattagaactgactcacctcaatgagtattttacattttgaagtagttttctgagaaggctgtgtacttaaaaatttgagtataaattttggaatttgagtattaacatatcccattgtaaggcaaccttgactataagttagtcttctatttcagaatgagaagatacagaaagatgttttttggggtagcttcaatatataaattttgaggatacattaaatagtcaaatagctatttgtaatagctaatgtataaatttaattatgcatacatattt

SEQ ID NO: 17567 - protein, 85 aa, Homo sapiens
MIMNDRLTEYPLVINAVKRFHIYPEVIIASWYRTFMGIVNLFGLETKTCWNVTRIEPLNEVQSCEGMFPPKMLSFVNIHKHLIIL

SEQ ID NO: 17568 - DNA, 646 bp, Homo sapiens
ataaatcttgctactgctcactctttgggtccacgctgcttttgtgagctgtaacactcaccatgaagatctgcagcttcactcctgagcccagcgagaccacgagcccaccgggaggaacgaacaactccagacacgccaccttaagagctgtaacactcaccgcgagggtccaccgcttcattcttgaagtcagtgagaccaagaacccaccaattccggacacaagactatgagggactttattattcttacttcaagaccattattgaagcaccttcatttttgggaggactgtggatgattatgaatgacaggcttactgaatatcctcttgtaattaatgcagtaaaacgcttccatatttatccagagaattctggagtccaaggaagaccaagatcaaggcgccagcagatttggtgtctggtgaaggctgctctccgcttccaagatggtgccttgatgttgcatcttcctgaaggagaggaacactgtgtcctcacatggcagacagtaggagagtaatcatagcctcctggtatcgcacattcatgggaatagtgaatttatttggactagaaactaagacctgctggaatgtcaccagaatagaacctcttaatgaagttcaaagctgtgaagg

SEQ ID NO: 17569 - protein, 75 aa, Homo sapiens
MIMNDRLTEYPLVINAVKRFHIYPENSGVQGRPRSRRQQIWCLVKAALRFQDGALMLHLPEGEEHCVLTWQTVGE

SEQ ID NO: 17570 - DNA, 3853 bp, Homo sapiens
gagagcagagacgttcctaatgcccggagcaccaccggcgggccggcggttccgttggcttccctgacacacttcctacagtcatttctttcagctgagatcttccccttcaatacctcgttaattaacgtgtaaccttttggttaaaatgtcagagctaagactaaacgcgaagaaaagaatgaaaccacgggaagttcttcagacttagtcgccagcaaggttatggcccgaagcggtgcaggggcggcgcgcggggaagctactggcggagctgtgcgcactgcgggtgctgcaggcgctggggagagtgtggagaggctgcgtggagctgtgcgctcggggtgggggctgcactcccaatgaagcgcgtgaagggcaagcggtgatgggttctgcgccagtggggctgggagcctgtcgggggctgtacgtgaggctgcgcgcaagtcgccatgacgaccaggaggtccgctagtcaacggctcgtcaacggctgcggggacaagtccgttgaggctgccaggcgagtcaggcctttctggacctcgcctgactcggctgggctgtgcctgaaattgacccagctccactaggaattatgaagaaacaaggaccgtctttgtggcaattctacattggttacatttagtaacactttttgaaaatgatcatcatttctctcacctctcatctttggaacgggagatgactttttgcattgaaacggttaggtttcttcttctaacgaattaatttgtggtttaagaatagccagaccgagaggtgacagcatgctggcagtcctcagagcccttgcttgctctcggcacctcccctgcctgggctcccgctttggtggcatttgaggagcccttcagtcccccactgcactgtgggagcccctttctgggctggccaaggccggagcccactccctcagcttgcagggaggtgtggagggagagacacgagcgggaaccggggctgtgtgctgcacttgcgggccatctggagttccgggtgggcgtgggcttggtgggccccgcactcagagcagccagccagccctgctggccccgggcaatgggggacttagcacctgggccagtggctgcggagggtgtactgagtcccccagcagtgctggcccaccggcgctgcgctcgatttctcgctgggccttggctgccttcccacggggcagggctcgggacctgcagcccgccatgcctgagcctcctacccaatccatgggctcctgtgcggcctgagcctccccgacgagcaccaccccctgctccacggcgcccagtcccatcgaccacgcaagggctgaggaatgcgagcgcccggcacaggactggcaggcagctccacctgcagccccagtgcaggatccactaggtgaagccagctgggctcctgagtctggtggggacgtggagagtctttatatctagctcagggattgtaaatacaccaatcagcaccctgtgtttagctcaaggtttgtgagtgcaccagtcaacactctgtatctagctgctctggtgagggcgtggagagtctttatgtctagctcaaggattgtaaatacaccaatcagcactctgtgtctagctcaaggattgtaaatacaccaatcggcactctgtatctagctcaaggtttgtaaacacaccaatcagcaccctgtgtttagctcaaggtttgtgagtgcaccagtcgacactctgtatctagctgccctgatggggacgtggagaacctttgtatctagctcagggattgtaaacgcaccaatcagcgccctgacgaaacaggccactcggctctaccaatcagcaggatgtaggtggggccagataagagaataaaagcgggctgcccgagccagcattggcaacccgctcgggtccccttccacactgtggaagctttgttctttcgctctttgcaataaatcttgctactgctcactctttgggtccacgctgcttttgtgagctgtaacactcaccatgaagatctgcagcttcactcctgagcccagcgagaccacgagcccaccgggaggaacgaacaactccagacacgccaccttaagagctgtaacactcaccgcgagggtccaccgcttcattcttgaagtcagtgagaccaagaacccaccaattccggacacaagactatgagggactttattattcttacttcaagaccattattgaagcaccttcatttttgggaggactgtggatgattatgaatgacaggcttactgaatatcctcttgtaattaatgcagtaaaacgcttccatatttatccagaggtgagtcataatttgagacaaataatatttgtagagtgatcctctttgtcagataaaaatagtaagcacaatcttgttaagaaagggaggggacgtttcaggtttattaattgtatgtatccttatagttgagtagaatatcataagttcctcttaaaatttaaagaccccagaaacagttctctcatgaactcgaagaatgaaccttagtgtgtaaataatggccagggtaatagacaagccaaatggaaaagagggtcatgggagccaaaaagttctaaatagggatgggcttttggccttggacacctcgtgggtgagcacgatgaccacgtgaagggacagtggagtgatgagcttgaatagtgatcttggagttatgttagtaaagtaagatttatttagtcacacagccagaaatctattactattttccaacacttagcctaaaagagtatggttgttatagtagtctataaatgctagaaatttgaaaaacggagacaaaattagtgaactcagtttgtgaactcaagataaatgcttaatttgacaccatggtaaatactactgttgagtttaaagttgtctcagaatccagcatattaatgaaaagttactgctttctagtcctttattcatatttttatagcttttaaaaattattattctttagattttgaaatgcttaaaactacagacttagaaaataatattcaaatatgtgtgatcaaccatctaaaataaataaatgctaacctttgtcatttttgcatcagctattttaaaataattaaaatattataaatacagttaaaatcacctttgttctgctcctagtccaacttatacctttattaaaatttggtgtgcgtatccatccaatctctgttttcagagattgttttattatatgctttaagtccacataaatgatctcatactgaatgtgtcactgtaggattttttcttcaaaattgtatttttgaactttctgtatatatatatttctttaattttaaccattttatgaattgtaaagtttatgtatttccccatcttaatatattatttccagttttttgattacaagcaatgtaatctaaaatgtacatttttgtatggttttcttctgtatatgtgcaatattttgtctaggatatatacctagaagtggaattgttgttatagagtgtgtgctttttcagctttaccagatattggtaaattgctgtctgaagcaaatgtagcagttcacactgctgtctagaattttctcatatccttattagattttgaattgtcagaccctgcgatttttactcttatgatggctgtgatatgctttttgttttaatttgtacttcctttattatttatggggataaatatatttccatgtttaataagcatttggatttgttcttctgtcaacaacatatataaatctttgtcaccaaatcagcttttttgaggtatgacttacatgtaataaaatgtgccaattttgattgta

SEQ ID NO: 17571 - protein, 106 aa, Homo sapiens
MGDLAPGPVAAEGVLSPPAVLAHRRCARFLAGPWLPSHGAGLGTCSPPCLSLLPNPWAPVRPEPPRRAPPPAPRRPVPSTTQGLRNASARHRTGRQLHLQPQCRIH

SEQ ID NO: 17572 - DNA, 3284 bp, Homo sapiens
gggtgtggggggctgtgcgtggggctgccctcaccggaagctgcacgctcggggaagcgcggaggcgggggtgctgcgcgcgctggggagcacgtggggggacacgcagggactgcccgcgcgaatggcttccaacgcatgcgccccaccctacatttcacagtcgccatgacgaccaggaggtccgctagtcaacggctcgtcaacggctgcggggacaagtccgttgaggctgccaggcgagtcaggcctttctggacctcgcctgactcggctgggctgtgcctgaaattgacccagctccactaggaattatgaagaaacaaggagtaagcccaaagccgctgcaatcttcccgccccagcccgtctaagcggccctgcggggcctcccccgcccgggagcgggaggtggaaaagtcggccctaggcggcgggaaactgccggggggcgccaggaggtcctccccggggaggatcccaaatctgaaaaagcgaaaaggcttggagctaaaggtggtggccaaggcccttctcggccccttccagttcgtctgtaattccctggcgcagctccgggaagaggtgcacgaactgcaggcgcggtggttccccagcagaaccactctgcatcgccgtctttgtggcaattctacattggttacatttagtaacactttttgaaaatgatcatcatttctctcacctctcatctttggaacgggagatgactttttgcattgaaacggttaggtttcttcttctaacgaattaatttgtggtttaagaatagccagaccgagaggtgacagcatgctggcagtcctcagagcccttgcttgctctcggcacctcccctgcctgggctcccgctttggtggcatttgaggagcccttcagtcccccactgcactgtgggagcccctttctgggctggccaaggccggagcccactccctcagcttgcagggaggtgtggagggagagacacgagcgggaaccggggctgtgtgctgcacttgcgggccatctggagttccgggtgggcgtgggcttggtgggccccgcactcagagcagccagccagccctgctggccccgggcaatgggggacttagcacctgggccagtggctgcggagggtgtactgagtcccccagcagtgctggcccaccggcgctgcgctcgatttctcgctgggccttggctgccttcccacggggcagggctcgggacctgcagcccgccatgcctgagcctcctacccaatccatgggctcctgtgcggcctgagcctccccgacgagcaccaccccctgctccacggcgcccagtcccatcgaccacgcaagggctgaggaatgcgagcgcccggcacaggactggcaggcagctccacctgcagccccagtgcaggatccactaggtgaagccagctgggctcctgagtctggtggggacgtggagagtctttatatctagctcagggattgtaaatacaccaatcagcaccctgtgtttagctcaaggtttgtgagtgcaccagtcaacactctgtatctagctgctctggtgagggcgtggagagtctttatgtctagctcaaggattgtaaatacaccaatcagcactctgtgtctagctcaaggattgtaaatacaccaatcggcactctgtatctagctcaaggtttgtaaacacaccaatcagcaccctgtgtttagctcaaggtttgtgagtgcaccagtcgacactctgtatctagctgccctgatggggacgtggagaacctttgtatctagctcagggattgtaaacgcaccaatcagcgccctgacgaaacaggccactcggctctaccaatcagcaggatgtaggtggggccagataagagaataaaagcgggctgcccgagccagcattggcaacccgctcgggtccccttccacactgtggaagctttgttctttcgctctttgcaataaatcttgctactgctcactctttgggtccacgctgcttttgtgagctgtaacactcaccatgaagatctgcagcttcactcctgagcccagcgagaccacgagcccaccgggaggaacgaacaactccagacacgccaccttaagagctgtaacactcaccgcgagggtccaccgcttcattcttgaagtcagtgagaccaagaacccaccaattccggacacaagactatgaggtagaaatgtattaggaattgaaatgaacttttggcgaactgcactgtttcataagctattacccaggtttattatttaaatagtaaagtgtttgagattatttttctgttacttcattatctctcaccctttcctaatgcagacttctttttaaggtaataaagatgaattataatagctgaggaaggaggacaaagaaagcactgaagaagtgataaaggggaatgaaatgagatgttatcagaaattgctttctctttggctacggttaggagatcccatgttttacctgggccttttaatgatgacgattattatttggctctcttttgatttcaagataatctcttttaagagataacttttgatatagtttttaaataattttctgtttttcaatacttaatcttaaaaatggagttttctgccgtacgtatctcacataattattgtgaggagtaagtgggatagcaaatgccaaaattgcgcaattttacatttagaagacagcacaaccgtccatcttccagatctgctcacagctggtcgggggcctagtgaagcattgaaactggctctcctcagtctagccattgctttttgtttaaattatagtaaaatttagatttaaatttgtaataaaaaatttcaatgtttatcatttaagtgtacaattcagtgacattaagtacattcatgttgtcttgcaactattaaccactgtccacatccagaacattttgctatcccaaacagaaactctacccactaaacactaatcacacccagctctattttctgtctctgtgattttgcctatgccaggtccctcagtcactgctttttaattttcatccctatattgccccataaagtttcaaagcattggatacattaacatatgtatgacatttgaacattttaaaggtatttccaaagacagaatataaaatattattaaataaagagtgtaactgtggcagagtctggactttggtgacagatcgctggattctaatagcggttctatgctttattgtatgatggctagtcaggtcacctctca

SEQ ID NO: 17573 - protein, 122 aa, Homo sapiens
MKKQGVSPKPLQSSRPSPSKRPCGASPAREREVEKSALGGGKLPGGARRSSPGRIPNLKKRKGLELKVVAKALLGPFQFVCNSLAQLREEVHELQARWFPSRTTLHRRLCGNSTLVTFSNTF

SEQ ID NO: 17574 - DNA, 3197 bp, Homo sapiens
gggtgtggggggctgtgcgtggggctgccctcaccggaagctgcacgctcggggaagcgcggaggcgggggtgctgcgcgcgctggggagcacgtggggggacacgcagggactgcccgcgcgaatggcttccaacgcatgcgccccaccctacatttcacagtcgccatgacgaccaggaggtccgctagtcaacggctcgtcaacggctgcggggacaagtccgttgaggctgccaggcgagtcaggcctttctggacctcgcctgactcggctgggctgtgcctgaaattgacccagctccactaggaattatgaagaaacaaggagtaagcccaaagccgctgcaatcttcccgccccagcccgtctaagcggccctgcggggcctcccccgcccgggagcgggaggtggaaaagtcggccctaggcggcgggaaactgccggggggcgccaggaggtcctccccggggaggatcccaaatctgaaaaagcgaaaaggcttggagctaaaggtggtggccaaggcccttctcggccccttccagttcgtctgtaattccctggcgcagctccgggaagaggtgcacgaactgcaggcgcggtggttccccagcagaaccactctgcatcgccgtctttgtggcaattctacattggttacatttagtaacactttttgaaaatgatcatcatttctctcacctctcatctttggaacgggagatgactttttgcattgaaacggttaggtttcttcttctaacgaattaatttgtggtttaagaatagccagaccgagaggtgacagcatgctggcagtcctcagagcccttgcttgctctcggcacctcccctgcctgggctcccgctttggtggcatttgaggagcccttcagtcccccactgcactgtgggagcccctttctgggctggccaaggccggagcccactccctcagcttgcagggaggtgtggagggagagacacgagcgggaaccggggctgtgtgctgcacttgcgggccatctggagttccgggtgggcgtgggcttggtgggccccgcactcagagcagccagccagccctgctggccccgggcaatgggggacttagcacctgggccagtggctgcggagggtgtactgagtcccccagcagtgctggcccaccggcgctgcgctcgatttctcgctgggccttggctgccttcccacggggcagggctcgggacctgcagcccgccatgcctgagcctcctacccaatccatgggctcctgtgcggcctgagcctccccgacgagcaccaccccctgctccacggcgcccagtcccatcgaccacgcaagggctgaggaatgcgagcgcccggcacaggactggcaggcagctccacctgcagccccagtgcaggatccactaggtgaagccagctgggctcctgagtctggtggggacgtggagagtctttatatctagctcagggattgtaaatacaccaatcagcaccctgtgtttagctcaaggtttgtgagtgcaccagtcaacactctgtatctagctgctctggtgagggcgtggagagtctttatgtctagctcaaggattgtaaatacaccaatcagcactctgtgtctagctcaaggattgtaaatacaccaatcggcactctgtatctagctcaaggtttgtaaacacaccaatcagcaccctgtgtttagctcaaggtttgtgagtgcaccagtcgacactctgtatctagctgccctgatggggacgtggagaacctttgtatctagctcagggattgtaaacgcaccaatcagcgccctgacgaaacaggccactcggctctaccaatcagcaggatgtaggtggggccagataagagaataaaagcgggctgcccgagccagcattggcaacccgctcgggtccccttccacactgtggaagctttgttctttcgctctttgcaataaatcttgctactgctcactctttgggtccacgctgcttttgtgagctgtaacactcaccatgaagatctgcagcttcactcctgagcccagcgagaccacgagcccaccgggaggaacgaacaactccagacacgccaccttaagagctgtaacactcaccgcgagggtccaccgcttcattcttgaagtcagtgagaccaagaacccaccaattccggacacaagactatgaggtagaaatgtattaggaattgaaatgaacttttggcgaactgcactgtttcataagctattacccaggtttattatttaaatagtaaagtgtttgagattatttttctgttacttcattatctctcaccctttcctaatgcagacttctttttaaggtaataaagatgaattataatagctgaggaaggaggacaaagaaagcactgaagaagtgataaaggggaatgaaatgagatgttatcagaaattgctttctctttggctacggttaggagatcccatgttttacctgggccttttaatgatgacgattattatttggctctcttttgatttcaagataatctcttttaagagataacttttgatatagtttttaaataattttctgtttttcaatacttaatcttaaaaatggagttttctgccgtacgtatctcacataattattgtgaggagtaagtgggatagcaaatgccaaaattgcgcaattttacatttagaagacagcacaaccgtccatcttccagatctgctcacagctggtcgggggcctagtgaagcattgaaactggctctcctcagtctagccattgctttttgtttaaattatagtaaaatttagatttaaatttgtaataaaaaatttcaatgtttatcatttaagtgtacaattcagtgacattaagtacattcatgttgtcttgcaactattaaccactgtccacatccagaacattttgctatcccaaacagaaactctacccactaaacactaatcacacccagctctattttctgtctctgtgattttgcctatgccaggtccctcagtcactgctttttaattttcatccctatattgccccataaagtttcaaagcattggatacattaacatatgtatgacatttgaacattttaaaggtatttccaaagacagaatataaaatattattaaataaagagtgtaactgtg

SEQ ID NO: 17575 - protein, 122 aa, Homo sapiens; identical to SEQ ID NO: 17573

SEQ ID NO: 17576 - DNA, 2419 bp, Homo sapiens
gggtgtggggggctgtgcgtggggctgccctcaccggaagctgcacgctcggggaagcgcggaggcgggggtgctgcgcgcgctggggagcacgtggggggacacgcagggactgcccgcgcgaatggcttccaacgcatgcgccccaccctacatttcacagtcgccatgacgaccaggaggtccgctagtcaacggctcgtcaacggctgcggggacaagtccgttgaggctgccaggcgagtcaggcctttctggacctcgcctgactcggctgggctgtgcctgaaattgacccagctccactaggaattatgaagaaacaaggagtaagcccaaagccgctgcaatcttcccgccccagcccgtctaagcggccctgcggggcctcccccgcccgggagcgggaggtggaaaagtcggccctaggcggcgggaaactgccggggggcgccaggaggtcctccccggggaggatcccaaatctgaaaaagcgaaaaggcttggagctaaaggtggtggccaaggcccttctcggccccttccagttcgtctgtaattccctggcgcagctccgggaagaggtgcacgaactgcaggcgcggtggttccccagcagaaccactctgcatcggggaattgaaaacaaggaattccccaaccaaacaggggcacaggctgtgtttgcagctcctgtaaaagctccatacccagagccgtgtctcccagctcccagccgtctttgtggcaattctacattggttacatttagtaacactttttgaaaatgatcatcatttctctcacctctcatctttggaacgggagatgactttttgcattgaaacggttaggtttcttcttctaacgaattaatttgtggtttaagaatagccagaccgagaggtgacagcatgctggcagtcctcagagcccttgcttgctctcggcacctcccctgcctgggctcccgctttggtggcatttgaggagcccttcagtcccccactgcactgtgggagcccctttctgggctggccaaggccggagcccactccctcagcttgcagggaggtgtggagggagagacacgagcgggaaccggggctgtgtgctgcacttgcgggccatctggagttccgggtgggcgtgggcttggtgggccccgcactcagagcagccagccagccctgctggccccgggcaatgggggacttagcacctgggccagtggctgcggagggtgtactgagtcccccagcagtgctggcccaccggcgctgcgctcgatttctcgctgggccttggctgccttcccacggggcagggctcgggacctgcagcccgccatgcctgagcctcctacccaatccatgggctcctgtgcggcctgagcctccccgacgagcaccaccccctgctccacggcgcccagtcccatcgaccacgcaagggctgaggaatgcgagcgcccggcacaggactggcaggcagctccacctgcagccccagtgcaggatccactaggtgaagccagctgggctcctgagtctggtggggacgtggagagtctttatatctagctcagggattgtaaatacaccaatcagcaccctgtgtttagctcaaggtttgtgagtgcaccagtcaacactctgtatctagctgctctggtgagggcgtggagagtctttatgtctagctcaaggattgtaaatacaccaatcagcactctgtgtctagctcaaggattgtaaatacaccaatcggcactctgtatctagctcaaggtttgtaaacacaccaatcagcaccctgtgtttagctcaaggtttgtgagtgcaccagtcgacactctgtatctagctgccctgatggggacgtggagaacctttgtatctagctcagggattgtaaacgcaccaatcagcgccctgacgaaacaggccactcggctctaccaatcagcaggatgtaggtggggccagataagagaataaaagcgggctgcccgagccagcattggcaacccgctcgggtccccttccacactgtggaagctttgttctttcgctctttgcaataaatcttgctactgctcactctttgggtccacgctgcttttgtgagctgtaacactcaccatgaagatctgcagcttcactcctgagcccagcgagaccacgagcccaccgggaggaacgaacaactccagacacgccaccttaagagctgtaacactcaccgcgagggtccaccgcttcattcttgaagtcagtgagaccaagaacccaccaattccggacacaagactatgaggtagaaatgtattaggaattgaaatgaacttttggcgaactgcactgtttcataagctattacccaggtttattatttaaatagtaaagtgtttgagatt

SEQ ID NO: 17577 - protein, 156 aa, Homo sapiens
MKKQGVSPKPLQSSRPSPSKRPCGASPAREREVEKSALGGGKLPGGARRSSPGRIPNLKKRKGLELKVVAKALLGPFQFVCNSLAQLREEVHELQARWFPSRTTLHRGIENKEFPNQTGAQAVFAAPVKAPYPEPCLPAPSRLCGNSTLVTFSNTF

SEQ ID NO: 17578 - DNA, 2317 bp, Homo sapiens
gggtgtggggggctgtgcgtggggctgccctcaccggaagctgcacgctcggggaagcgcggaggcgggggtgctgcgcgcgctggggagcacgtggggggacacgcagggactgcccgcgcgaatggcttccaacgcatgcgccccaccctacatttcacagtcgccatgacgaccaggaggtccgctagtcaacggctcgtcaacggctgcggggacaagtccgttgaggctgccaggcgagtcaggcctttctggacctcgcctgactcggctgggctgtgcctgaaattgacccagctccactaggaattatgaagaaacaaggagtaagcccaaagccgctgcaatcttcccgccccagcccgtctaagcggccctgcggggcctcccccgcccgggagcgggaggtggaaaagtcggccctaggcggcgggaaactgccggggggcgccaggaggtcctccccggggaggatcccaaatctgaaaaagcgaaaaggcttggagctaaaggtggtggccaaggcccttctcggccccttccagttcgtctgtaattccctggcgcagctccgggaagaggtgcacgaactgcaggcgcggtggttccccagcagaaccactctgcatcgccgtctttgtggcaattctacattggttacatttagtaacactttttgaaaatgatcatcatttctctcacctctcatctttggaacgggagatgactttttgcattgaaacggttaggtttcttcttctaacgaattaatttgtggtttaagaatagccagaccgagaggtgacagcatgctggcagtcctcagagcccttgcttgctctcggcacctcccctgcctgggctcccgctttggtggcatttgaggagcccttcagtcccccactgcactgtgggagcccctttctgggctggccaaggccggagcccactccctcagcttgcagggaggtgtggagggagagacacgagcgggaaccggggctgtgtgctgcacttgcgggccatctggagttccgggtgggcgtgggcttggtgggccccgcactcagagcagccagccagccctgctggccccgggcaatgggggacttagcacctgggccagtggctgcggagggtgtactgagtcccccagcagtgctggcccaccggcgctgcgctcgatttctcgctgggccttggctgccttcccacggggcagggctcgggacctgcagcccgccatgcctgagcctcctacccaatccatgggctcctgtgcggcctgagcctccccgacgagcaccaccccctgctccacggcgcccagtcccatcgaccacgcaagggctgaggaatgcgagcgcccggcacaggactggcaggcagctccacctgcagccccagtgcaggatccactaggtgaagccagctgggctcctgagtctggtggggacgtggagagtctttatatctagctcagggattgtaaatacaccaatcagcaccctgtgtttagctcaaggtttgtgagtgcaccagtcaacactctgtatctagctgctctggtgagggcgtggagagtctttatgtctagctcaaggattgtaaatacaccaatcagcactctgtgtctagctcaaggattgtaaatacaccaatcggcactctgtatctagctcaaggtttgtaaacacaccaatcagcaccctgtgtttagctcaaggtttgtgagtgcaccagtcgacactctgtatctagctgccctgatggggacgtggagaacctttgtatctagctcagggattgtaaacgcaccaatcagcgccctgacgaaacaggccactcggctctaccaatcagcaggatgtaggtggggccagataagagaataaaagcgggctgcccgagccagcattggcaacccgctcgggtccccttccacactgtggaagctttgttctttcgctctttgcaataaatcttgctactgctcactctttgggtccacgctgcttttgtgagctgtaacactcaccatgaagatctgcagcttcactcctgagcccagcgagaccacgagcccaccgggaggaacgaacaactccagacacgccaccttaagagctgtaacactcaccgcgagggtccaccgcttcattcttgaagtcagtgagaccaagaacccaccaattccggacacaagactatgaggtagaaatgtattaggaattgaaatgaacttttggcgaactgcactgtttcataagctattacccaggtttattatttaaatagtaaagtgtttgagatt

SEQ ID NO: 17579 - protein, 122 aa, Homo sapiens; identical to SEQ ID NO: 17573

SEQ ID NO: 17580 - DNA, 1033 bp, Homo sapiens
tagtcaacggctcgtcaacggctgcggggacaagtccgttgaggctgccaggcgagtcaggcctttctggacctcgcctgactcggctgggctgtgcctgaaattgacccagctccactaggaattatgaagaaacaaggagggaattgaaaacaaggaattccccaaccaaacaggggcacaggctgtgtttgcagctcctgtaaaagctccatacccagagccgtgtctcccagctcccagccgtctttgtggcaattctacattggttacatttagtaacactttttgaaaatgatcatcatttctctcacctctcatctttggaacgggagatgactttttgcattgaaacggttaggtttcttcttctaacgaattaatttgtggtttaagaatagccagaccgagaggtgacagcatgctggcagtcctcagagcccttgcttgctctcggcacctcccctgcctgggctcccgctttggtggcatttgaggagcccttcagtcccccactgcactgtgggagcccctttctgggctggccaaggccggagcccactccctcagcttgcagggaggtgtggagggagagacacgagcgggaaccggggctgtgtgctgcacttgcgggccatctggagttccgggtgggcgtgggcttggtgggccccgcactcagagcagccagccagccctgctggccccgggcaatgggggacttagcacctgggccagtggctgcggagggtgtactgagtcccccagcagtgctggcccaccggcgctgcgctcgatttctcgctgggccttggctgccttcccacggggcagggctcgggacctgcagcccgccatgcctgagcctcctacccaatccatgggctcctgtgcggcctgagcctccccgacgagcaccaccccctgctccacggcgcccagtcccatcgaccacgcaagggctgaggaatgcgagcgcccggcacaggactggcaggcagctccacctgcagccccagtgcaggatccacta

SEQ ID NO: 17581 - protein, 105 aa, Homo sapiens
MGDLAPGPVAAEGVLSPPAVLAHRRCARFLAGPWLPSHGAGLGTCSPPCLSLLPNPWAPVRPEPPRRAPPPAPRRPVPSTTQGLRNASARHRTGRQLHLQPQCRI

SEQ ID NO: 17582 - DNA, 1007 bp, Homo sapiens
accaggaggtccgctagtcaacggctcgtcaacggctgcggggacaagtccgttgaggctgccaggcgagtcaggcctttctggacctcgcctgactcggctgggctgtgcctgaaattgacccagctccactaggaattatgaagaaacaaggactccgggaagaggtgcacgaactgcaggcgcggtggttccccagcagaaccactctgcatcgccgtctttgtggcaattctacattggttacatttagtaacactttttgaaaatgatcatcatttctctcacctctcatctttggaacgggagatgactttttgcattgaaacggttaggtttcttcttctaacgaattaatttgtggtttaagaatagccagaccgagaggtgacagcatgctggcagtcctcagagcccttgcttgctctcggcacctcccctgcctgggctcccgctttggtggcatttgaggagcccttcagtcccccactgcactgtgggagcccctttctgggctggccaaggccggagcccactccctcagcttgcagggaggtgtggagggagagacacgagcgggaaccggggctgtgtgctgcacttgcgggccatctggagttccgggtgggcgtgggcttggtgggccccgcactcagagcagccagccagccctgctggccccgggcaatgggggacttagcacctgggccagtggctgcggagggtgtactgagtcccccagcagtgctggcccaccggcgctgcgctcgatttctcgctgggccttggctgccttcccacggggcagggctcgggacctgcagcccgccatgcctgagcctcctacccaatccatgggctcctgtgcggcctgagcctccccgacgagcaccaccccctgctccacggcgcccagtcccatcgaccacgcaagggctgaggaatgcgagcgcccggcacaggactggcaggcagctccacctgcagccccagtgcaggatccacta

SEQ ID NO: 17583 - protein, 41 aa, Homo sapiens
MKKQGLREEVHELQARWFPSRTTLHRRLCGNSTLVTFSNTF

SEQ ID NO: 17584 - DNA, 894 bp, Homo sapiens
gggtgtggggggctgtgcgtggggctgccctcaccggaagctgcacgctcggggaagcgcggaggcgggggtgctgcgcgcgctggggagcacgtggggggacacgcagggactgcccgcgcgaatggcttccaacgcatgcgccccaccctacatttcacagtcgccatgacgaccaggaggtccgctagtcaacggctcgtcaacggctgcggggacaagtccgttgaggctgccaggcgagtcaggcctttctggacctcgcctgactcggctgggctgtgcctgaaattgacccagctccactaggaattatgaagaaacaaggagtaagcccaaagccgctgcaatcttcccgccccagcccgtctaagcggccctgcggggcctcccccgcccgggagcgggaggtggaaaagtcggccctaggcggcgggaaactgccggggggcgccaggaggtcctccccggggaggatcccaaatctgaaaaagcgaaaaggcttggagctaaaggtggtggccaaggcccttctcggccccttccagttcgtctgtaattccctggcgcagctccgggaagaggtgcacgaactgcaggcgcggtggttccccagcagaaccactctgcatcgccgtctttgtggcaattctacattggtaagatgtagtttcagtttgaaatatttaaaaacatttgaattaaaaattgccatcactctttgcatacagtaaaacaataacttctggctatatttgtagaacatctttatgtgcaccaatttatacatgtattttgcttttttacaaacctcatatgtgaaacagcatttacaaaatagatgcattaggggaatagtaacttatgaattaaaatatttttgctttaccaaat

SEQ ID NO: 17585 - protein, 139 aa, Homo sapiens
MKKQGVSPKPLQSSRPSPSKRPCGASPAREREVEKSALGGGKLPGGARRSSPGRIPNLKKRKGLELKVVAKALLGPFQFVCNSLAQLREEVHELQARWFPSRTTLHRRLCGNSTLVRCSFSLKYLKTFELKIAITLCIQ

SEQ ID NO: 17586 - DNA, 1263 bp, Homo sapiens
ccgcagtctcggcccgttccctccgtgttggcaacgggcactgactgtccgatacctcagcgatcgtaggagagcagagacgttcctaatgcccggagcaccaccggcgggccggcggttccgttggcttccctgacacacttcctacagtcatttctttcagctgagatcttccccttcaatacctcgttaattaacgtgtaaccttttggttaaaatgtcagagctaagactaaacgcgaagaaaagaatgaaaccacgggaagttcttcagacttagtcgccagcaaggttatggcccgaagcggtgcaggggcggcgcgcggggaagctactggcggagctgtgcgcactgcgggtgctgcaggcgctggggagagtgtggagaggctgcgtggagctgtgcgctcggggtgggggctgcactcccaatgaagcgcgtgaagggcaagcggtgatgggttctgcgccagtggggctgggagcctgtcgggggctgtacgtgaggctgcgcgcaagtcgccatgacgaccaggaggtccgctagtcaacggctcgtcaacggctgcggggacaagtccgttgaggctgccaggcgagtcaggcctttctggacctcgcctgactcggctgggctgtgcctgaaattgacccagctccactaggaattatgaagaaacaaggagtaagcccaaagccgctgcaatcttcccgccccagcccgtctaagcggccctgcggggcctcccccgcccgggagcgggaggtggaaaagtcggccctaggcggcgggaaactgccggggggcgccaggaggtcctccccggggaggatcccaaatctgaaaaagcgaaaaggcttggagctaaaggtggtggccaaggcccttctcggccccttccagttcgtctgtaattccctggcgcagctccgggaagaggtgcacgaactgcaggcgcggtggttccccagcagaaccactctgcatcggtaaggagaggtcaggagagccctaggagggaggcgcatcgcgcttttcttcagtcttgaaggagatcagtttaacaagcaagggtttgtgggtccctagtaggaaataatagcaaggtccgagtagacagaagttggccaaaaatcttgtcattgaaccaggggagagagagagatagggagtatattggtttgaagggctgtcagatcgcagagagtgttttaaggtctaggagttttaaaggctgaggggaaggatcaagggaagaggat

SEQ ID NO: 17587 - protein, 107 aa, Homo sapiens [sequence omitted]

SEQ ID NO: 17588 - DNA, 2500 bp, Homo sapiens
catcctctaccttccttctagcagaaatggcggctgcggcggctcgagtggtgttgtcatccgcggcgcggcggcggctctggggtttcagcgagagtcttctaatccgaggcgctgcgggacggtcattatattttggagagaacagattaagaagtacacaggctgctacccaagttgttctgaatgttcctgaaacaagagtaacatgtttagaaagtggactcagagtagcttcggaagactctgggctctcaacatgcacagttggactctggattgatgctggaactgtagaaattcttgctgatataatacaaaacagcacattgggagaagcagagattgaacgtgagcgtggagtaatccttagagagatgcaggaagttgaaaccaatttacaagaagttgtttttgattatcttcatgccacagcttatcaaaatactgcacttggacggacaattttgggaccaactgaaaatatcaaatctataagtcgtaaggacttagtggattatataaccacacattataaggggccaagaatagtgcttgctgctgctggaggtgtttcccatgatgaattgcttgacttagcaaagtttcatttcggtgactctttatgcacacacaaaggagaaataccagctctgcctccctgcaaattcacaggaagtgagattcgtgtgagggatgacaagatgcctttggcgcaccttgcaatagctgttgaagctgttggttgggcacatccagatacaatctgtctcatggttgcaaacacgctgattggcaactgggatcgctcttttgggggaggaatgaatttatctagcaagctggcccagctcacttgtcatggcaatctttgccatagctttcagtctttcaacacttcctacacagatacaggattatggggactgtatatggtttgtgaatcatccactgttgcagacatgctacatgttgttcaaaaagaatggatgcgactctgtacaagtgtcacagaaagtgaggttgcacgagccagaaatcttctgaaaacaaacatgttgttgcagcttgatggttcaactccaatttgtgaagatattggtaggcaaatgttatgctataatagaaggattcccatccctgagcttgaagcaagaattgatgctgtgaatgctgagacaattcgagaagtatgtaccaaatacatttataataggagtccagctattgctgctgttggtcccattaagcaactaccagattttaaacagatacgcagtaacatgtgttggcttcgtgattaaaatgctcctaatcaagattgtttgaacacatgtatttataaaacagagctagagaaaaataaaaatgaacatgtatatacatttggaaatttgaattaaatactgtatcatactttcaaaggataaaaagactacccctctgaaggttgttttgtattaatggtcagtctttgttctctgagaaattatgttggaagcagcatactttcaaattattaccatgagtataattttaagaatgaaaatgtttacagtattttcagttttattataaaaatgcacacacaacaaagattgtcatttcttggctctacttgcattcagcacttgttcttgagcagctttctttgcttttaccatctcgacaagttcctaggaagggagaaaggtgtgatttaagaagttgcgatttaaaaacagacattttaatctagtgtttggtgtaaagaattcaagcaactaagatagatagtactaaatatactgatttcattatctgccagggcctagaaagtttctaaggttgctcatttcttcctcataatattgaccccataactactggttttgaaataagcactatattattaaccacttaatagacataaaatatgagctatatcacccaagctacaatttaaaatacaacaatctataaacgcttaagtctgcaaccttgtatcgtttcatgcagtccttctttgtcctgccaggcaccgcttctgctattttttcccatctttcaggtgtatttactgggtatgttttcaaagcttgttccaaaagcttctgttcttctgttgtccaaggggtgaagtctgtatatggacctgattaagaaaaatttttatttgaaaactgtctttgaacatgttctcagacaagtcttgtggtccacaagtattcgctaagtgcccatttcaatctgggatgtgtcattttgaaaataaacttgtagagatgagagatacatatagccctctgagtgttaataagagaaaaaatttcagatagctcacatcccagaaaataaaatctcaaaggcttttaaaacacaatagtaaagatctaccttgtactgtttatctcttaaaaatcaatgtaatacactcaccagactggtaaaaagccatatttaaatttatagtactgttggactcttggactcaaaaacacaaccacaattcattaagagt

SEQ ID NO: 17589 - protein, 425 aa, Homo sapiens [sequence omitted]

SEQ ID NO: 17590 - DNA, 814 bp, Homo sapiens
tgtagaaattcttgctgatataatacaaaacagcacattgggagaagcagagattgaacgtgagcgtggagtaatccttagagagatgcaggaagttgaaaccaatttacaagaagttgtttttgattatcttcatgccacagcttatcaaaatactgcacttggacggacaattttgggaccaactgaaaatatcaagtaggtataacagaatttcttggtgtataagggaatttatgaatgttgaaaataaacatttacaaattttcaaaaagtatgtttcagaaagtaattttccccctggtaatctaagtgaaactgtatcccagctactcgggaggctgaggtaggagaattgcttgaacccaggaggcggaggttacagtgagccaagattgcaccactgcactccagcgtgggcgacagagtgagactgtctcaaaaaaaaaaaagaaaagtaggttttatttatagaaagacttaatgaactgttcaatacataagcgtacatagtagaacgtgcaagaaaagggcaaaggagtgaactgggagagagtcggaagatggtgttctgtactttgagaattttttgagattttaaattatttcttgagaaccaacttcgtccttgttcaagcatggaacgggtatgttcattctttgatttgttcaatcattcatttaatagatctaatttttgggaaggagaagcacatagggagccataagaatgttgaatgggaatccaaacatgcaggtgacttcagaaggtttccttgaggtcatgtttgaagccagtgaatgaaaaaaaaaa

SEQ ID NO: 17591 - protein, 71 aa, Homo sapiens [sequence omitted]

SEQ ID NO: 17592 - DNA, 877 bp, Homo sapiens
ttgttcctgagttctttttttttttttttttgagatggagttttgctcttattgcccaggctggagtacaatggcatcatcttggctcaccgcaaactccgccttccggattcaactgattgtcttgccttagcctcccgagtagctgggattacaggcatttgccatcacacctgactaattttgtatttttagtagggatggggtttctccatgttgatcaggctggtctacctctacctctgacctcaggtgatccgcctgcctcagcctccgaaagtgttgggattacaggcgtgagccaccacaccaggccctgttcctgagttctgatagcagagcatggagaataaagtttatctgtgtatccagctttcttttatttatttaattttatttattttagagacagagtcttgctctgtcacccaagttggagtgcagtggtgtgatctcagctcactgcaaactccacctcctagattcaagcagttctcctgcctcagcctcctaaagaactgggattataggcgtgagccaccatgcccagctccagctttttaaaaattagatagagcccatatttgtattttccactaaaaaattttttttttgaaaattggcattttttgctagtttggatcccagaggtttttataatttaatagaaaatgattttgtaaaacgtggagttttcaagttgtcttattcttagctgtgaatccattggtctgttgatgaaaactgtcatttgctctacaaaatgagaaagctgtgcaacctcaagctttgcaacaccaaggaaataggtgtgctatgtgagcttactcttaaataatggcttttagtgagtgtagatagttcatgtgtaatgtac

SEQ ID NO: 17593 - protein, 73 aa, Homo sapiens
MENKVYLCIQLSFIYLILFILETESCSVTQVGVQWCDLSSLQTPPPRFKQFSCLSLLKNWDYRREPPCPAPAF

SEQ ID NO: 17594 - DNA, 610 bp, Homo sapiens
actattaaaattaggatattaacattgacatagtacttctagctaattctgtccttattcaaattttgccactaataaactttgtggcaaagaaaaaaagaaactttttctggcccacatgcaatccaggatcagtttatatttttaagtcagaattcacagtacaagactctattctgccactttaaaaaaggattcttacaaagaacttatatttaagaaaacatgataatcttccatctgttatggaaaatttcttttaaaatcacttaccattcctcccccaaaagagcgatcccagttgccaatcagcgtgtttgcaaccatgagacagattgtatctggatgtgcccaaccaacagcttcaacagctattgcaaggtgcgccaaaggcatcttgtcatccctcacacgaatctagttaagataaagcaggaggacctctagttaagattaacattatataacatgcttattaacaaggaaaaaatcaccagtcccattaactgcaaagttaaaatgcacaccaggactctattttgattttttaactatcaggcctcattacatttgtactccagcctgggcaataagagcaaaactccatctc

SEQ ID NO: 17595 - protein, 73 aa, Homo sapiens
MIIFHLLWKISFKITYHSSPKRAIPVANQRVCNHETDCIWMCPTNSFNSYCKVRQRHLVIPHTNLVKIKQEDL

SEQ ID NO: 17596 - DNA, 2731 bp, Homo sapiens
attaagagacctagataaacagtagttgccatgttttcaaaggttgcagttggtttttcctaagtctcaagatgtgaagctgatttatactatagaatttttttttttttttttttttgagatgaggtcttgctctgttgcccaggctggagtgtagttgtgccatctcggctcactgcagcctccgcctcccaggttcaagccattctcccacctcagcctcccgaatagctgggattacaggcgcaccaccatgcccacgatgcctggctaattttttgtattttttagtagagatggggtttcaccatgttgaccaggctagtcctgaactcctgacctcaggagatccacccttctcagcctcccaaagtgctgggattacaggcgtgagccaccacacctggctgaaagttttaatctttcagaagcaggttaattcagaaagatgatcctaaaagtttaaaagccaactagaagttgtttggaaaatatctctgaaagtaatctggttgaagggaaagtaaatctgaagttgccactgctaaaagaaaacaaagtatattgagtcgatagatgggcagaaaggctcgcagcttcttggaaaacatttagctctggttcctttcctccactattcttaattggtttacatctttctaaatctagtcaactaggatgtaattattgttaaaaattagatttaagttagactctactcattgttttcagaaaccaatgaatgacccactgacttaacccatagcatatcagactccaacagatgaggactcatgaagtctcaagatgcttatagcatttctgaaaatgtgatcagcccatttgtataaagcctttgtctgctaatgtgtaattaggcatgtttatgtatcatttttgagaaattaatactggggaaaataatcattttagcttttgcttagcattggaattaaattgtaatcacctgtatgttttgtgtagaagatggcatcatcattcttaggtcattaactcatgaaatacaacattttccaactactactgtttttccacgttttttaggatgcgactctgtacaagtgtcacagaaagtgaggttgcacgagccagaaatcttctgaaaacaaacatgttgttgcagcttgatggtaaaaataaagatataggttctgttttcatatggttgatctgtattccaatagttaatttttccttctctttaaacaggttcaactccaatttgtgaagatattggtaggcaaatgttatgctataatagaaggattcccatccctgagcttgaagcaagaattgatgctgtgaatgctgagacaattcgagaagtatgtaccaaatacatttataataggagtccagctattgctgctgttggtaagcctggcttcttttcttctatgcaaaaagttggccaagtacttttaattaactcttctttttaatccttaggtcccattaagcaactaccagattttaaacagatacgcagtaacatgtgttggcttcgtgattaaaatgctcctaatcaagattgtttgaacacatgtatttataaaacagagctagagaaaaataaaaatgaacatgtatatacatttggaaatttgaattaaatactgtatcatactttcaaaggataaaaagactacccctctgaaggttgttttgtattaatggtcagtctttgttctctgagaaattatgttggaagcagcatactttcaaattattaccatgagtataattttaagaatgaaaatgtttacagtattttcagttttattataaaaatgcacacacaacaaagattgtcatttcttggctctacttgcattcagcacttgttcttgagcagctttctttgcttttaccatctcgacaagttcctaggaagggagaaaggtgtgatttaagaagttgcgatttaaaaacagacattttaatctagtgtttggtgtaaagaattcaagcaactaagatagatagtactaaatatactgatttcattatctgccagggcctagaaagtttctaaggttgctcatttcttcctcataatattgaccccataactactggttttgaaataagcactatattattaaccacttaatagacataaaatatgagctatatcacccaagctacaatttaaaatacaacaatctataaacgcttaagtctgcaaccttgtatcgtttcatgcagtccttctttgtcctgccaggcaccgcttctgctattttttcccatctttcaggtgtatttactgggtatgttttcaaagcttgttccaaaagcttctgttcttctgttgtccaaggggtgaagtctgtatatggacctgattaagaaaaatttttatttgaaaactgtctttgaacatgttctcagacaagtcttgtggtccacaagtattcgctaagtgcccatttcaatctgggatgtgtcattttgaaaataaacttgtagagatgagagatacatatagccctctgagtgttaataagagaaaaaatttcagatagctcacatcccagaaaataaaatctcaaaggcttttaaaacacaatagtaaagatctaccttgtactgtttatctcttaaaaatcaatgtaatacactcaccagactggtaaaaagccatatttaaatttatagtactgttggactcttggactcaaaaacacaaccacaattcattaagagt

SEQ ID NO: 17597 - protein, 65 aa, Homo sapiens
MLCYNRRIPIPELEARIDAVNAETIREVCTKYIYNRSPAIAAVGKPGFFSSMQKVGQVLLINSSF

SEQ ID NO: 17598 - DNA, 2165 bp, Homo sapiens
ctccacaccacgaaagatccatcccggaagtgcttactggtcgtctccatgcgccggttcctgggcgtcttagagccaaggcgcgaggctcggagtgagaggtagagctggaggggaccctaagcgccctccgcccgggacgtgagccgctgcgcccaccgggctagacccggcgccatcatgctgcttctgccaagcgccgcggacggccggggcaccgccatcacccacgctctgacctctgcctctacactctgtcaagttgaacctgtgggaagatggtttgaagcttttgttaagaggagaaacagaaatgcttctgcctcttttcaggaactggaggataagaaagagttatccgaggaatcagaagatgaagaattgcagttggaagagtttcccatgctgaaaacacttgatcccaaagactggaagaaccaagatcattatgcagttcttggacttggccatgtgagatacaaggctacacagagacagatcaaagcagctcataaagcaatggttttaaaacatcacccagacaaacggaaagcagctggtgaaccaataaaagaaggagataatgactacttcacttgcataactaaagcttatgaaatgttatctgatccagtgaaaagacgagcatttaacagtgtagatcctacttttgataactcagttccttctaaaagtgaagcaaaggataatttcttcgaagtgtttaccccagtgtttgaaaggaattccagatggtcaaataaaaaaaatgttcctaaacttggtgatatgaattcatcatttgaagatgtagatatattttattctttctggtataattttgattcttggagagaattttcttatttagatgaagaagaaaaagaaaaagcagaatgtcgtgatgagaggagatggattgaaaagcagaacagagcaacaagagcacaaagaaaaaaagaagaaatgaacagaataagaacattagttgacaatgcatacagctgtgatccaaggataaaaaagttcaaggaagaagaaaaagccaagaaagaagcagaaaagaaagcaaaagcagaagctaaacggaaggagcaagaagctaaagaaaaacaaagacaagctgaattagaagctgctcggttagctaaggagaaagaagaggaggaagtcagacagcaagcattgctggcaaagaaggaaaaagatatccagaaaaaagccattaagaaggaaaggcaaaaacttcgaaactcatgcaagatagaagaaataaatgagcaaatcagaaaagagaaagaggaagctgaggctcgtatgcgacaagcatctaagaacacagagaaatcaactggtggaggtggaaatggaagtaaaaattggtcagaagatgatctacaattactaattaaagctgtgaatctgttccctgctggaacaaattcaagatgggaagttattgctaattacatgaacatacattcttcctctggagtcaaaagaactgccaaagatgttattggcaaagcaaagagtctccaaaaacttgaccctcatcaaaaagatgacataaataaaaaggcatttgataagttcaaaaaagaacatggagtggtacctcaagcagacaacgcaacgccttcagaacgatttgaaggtccatatacagacttcaccccttggacaacagaagaacagaagcttttggaacaagctttgaaaacatacccagtaaatacacctgaaagatgggaaaaaatagcagaagcggtgcctggcaggacaaagaaggactgcatgaaacgatacaaggaacttgtcgagatggtaaaagcaaagaaagctgctcaagaacaagtgctgaatgcaagtagagccaagaaatgacaatctttgttgtgtgtgcatttttataataaaactgaaaatactgtaaacattttcattcttaaaattatactcatggtaataatttgaaagtatgctgcttccaacataatttctcagagaacaaagactgaccattaatacaaaacaaccttcagaggggtagtctttttatcctttgaaagtatgatacagtatttaattcaaatttccaaatgtatatacatgttcatttttatttttctctagctctgttttataaatacatgtgttcaaac

SEQ ID NO: 17599 - protein, 568 aa, Homo sapiens
MLLLPSAADGRGTAITHALTSASTLCQVEPVGRWFEAFVKRRNRNASASFQELEDKKELSEESEDEELQLEEFPMLKTLDPKDWKNQDHYAVLGLGHVRYKATQRQIKAAHKAMVLKHHPDKRKAAGEPIKEGDNDYFTCITKAYEMLSDPVKRRAFNSVDPTFDNSVPSKSEAKDNFFEVFTPVFERNSRWSNKKNVPKLGDMNSSFEDVDIFYSFWYNFDSWREFSYLDEEEKEKAECRDERRWIEKQNRATRAQRKKEEMNRIRTLVDNAYSCDPRIKKFKEEEKAKKEAEKKAKAEAKRKEQEAKEKQRQAELEAARLAKEKEEEEVRQQALLAKKEKDIQKKAIKKERQKLRNSCKIEEINEQIRKEKEEAEARMRQASKNTEKSTGGGGNGSKNWSEDDLQLLIKAVNLFPAGTNSRWEVIANYMNIHSSSGVKRTAKDVIGKAKSLQKLDPHQKDDINKKAFDKFKKEHGVVPQADNATPSERFEGPYTDFTPWTTEEQKLLEQALKTYPVNTPERWEKIAEAVPGRTKKDCMKRYKELVEMVKAKKAAQEQVLNASRAKK

SEQ ID NO: 17600 - DNA, 1981 bp, Homo sapiens
ctccacaccacgaaagatccatcccggaagtgcttactggtcgtctccatgcgccggttcctgggcgtcttagagccaaggcgcgaggctcggagtgagaggtagagctggaggggaccctaagcgccctccgcccgggacgtgagccgctgcgcccaccgggctagacccggcgccatcatgctgcttctgccaagcgccgcggacggccggggcaccgccatcacccacgctctgacctctgcctctacactctgtcaagttgaacctgtgggaagatggtttgaagcttttgttaagaggagaaacagaaatgcttctgcctcttttcaggaactggaggataagaaagagttatccgaggaatcagaagatgaagaattgcagttggaagagtttcccatgctgaaaacacttgatcccaaagactggaagaaccaagatcattatgcagttcttggacttggccatgtgagatacaaggctacacagagacagatcaaagcagctcataaagcaatggttttaaaacatcacccagacaaacggaaagcagctggtgaaccaataaaagaaggagataatgactacttcacttgcataactaaagcttatgaaatgttatctgatccagtgaaaagacgagcatttaacagtgtagatcctacttttgataactcagttccttctaaaagtgaagcaaaggataatttcttcgaagtgtttaccccagtgtttgaaaggaattccagatggtcaaataaaaaaaatgttcctaaacttggtgatatgaattcatcatttgaagatgtagatatattttattctttctggtataattttgattcttggagagaattttcttatttagatgaagaagaaaaagaaaaagcagaatgtcgtgatgagaggagatggattgaaaagcagaacagagcaacaagagcacaaagaaaaaaagaagaaatgaacagaataagaacattagttgacaatgcatacagctgtgatccaaggataaaaaagttcaaggaagaagaaaaagccaagaaagaagcagaaaagaaagcaaaagcagaagctaaacggaaggagcaagaagctaaagaaaaacaaagacaagctgaattagaagctgctcggttagctaaggagaaagaagaggaggaagtcagacagcaagcattgctggcaaagaaggaaaaagatatccagaaaaaagccattaagaaggaaaggcaaaaacttcgaaactcatgcaagatagaagaaataaatgagcaaatcagaaaagagaaagaggaagctgaggctcgtatgcgacaagcatctaagaacacagagaaatcaactggtggaggtggaaatggaagtaaaaattggtcagaagatgatctacaattactaattaaagctgtgaatctgttccctgctggaacaaattcaagatgggaagttattgctaattacatgaacatacattcttcctctggagtcaaaagaactgccaaagatgttattggcaaagcaaagagtctccaaaaacttgaccctcatcaaaaagatgacataaataaaaaggcatttgataagttcaaaaaagaacatggagtggtacctcaagcagacaacgcaacgccttcagaacgatttgaaggtccatatacagacttcaccccttggacaacagaagaacagaagcttttggaacaagctttgaaaacatacccagtaaatacacctgaaagatgggaaaaaatagcagaagcggtgcctggcaggacaaagaaggactgcatgaaacgatacaaggaacttgtcgagatggtaaaagcaaagaaagctgctcaagaacaagtgctgaatgcaagtagagccaagaaatgacaatctttgttgtgtgtgcatttttataataaaactgaaaatactgtaaacattttcattcttaaaattatactcatggtaataatttgaaagt

SEQ ID NO: 17601 - protein, 568 aa, Homo sapiens; identical to SEQ ID NO: 17599

SEQ ID NO: 17602 - DNA, 2959 bp, Homo sapiens
gtttttaataccttgttgactagtttccattactgcaaatctttgattaacagaaggttcaacattgtactactaatctgacgtttgtggataaggtgcatcagatagatgtaactagttacaagaatcttatttatttaagaatctgcactatgagcgtggtggctcatgcctataatccgagcactttgggaggccaaggcagacagatcccctgaggtcaggagtttgagactagcctggccaacatgatgaaaccccatctctgctaaaaatacaaaaattagctgggcatggtggcaggcatctgtaatcccagctacttgggaggctgaggcaggagaatcacttcaacctaggaggcggaggttgcagtaagcagaaatcacaccactgcactccagcctgggcgacagagtgagactctgcctcaaaagtaagaaagaaagaaaaagaacctgcactatgaatgtgatgatgggaatcaaaaaaatttttcaaggttagcattattgggactttactggttctaagggattgaaggggagaaatgagccaaagctgactcttaagatagcagctgacagaagcaacaagggcaaataaaggttctttttttacttgtgcatgtttgaaggtagtctagaaggaacaatgtaaatggtagagcttcaaaataaaagaggccattttgctatgccttcaccttttggtagagaataaatgagattgtctgcagaaagggtgaatatgagtttgaagagaggtttgaaatggccttgtggatgaataactcagtgacccacagacttgtcaattagtgtccaaggctaatggaagtcacatgacatgagtactgggaaaatcaggcaggctgtgggcagttcttggtccctcaggcagacctatgcagactggaagccagagtgaaaagctggtgcttctttttgggttggcctgagaggagtatggggtcagagtgagaatgacattgagagttgaggaccacaaagccctagccaggaagagagtgtagaatagcaatacagtatacttctaagtccctgacttatgatatttgtgcagatagaagaaataaatgagcaaatcagaaaagagaaagaggaagctgaggctcgtatgcgacaagcatctaagaacacagagaaatcaactggtggaggtggaaatggaagtaaaaattggtcagaagatgatctacaattactaattaaagctgtgaatctgttccctgctggaacaaattcaaggtactggttttaatgaaacttttcttcaactcacactggagcctggagataatgtagacagactccaaatagcagcacttgttatcacagaaacttgcagagataaattctgtgccacagcagaaaagtgtgaaaagtgaggtgcattttgaagctgtcagtcttacccattgcatcagtacacatgcacatatacatatgacagaatacttgtttctcaggaaattgaagatcatgagacaagtcttgatttatgttggcttactctgtcatggcttgttctagggattaggttttctgtagtttttcttttacagtcttgctctttgttttttcccacctcaagctggagcttgagtttaactgcaagaaagccctagagatccagcgtccctaattctatagatgaaaccgaggctgttttcagaatgattgatcttctgaagaaatgtattaaactggcagtatacacaaataagtggttttatttatgttgatttgtacaccaaatctgtaagatgtatggacttaaaaccaagattatcgttgatttaaacacatgaaaagcaaaaaccgtagtccaggcaacaggaatttatagtagcagcataattagaccaccaatctgagctcattctgtacatactataacctttctgcagtaaaaatctaatggtttttgtcgtttcattttgtttttccttactactattcatattattgtataatatatcctatcagatgggaagttattgctaattacatgaacatacattcttcctctggagtcaaaagaactgccaaagatgttattggcaaagcaaagagtctccaaaaacttggtgagttttgagaagtccatttgttactttaaacacctatttttaaaataacttatgcaatttaatgaaagattaaatgatgatctgttaagtattaaatttttttcatttctcagaccctcatcaaaaagatgacataaataaaaaggcatttgataagttcaaaaaagaacatggagtggtacctcaagcagacaacgcaacgccttcagaacgatttgaaggtccatatacagacttcaccccttggacaacagaagaacagaagcttttggaacaagctttgaaaacatacccagtaaatacacctgaaagatgggaaaaaatagcagaagcggtgcctggcaggacaaagaaggactgcatgaaacgatacaaggttgcagacttaagcgtttatagattgttgtattttaaattgtagcttgggtgatatagctcatattttatgtctattaagtggttaataatatagtgcttatttcaaaaccagtagttatggggtcaatattatgaggaagaaatgagcaaccttagaaactttctaggccctggcagataatgaaatcagtatatttagtactatctatcttagttgcttgaattctttacaccaaacactagattaaaatgtctgtttttaaatcgcaacttcttaaatcacacctttctcccttcctaggaacttgtcgagatggtaaaagcaaagaaagctgctcaagaacaagtgctgaatgcaagtagagccaagaaatgacaatctttgttgtgtgtgcatttttataataaaactgaaaatactgtaaacattttcattcttaaaattatactcatggtaataatttg

SEQ ID NO: 17603 - protein, 37 aa, Homo sapiens
MEWYLKQTTQRLQNDLKVHIQTSPLGQQKNRSFWNKL

SEQ ID NO: 17604 - DNA, 761 bp, Homo sapiens
cttcagtgtaaaacaagaatgatttccagggtttctatccagcaaaagtttaactgtgaggaagctcttttacctattctgtaaggaagtagatttatcagaactcttaatgaattgtggttgtgtttttgagtccaagagtccaacagtactataaatttaaatatggctttttaccagtctggtgagtgtattacattgatttttaagagataaacagtacaaggtagatctttactattgtgttttaaaagcctttgagattttattttctgggatgtgagctatctgaaattttttctcttattaacactcagagggctatatgtatctctcatctctacaagtttattttcaaaatgacacatcccagattgaaatgggcacttagcgaatacttgtggaccacaagacttgtctgagaacatgttcaaagacagttttcaaataaaaatttttcttaatcaggtccatatacagacttcaccccttggacaacagaagaacagaagcttttggaacaagctttgaaaacatacccagtaaatacacctgaaagatgggaaaaaatagcagaagcggtgcctggcaggacaaagaaggactgcatgaaacgatacaaggaacttgtcgagatggtaaaagcaaagaaagctgctcaagaacaagtgctgaatgcaagtagagccaagaaatgacaatctttgttgtgtgtgcatttttataataaaactgaaaatactgtaaacattttcattctt

SEQ ID NO: 17605 - protein, 41 aa, Homo sapiens
MGKNSRSGAWQDKEGLHETIQGTCRDGKSKESCSRTSAECK

SEQ ID NO: 17606 - DNA, 144 bp, Homo sapiens
tcacccctttctcccttcctaggaacttgtcgagatggtaaaagcaaagaaagctgctcaagaacaagtgctgaatgcaagtagagccaagaaatgacaatctttgttgtgtgtgcatttttataataaaactgaaaatactgt

SEQ ID NO: 17607 - DNA, 679 bp, Homo sapiens
tgatcggcttgaactggcaaggtatacctatggaactgctattgaagtcttcacttgagcttaggataaagtttcatttcttctttttttttctttagcttacagtgcttgaatgaaacactcacatcatgcacaaaagaagtaggaaaggctgctttggaaaaacagatagaagaaataaatgagcaaatcagaaaagagaaagaggaagctgaggctcgtatgcgacaagcatctaagaacacagagaaatcaactggtggaggtggaaatggaagtaaaaattggtcagaagatgatctacaattactaattaaagctgtgaatctgttccctgctggaacaaattcaaggtactggttttaatgaaacttttcttcaactcacactggagcctggagataatgtagacagactccaaatagcagcacttgttatcacagaaacttgcagagataaattctgtgccacagcagaaaagtgtgaaaagtgaggtgcattttgaagctgtcagtcttacccattgcatcagtacacatgcacatatacatatgacagaatacttgtttctcaggaaattgaagatcatgagacaagtcttgatttatgttggcttactctgtcatggcttgttctagggattaggttttctgtagtttttcttttacagtcttgctct

SEQ ID NO: 17608 - protein, 47 aa, Homo sapiens
MRQASKNTEKSTGGGGNGSKNWSEDDLQLLIKAVNLFPAGTNSRYWF

SEQ ID NO: 17609 - DNA, 586 bp, Homo sapiens
tttttggaagttacgatcaaatatattagaaagctgtggtcagtttaaagataaccccagggcaagaataagtaaccaaaacaagcccttgtaaaatttactattatagtgtcacaaatcagtggaaaagggaaggattattaaatgacagtaagattttgaaaaatgagaagtttagatactttcttgactatattaaaattccaaaaagattaaaaaattttttcagtctataggaaatgttaatgaaactagaactattgtaagtactagaagaaattacaaaagaaatgatcagtcaatgtaaataaagatgactgtttttgaaacataagtgttaacaaaacggggaaaaattattaataaacataatgaattaggagaggcagcatacagacgcaggctgaggagtcaggctgtctggactagagccgacttggccggaagtttgagcaagttgcagtggtagtggtggtaaacaggcctggcacatgtcaactgctatgtagatgttaacagctagcattattaattgtaagtgacacacagagtcagaagaaaaactgagacagcccctcctttttcc

SEQ ID NO: 17610 - protein, 54 aa, Homo sapiens
VTKTSPCKIYYYSVTNQWKREGLLNDSKILKNEKFRYFLDYIKIPKRLKNFFSL

SEQ ID NO: 17611 - DNA, 3030 bp, Homo sapiens
gggggtgggagggtgtgagactggcctccacaccacgaaagatccatcccggaagtgcttactggtcgtctccatgcgccggttcctgggcgtcttagagccaaggcgcgaggctcggagtgagaggtagagctggaggggaccctaagcgccctccgcccgggacgtgagccgctgcgcccaccgggctagacccggcgccatcatgctgcttctgccaagcgccgcggacggccggggcaccgccatcacccacgctctgacctctgcctctacactctgtcaagttgaacctgtgggaagatggtttgaagcttttgttaagaggagaaacagaaatgcttctgcctcttttcaggaactggaggataagaaagagttatccgaggaatcagaagatgaagaattgcagttggaagagtttcccatgctgaaaacacttgatcccaaagactggaagaaccaagatcattatgcagttcttggacttggccatgtgagatacaaggctacacagagacagatcaaagcagctcgtaagtacttagttattttgaaataatcaaatatcttgtataggaacaggctggctatgctttttaaaagatatacagtatcatagtctgcagccataactacatttaacagcatgtgttatattgtcataacaagcaaaaaaccacggtctcccctgccttcagaatcagaagaaagcaatccattttacatatagactttcccattagggataagaaattaggatgggtgtgtgtgtgtggatacaaaatactcctccaatggcaagcttttaaaaaataatacttcacctctctttagaagtatagcagctgcacttagtggatactgcctttttattgttttttggtttttggttttttttttacgttattttgtaatcttaggtcacacctttgtagatatcaccctgtcttctgtccaagaaaagttgtctgatgttttattgttgttttcattgacaaggttataatttggcatgggagagggtaatgttgggaccccagtcttcatatgccttataaaacaccatcccttaatgctcctaaatgtcctatgctttgcaatcctgtggacataatttcttatacacgtgatcagttcaactgattaataaagtttagtgaaagaggtaagaggtgaaggtgatcagttttctatcttaggagaatgttctgccctccactctagagaatggatattgaggtcagagagggtaagattgtggccacatggaaaaggagcagggagtcagggcctgtcaagaagaggaagtattatatgtggaggaagatgactgaataagaatgcctgtggtaaaaattattagtcaatacttagcatagtagatgaactcaaaatcgtccccattactgcttacatttaggaaaatcacaggaaatattttttaacaaagtgaaggaatttatcagattattttaaactggatttgtttaaaggctggcatgagtctagacaaagcatatggtaatgcatgtgaatagttattccagtataaataaatgccagaaaagtccatttgccacgtacaagtgtttgcaaagttttactatacgaaagaatagcattggccgggcgtggtggctcacgcctataatcccaacactttgggaggccgagacgggttgatcacctgaggtgaggaatatgagaccagcctggccaacgtggagaaacaccgtctctactaaaaatacaaaaaaattagctgggtgtggtggtgggcacctgtattcccagctacttgggaggctgaggcaggagaattgcttgaacccaggaggcagaggttgcagtgagccgaggtcgcaccattgcgctccagcctgggcaacaagagcgacactctgtttccgaaaaaatagaatagcatacaaataccaaatatgtcttagtacagataaatttgttaattagaattgataatagaactgtgagaatagtttgtgttttaaggtgaaagaattctttctcagaagattaaaaatgtgcaataaattgtaaaagaagcattcatatgcttctgttaaatccactgtctttttttgagacagaatttcgtacttgttgcgcaggctggagtgcaatggcaccatcttggctcaccacaacctccgcctcccaggttcaagcgattctcctgcctcagcctcttgagtagctgggattagaggcatgtgccaccacgcccggctaattttgtatttttcatagagacgggatttcaccatgttggtcaggctggtctcgaactcccgacctcaggtgatccacccacatcggcctcccagaatgctgggattacaggcgtgagccaccgcacccagcctaaatccactctttttattggccttgtagaaattgatttttagccaggcacagtgggtcacacctgtaatcccaacactttggaagaccaaggcaggcagattacttgaggctggagttcaatactagcccggccaatgtggtgaaaccccatctctactaaaaatacaaaaattagccaggtgcggtggcgcatgcctgtaagcccaactacttgggaggctgaggcatgagaatcgcttgaacctgggaggcggaagttgcagtgagcgaagattgtaccactgcagtccaacctgagcaacagagtgagagagtgagactctgtctcattaaaaaaaaaaaaaagaaagaaagaaagaaaagaaattcagcttttgaatatgtattctctagccaaaaattttgcagcaccagtgtagagattgttaacaataagggtaattctaacttactctctaccacccttgtggaatattccgtcagtctttatttagaaagaaactgtcattctctcacctctgtcactgtaaaacacagttgctactcattgctttctgaaaatctatctaaaagttaaaatgcaaagttactgtttgcaaatctataattattagcacaaacctaataaaaatgtaaatctgg

SEQ ID NO: 17612 - protein, 118 aa, Homo sapiens
MLLLPSAADGRGTAITHALTSASTLCQVEPVGRWFEAFVKRRNRNASASFQELEDKKELSEESEDEELQLEEFPMLKTLDPKDWKNQDHYAVLGLGHVRYKATQRQIKAARKYLVILK

SEQ ID NO: 17613 - DNA, 768 bp, Homo sapiens
aaaaacaataaaaaggcagtatccactaagtgcagctgctatacttctaaagagaggtgaagtattattttttaaaagcttgccattggaggagtattttgtatccacacacacacacccatcctaatttcttatccctaatgggaaagtctatatgtaaaatggattgctttcttctgattctgaaggcaggggagaccgtggttttttgcttgttatgacaatataacacatgctgttaaatgtagttatggctgcagactatgatactgtatatcttttaaaaagcatagccagcctgttcctatacaagatatttgattatttcaaaataactaagtacttacgagctgctttgatctgtctctgtgtagccttgtatctcacatggccaagtccaagaactgcataatgatcttggttctggaaaaaaaacacaaaagggagtcaaatttgaaatgaagccaatatattccatcccttgtgttctggtaccttaataagcatttcccaaagtgacatttcatcaggagtccagtaagaggttctgtataaaccagggtctatggtcaggtaaggttgagaaatgtggattaggctgggtgccatggttcatgcctgtaatcctagcactttgggaggcccaggtggaggattgcttgagcccaggaatatgaggccagcctgggcaacagagtgagactccgtctcaaaataaaataaaataaaaaataaatttaaaaaagaggtaaatgtggactattatac

SEQ ID NO: 17614 - protein, 37 aa, Homo sapiens [sequence omitted]

SEQ ID NO: 17615 - DNA, 1730 bp, Homo sapiens
ctggggtgctggggggttccgtcccgaaatgctcagcccaatccatgagtcagcagcggcgagaggaggaagcaacggtaatcagtccaaaaaccagcgtgccaaagcgtttccccagggctctgtccggactctgaagcactgcataaaggggtctgtctgagcccaatttacttccggtggggaagggaaagggaagacaccaccggaagcaaggaaggtgctgtgtaatcattaaggagcggaggcttttggagctgctaaaatgccggattacctcggtgccgatcagcggaagaccaaagaggatgagaaggacgacaagcccatccgagctctggatgagggggatattgccttgttgaaaacttatggtcagagcacttactctaggcagatcaagcaagttgaagatgacattcagcaacttctcaagaaaattaatgagctcactggtattaaagaatctgacactggcctggccccaccagcactctgggatttggctgcagataagcagacactccagagtgaacagcctttacaggttgccaggtgtacaaagataatcaatgctgattcggaggacccaaaatacattatcaacgtaaagcagtttgccaagtttgtggtggaccttagtgatcaggtggcacctactgacattgaagaagggatgagagtgggcgtggatagaaataaatatcaaattcacattccattgcctcctaagattgacccaacagttaccatgatgcaggtggaagagaaacctgatgtcacatacagtgatgttggtggctgtaaggaacagattgagaaactgcgagaagtagttgaaaccccattacttcatccagagaggtttgtgaaccttggcattgagcctcccaagggcgtgctgctctttggtccacccggtacaggcaagacactctgtgcgcgggcagttgctaatcggactgatgcgtgcttcattcgagttattggatctgagcttgtacagaaatacgtcggtgagggggctcgaatggttcgtgaactctttgaaatggccagaacaaaaaaagcctgccttatcttctttgatgaaattgatgctattggaggggctcgttttgatgatggtgctggaggtgacaatgaagtgcagagaacaatgttggaactgatcaatcagcttgatggttttgatcctagaggcaatattaaagtgctgatggccactaacagacctgatactttggatccagcactgatgaggccagggagattggatagaaaaattgaatttagcttgcccgatctagagggtcggacccacatatttaagattcacgctcgttcaatgagtgttgaaagagatatcagatttgaactgttagcacgactgtgtccaaatagcactggtgctgagattagaagcgtctgcacagaggctggtatgtttgccatcagagcacggcgaaaaattgctaccgagaaggatttcttggaagctgtaaataaggtcattaagtcttatgccaaattcagtgctactcctcgttacatgacatacaactgaaccctgaaggctttcaagtgaaaactttaaattggaatcctaaccttatatagacttgttaataaccaattcataaacaaataaatggcttcaaaattgtatgcttttttccatatctcttcttgtaatataataaaaggtgatttctaatgttattaggcag

SEQ ID NO: 17616 - protein, 433 aa, Homo sapiens; identical to SEQ ID NO: 2088

SEQ ID NO: 17617 - DNA, 1947 bp, Homo sapiens
aggcagcggctgtggagcgcggcggggcggctccgcccagggcagcccgggctgggccaaggagcgagctctcccttctcctgctctcagcctcagtgatcaaggcttcagtgaactgcactggagctcccagcgggggatcttgtcccctgtcccgacttttgtgctgcacattggatctggtgacactcaggaaatgcttgtctccggctgttaaggaataatttcagagtactatggatcatgctgaagaaaatgaaatccttgcagcaacccagaggtactatgtggaaaggcctatctttagtcatccggtcctccaggaaagactacacacaaaggacaaggttcctgattccattgcggataagctgaaacaggcattcacatgtactcctaaaaaaataagaaatatcatttatatgttcctacccataactaaatggctgccagcatacaaattcaaggaatatgtgttgggtgacttggtctcaggcataagcacaggggtgcttcagcttcctcaaggcttagcctttgcaatgctggcagctgtgcctccaatatttggcctgtactcttcattttaccctgttatcatgtattgttttcttggaacctccagacacatatccataggtccttttgctgttattagcctgatgattggtggtgtagctgttcgattagtaccagatgatatagtcattccaggaggagtaaatgcaaccaatggcacagaggccagagatgccttgagagtgaaagtcgccatgtctgtgaccttactttcaggaatcattcagttttgcctaggtgtctgtaggtttggatttgtggccatatatctcacagagcctctggtccgtgggtttaccaccgcagcagctgtgcatgtcttcacctccatgttaaaatatctgtttggagttaaaacaaagcggtacagtggaatcttttccgtggtgtatagtacagttgctgtgttgcagaatgttaaaaacctcaacgtgtgttccctaggcgtcgggctgatggtttttggtttgctgttgggtggcaaggagtttaatgagagatttaaagagaaattgccggcgcctattcctttagagttctttgcggtcgtaatgggaactggcatttcagctgggtttaacttgaaagaatcatacaatgtggatgtcgttggaacacttcctctagggctgctacctccagccaatccggacaccagcctcttccaccttgtgtacgtagatgccattgccatagccatcgttggattttcagtgaccatctccatggccaagaccttagcaaataaacatggctaccaggttgacggcaatcaggagctcattgccctgggactgtgcaattccattggctcactcttccagaccttttcaatttcatgctccttgtctcgaagccttgttcaggagggaaccggtgggaagacacagcttgcaggttgtttggcctcattaatgattctgctggtcatattagcaactggattcctctttgaatcattgccccaggctgtgctgtcggccattgtgattgtcaacctgaagggaatgtttatgcagttctcagatctcccctttttctggagaaccagcaaaatagagctgaccatctggcttaccacttttgtgtcctccttgttcctgggattggactatggtttgatcactgctgtgatcattgctctgctgactgtgatttacagaacacagagctttcatacagagatgaccagaagatggagaccgtaggggaaatgccgtgtaatccaagcagttcaggctttggggccaggtggacagggtttgaatgccagctctggaatctgttagtggggtgacctcagccaagtcacttaacacttctgaactttgttttctcttttgtgaaataaagaaaaaatgaatctac

SEQ ID NO: 17618 - protein, 516 aa, Homo sapiens; identical to SEQ ID NO: 2094

SEQ ID NO: 17619 - DNA, 2474 bp, Homo sapiens
aggcagcggctgtggagcgcggcggggcggctccgcccagggcagcccgggctgggccaaggagcgagctctcccttctcctgctctcagcctcagtgatcaaggcttcagtgaactgcactggagctcccagcgggggatcttgtcccctgtcccgacttttgtgctgcacattggatctggtgacactcaggaaatgcttgtctccggctgttaaggaataatttcagagtactatggatcatgctgaagaaaatgaaatccttgcagcaacccagaggtactatgtggaaaggcctatctttagtcatccggtcctccaggaaagactacacacaaaggacaaggttcctgattccattgcggataagctgaaacaggcattcacatgtactcctaaaaaaataagaaatatcatttatatgttcctacccataactaaatggctgccagcatacaaattcaaggaatatgtgttgggtgacttggtctcaggcataagcacaggggtgcttcagcttcctcaaggcttagcctttgcaatgctggcagctgtgcctccaatatttggcctgtactcttcattttaccctgttatcatgtattgttttcttggaacctccagacacatatccataggtccttttgctgttattagcctgatgattggtggtgtagctgttcgattagtaccagatgatatagtcattccaggaggagtaaatgcaaccaatggcacagaggccagagatgccttgagagtgaaagtcgccatgtctgtgaccttactttcaggaatcattcagttttgcctaggtgtctgtaggtttggatttgtggccatatatctcacagagcctctggtccgtgggtttaccaccgcagcagctgtgcatgtcttcacctccatgttaaaatatctgtttggagttaaaacaaagcggtacagtggaatcttttccgtggtgtatagtacagttgctgtgttgcagaatgttaaaaacctcaacgtgtgttccctaggcgtcgggctgatggtttttggtttgctgttgggtggcaaggagtttaatgagagatttaaagagaaattgccggcgcctattcctttagagttctttgcggtcgtaatgggaactggcatttcagctgggtttaacttgaaagaatcatacaatgtggatgtcgttggaacacttcctctagggctgctacctccagccaatccggacaccagcctcttccaccttgtgtacgtagatgccattgccatagccatcgttggattttcagtgaccatctccatggccaagaccttagcaaataaacatggctaccaggttgacggcaatcaggagctcattgccctgggactgtgcaattccattggctcactcttccagaccttttcaatttcatgctccttgtctcgaagccttgttcaggagggaaccggtgggaagacacagcttgcaggttgtttggcctcattaatgattctgctggtcatattagcaactggattcctctttgaatcattgccccaggctgtgctgtcggccattgtgattgtcaacctgaagggaatgtttatgcagttctcagatctcccctttttctggagaaccagcaaaatagagctgaccatctggcttaccacttttgtgtcctccttgttcctgggattggactatggtttgatcactgctgtgatcattgctctgctgactgtgatttacagaacacagagtccaagctacaaagtccttggaaagcttcctgaaactgatgtgtatattgatatagacgcatatgaggaggtgaaagaaattcctggaataaaaatatttcaaataaatgcaccaatttactatgcaaatagcgacttgtatagcaatgcattaaaacgaaagactggagtgaacccagcagtcatcatgggagcaaggagaaaggccatgcggaagtacgctaaggaagtcggaaatgcaaatatggccaacgcaactgttgtcaaagcagatgcagaagtagatggagaggatgctaccaagcctgaagaagaggatggtgaagtaaaatatcccccaatagtgatcaaaagcacatttcctgaggaaatgcaaagatttatgcccccaggggataacgtccacactgtcattttggatttcactcaagtcaattttattgattctgttggagtgaaaactctggcagggattgtaaaagaatatggagacgtcggtatatatgtatacttagcaggatgcagtgctttcatacagagatgaccagaagatggagaccgtaggggaaatgccgtgtaatccaagcagttcaggctttggggccaggtggacagggtttgaatgccagctctggaatctgttagtggggtgacctcagccaagtcacttaacacttctgaactttgttttctcttttgtgaaataaagaaaaaatgaatctac

SEQ ID NO: 17620 - protein, 685 aa, Homo sapiens; identical to SEQ ID NO: 2092

SEQ ID NO: 17621 - DNA, 1404 bp, Homo sapiens
aggcagcggctgtggagcgcggcggggcggctccgcccagggcagcccgggctgggccaaggagcgagctctcccttctcctgctctcagcctcagtgatcaaggcttcagtgaactgcactggagctcccagcgggggatcttgtcccctgtcccgacttttgtgctgcacattggatctggtgacactcaggaaatgcttgtctccggctgttaaggaataatttcagagtactatggatcatgctgaagaaaatgaaatccttgcagcaacccagaggtactatgtggaaaggcctatctttagtcatccggtcctccaggaaagactacacacaaaggacaaggttcctgattccattgcggataagctgaaacaggcattcacatgtactcctaaaaaaataagaaatatcatttatatgttcctacccataactaaatggctgccagcatacaaattcaaggaatatgtgttgggtgacttggtctcaggcataagcacaggggtgcttcagcttcctcaaggcttagcctttgcaatgctggcagctgtgcctccaatatttggcctgtactcttcattttaccctgttatcatgtattgttttcttggaacctccagacacatatccataggtccttttgctgttattagcctgatgattggtggtgtagctgttcgattagtaccagatgatatagtcattccaggaggagtaaatgcaaccaatggcacagaggccagagatgccttgagagtgaaagtcgccatgtctgtgaccttactttcaggaatcattcagttttgcctaggtgtctgtaggtttggatttgtggccatatatctcacagagcctctggtccgtgggtttaccaccgcagcagctgtgcatgtcttcacctccatgttaaaatatctgtttggagttaaaacaaagcggtacagtggaatcttttccgtggtgtatagtacagttgctgtgttgcagaatgttaaaaacctcaacgtgtgttccctaggcgtcgggctgatggtttttggtttgctgttgggtggcaaggagtttaatgagagatttaaagagaaattgccggcgcctattcctttagagttctttgcggtcgtaatgggaactggcatttcagctgggtttaacttgaaagaatcatacaatgtggatgtcgttggaacacttcctctaggctttcatacagagatgaccagaagatggagaccgtaggggaaatgccgtgtaatccaagcagttcaggctttggggccaggtggacagggtttgaatgccagctctggaatctgttagtggggtgacctcagccaagtcacttaacacttctgaactttgttttctcttttgtgaaataaagaaaaaatgaatctac

SEQ ID NO: 17622 - protein, 335 aa, Homo sapiens; identical to SEQ ID NO: 2096

SEQ ID NO: 17623 - DNA, 840 bp, Homo sapiens
atttaaaaaagaaagaagaaactggttagccagagaggtttgtgaaccttggcattgagcctcccaagggcgtgctgctctttggtccacccggtacaggcaagacactctgtgcgcgggcagttgctaatcggactgatgcgtgcttcattcgagttattggatctgagcttgtacagaaatacgtcggtgagggggctcgaatggttcgtgaactctttgaaatggccagaacaaaaaaagcctgccttatcttctttgatgaaattgatgctattggaggggctcgttttgatgatggtgctggaggtgacaatgaagtgcagagaacaatgttggaactgatcaatcagcttgatggttttgatcctagaggcaatattaaagtgctgatggccactaacagacctgatactttggatccagcactgatgaggccagggagattggatagaaaaattgaatttagcttgcccgatctagagggtcggacccacatatttaagattcacgctcgttcaatgagtgttgaaagagatatcagatttgaactgttagcacgactgtgtccaaatagcactggtgctgagattagaagcgtctgcacagaggctggtatgtttgccatcagagcacggcgaaaaattgctaccgagaaggatttcttggaagctgtaaataaggtcattaagtcttatgccaaattcagtgctactcctcgttacatgacatacaactgaaccctgaaggctttcaagtgaaaactttaaattggaatcctaaccttatatagacttgttaataaccaattcataaacaaataaatggcttcaaaattgt

SEQ ID NO: 17624 - protein, 178 aa, Homo sapiens
MVRELFEMARTKKACLIFFDEIDAIGGARFDDGAGGDNEVQRTMLELINQLDGFDPRGNIKVLMATNRPDTLDPALMRPGRLDRKIEFSLPDLEGRTHIFKIHARSMSVERDIRFELLARLCPNSTGAEIRSVCTEAGMFAIRARRKIATEKDFLEAVNKVIKSYAKFSATPRYMTYN

SEQ ID NO: 17625 - DNA, 903 bp, Homo sapiens
atttaaaaaagaaagaagaaactggttagccagagaggtttgtgaaccttggcattgagcctcccaagggcgtgctgctctttggtccacccggtacaggcaagacactctgtgcgcgggcagttgctaatcggactgatgcgtgcttcattcgagttattggatctgagcttgtacagaaatacgtcggtgagggggctcgaatggttcgtgaactctttgaaatggccagaacaaaaaaagcctgccttatcttctttgatgaaattgatgctattggaggggctcgttttgatgatggtgctggaggtgacaatgaagtgcagagaacaatgttggaactgatcaatcagcttgatggttttgatcctagaggcaatattaaagtgctgatggccactaacagacctgatactttggatccagcactgatgaggccagggagattggatagaaaaattgaatttagcttgcccgatctagagggtcggacccacatatttaagattcacgctcgttcaatgagtgttgaaagagatatcagatttgaactgttagcacgactgtgtccaaatagcactggtgctgagattagaagcgtctgcacagaggctggtatgtttgccatcagagcacggcgaaaaattgctaccgagaaggatttcttggaagctgtaaataaggtcattaagtcttatgccaaattcagtgctactcctcgttacatgacatacaactgaaccctgaaggctttcaagtgaaaactttaaattggaatcctaaccttatatagacttgttaataaccaattcataaacaaataaatggcttcaaaattgtatgcttttttccatatctcttcttgtaatataataaaaggtgatttctaatgttattaggcag

SEQ ID NO: 17626 - protein, 178 aa, Homo sapiens; identical to SEQ ID NO: 17624

SEQ ID NO: 17627 - DNA, 2080 bp, Homo sapiens
atttaaaaaagaaagaagaaactggttagccagagaggtttgtgaaccttggcattgagcctcccaagggcgtgctgctctttggtccacccggtacaggcaagacactctgtgcgcgggcagttgctaatcggactgatgcgtgcttcattcgagttattggatctgagcttgtacagaaatacgtcggtgagggggctcgaatggttcgtgaactctttgaaatggccagaacaaaaaaagcctgccttatcttctttgatgaaattgatgctattggaggggctcgttttgatgatggtgctggaggtgacaatgaagtgcagagaacaatgttggaactgatcaatcagcttgatggttttgatcctagaggcaatattaaagtgctgatggccactaacagacctgatactttggatccagcactgatgaggccagggagattggatagaaaaattgaatttagcttgcccgatctagagggtcggacccacatatttaagattcacgctcgttcaatgagtgttgaaagagatatcagatttgaactgttagcacgactgtgtccaaatagcactggtgctgagattagaagcgtctgcacagaggctggtatgtttgccatcagagcacggcgaaaaattgctaccgagaaggatttcttggaagctgtaaataaggtcattaagtcttatgccaaattcagtgctactcctcgttacatgacatacaactgaaccctgaaggctttcaagtgaaaactttaaattggaatcctaaccttatatagacttgttaataaccaattcataaacaaataaatggcttcaaaattgtatgcttttttccatatctcttcttgtaatataataaaaggtgatttctaatgttattaggcagaaaagcttgttagaatatattttgactatttttttgacccacacccgtttaaggatttcacatcatacaaagcgcttgcttagatggcttctatcctaggcatatgctggccgggtgctctacatataaattctcattgtatcctcccatctgtccactgaggaagattatcaaatggatcttcatccaatggatgcataaactttcctacttacttgtagtggcaaagctggctttcaagtacaagtttgttggctccattacctatgctcctattatccgcttctgtcccgcaacaaagtagctcacttaggcgtatgaccacatgcattatgatagtttcccaccaccatattgaataataaaagctttggccaaagcttttttaaagtaggagaaacattggatgtatatgttttgcattgccatttgatttcaaattaatcaggaagaattagtgattttaatgagcagtaaagtggtgcaataaagcagaaagaaaaatgttcagccagaagtgaaagactagtaaaaaaagaaaaaaaaatatttgtacatatgatctaatttagaaagtccagaattggcttcatacagaaaagtgattactttcattttacaaattactttaaaattttggtaaagtttctgttaggcttctggtctacagtgaggtattttaaaaataaaggttatattagaatcctcaacatctctttaaaattacctcctgtgtaaccaccaccaaatcctatcttctaccacaattaccccttcccccaatgccaagaccaaagcacaataatgaatatttttattgaagttcgatattcataaataagttgcaaaataagagttggatatatttttaattcacaatagaaaaagttgacaacatagaaaatgctgctttgcactgaaatacttaaaattatgaaagttttcaagtaaagaaattaaagccttttataaaatccaaccaacattcttgatttttcatttttatgaacttgatcagaaaaattcatcttttttaaccctgccctaatttttcttgaggaattaaatagagcaaactattttcaggttatgcttacaataaaatatacttaagaaaatgactgaagatgtatgtttttgaatgttttgattaaataaatgtacacatttagaacac

SEQ ID NO: 17628 - protein, 178 aa, Homo sapiens; identical to SEQ ID NO: 17624

SEQ ID NO: 17629 - DNA, 2660 bp, Homo sapiens
aggcagcggctgtggagcgcggcggggcggctccgcccagggcagcccgggctgggccaaggagcgagctctcccttctcctgctctcagcctcagtgatcaaggcttcagtgaactgcactggagctcccagcgggggatcttgtcccctgtcccgacttttgtgctgcacattggatctggtgacactcaggaaatgcttgtctccggctgttaaggaataatttcagagtactatggatcatgctgaagaaaatgaaatccttgcagcaacccagaggtactatgtggaaaggcctatctttagtcatccggtcctccaggaaagactacacacaaaggacaaggttcctgattccattgcggataagctgaaacaggcattcacatgtactcctaaaaaaataagaaatatcatttatatgttcctacccataactaaatggctgccagcatacaaattcaaggaatatgtgttgggtgacttggtctcaggcataagcacaggggtgcttcagcttcctcaaggcttagcctttgcaatgctggcagctgtgcctccaatatttggcctgtactcttcattttaccctgttatcatgtattgttttcttggaacctccagacacatatccataggtccttttgctgttattagcctgatgattggtggtgtagctgttcgattagtaccagatgatatagtcattccaggaggagtaaatgcaaccaatggcacagaggccagagatgccttgagagtgaaagtcgccatgtctgtgaccttactttcaggaatcattcagttttgcctaggtgtctgtaggtttggatttgtggccatatatctcacagagcctctggtccgtgggtttaccaccgcagcagctgtgcatgtcttcacctccatgttaaaatatctgtttggagttaaaacaaagcggtacagtggaatcttttccgtggtgtatagtacagttgctgtgttgcagaatgttaaaaacctcaacgtgtgttccctaggcgtcgggctgatggtttttggtttgctgttgggtggcaaggagtttaatgagagatttaaagagaaattgccggcgcctattcctttagagttctttgcggtcgtaatgggaactggcatttcagctgggtttaacttgaaagaatcatacaatgtggatgtcgttggaacacttcctctagggctgctacctccagccaatccggacaccagcctcttccaccttgtgtacgtagatgccattgccatagccatcgttggattttcagtgaccatctccatggccaagaccttagcaaataaacatggctaccaggttgacggcaatcaggagctcattgccctgggactgtgcaattccattggctcactcttccagaccttttcaatttcatgctccttgtctcgaagccttgttcaggagggaaccggtgggaagacacagcttgcaggttgtttggcctcattaatgattctgctggtcatattagcaactggattcctctttgaatcattgccccaggctgtgctgtcggccattgtgattgtcaacctgaagggaatgtttatgcagttctcagatctcccctttttctggagaaccagcaaaatagagctgaccatctggcttaccacttttgtgtcctccttgttcctgggattggactatggtttgatcactgctgtgatcattgctctgctgactgtgatttacagaacacagagtccaagctacaaagtccttggaaagcttcctgaaactgatgtgtatattgatatagacgcatatgaggaggtgaaagaaattcctggaataaaaatatttcaaataaatgcaccaatttactatgcaaatagcgacttgtatagcaatgcattaaaacgaaagactggagtgaacccagcagtcatcatgggagcaaggagaaaggccatgcggaagtacgctaaggaagtcggaaatgcaaatatggccaacgcaactgttgtcaaagcagatgcagaagtagatggagaggatgctaccaagcctgaagaagaggatggtgaagtaaaatatcccccaatagtgatcaaaagcacatttcctgaggaaatgcaaagatttatgcccccaggggataacgtccacactgtcattttggatttcactcaagtcaattttattgattctgttggagtgaaaactctggcagggattgtaaaagaatatggagacgtcggtatatatgtatacttagcaggatgcagtgcacaagttgtgaatgacctcactcggaatagattttttgaaaatcctgccctatgggagctgctgttccacagcattcatgatgcagttttaggcagccaacttagagaggcacttgctgaacaggaagcctcggctcccccttcccaggaggacttggagcccaatgccactcctgccactcctgaggcatagatgaggacctcaccctaggatggggttataagcctctcatgaagttcataatttacacgttttaaatactagacgctagatttttttttctaagggtgaatactagtagtccaggcttgatttggagggtgaatgacgcctagcaagatgtattgtacttgtgtttttttaattgaatacttcaaagat

SEQ ID NO: 17630 - protein, 744 aa, Homo sapiens; identical to SEQ ID NO: 2090

SEQ ID NO: 17631 - DNA, 2173 bp, Homo sapiens
agagtactatggatcatgctgaagaaaatgaaatccttgcagcaacccagaggtactatgtggaaaggcctatctttagtcatccggtcctccaggaaagactacacacaaaggacaaggttcctgattccattgcggataagctgaaacaggcattcacatgtactcctaaaaaaataagaaatatcatttatatgttcctacccataactaaatggctgccagcatacaaattcaaggaatatgtgttgggtgacttggtctcaggcataagcacaggggtgcttcagcttcctcaaggcttagcctttgcaatgctggcagctgtgcctccaatatttggcctgtactcttcattttaccctgttatcatgtattgttttcttggaacctccagacacatatccataggtccttttgctgttattagcctgatgattggtggtgtagctgttcgattagtaccagatgatatagtcattccaggaggagtaaatgcaaccaatggcacagaggccagagatgccttgagagtgaaagtcgccatgtctgtgaccttactttcaggaatcattcagttttgcctaggtgtctgtaggtttggatttgtggccatatatctcacagagcctctggtccgtgggtttaccaccgcagcagctgtgcatgtcttcacctccatgttaaaatatctgtttggagttaaaacaaagcggtacagtggaatcttttccgtggtgtatagtacagttgctgtgttgcagaatgttaaaaacctcaacgtgtgttccctaggcgtcgggctgatggtttttggtttgctgttgggtggcaaggagtttaatgagagatttaaagagaaattgccggcgcctattcctttagagttctttgcggtcgtaatgggaactggcatttcagctgggtttaacttgaaagaatcatacaatgtggatgtcgttggaacacttcctctagggctgctacctccagccaatccggacaccagcctcttccaccttgtgtacgtagatgccattgccatagccatcgttggattttcagtgaccatctccatggccaagaccttagcaaataaacatggctaccaggttgacggcaatcaggagctcattgccctgggactgtgcaattccattggctcactcttccagaccttttcaatttcatgctccttgtctcgaagccttgttcaggagggaaccggtgggaagacacagcttgcaggttgtttggcctcattaatgattctgctggtcatattagcaactggattcctctttgaatcattgccccagaccatctggcttaccacttttgtgtcctccttgttcctgggattggactatggtttgatcactgctgtgatcattgctctgctgactgtgatttacagaacacagagtccaagctacaaagtccttggaaagcttcctgaaactgatgtgtatattgatatagacgcatatgaggaggtgaaagaaattcctggaataaaaatatttcaaataaatgcaccaatttactatgcaaatagcgacttgtatagcaatgcattaaaacgaaagactggagtgaacccagcagtcatcatgggagcaaggagaaaggccatgcggaagtacgctaaggaagtcggaaatgcaaatatggccaacgcaactgttgtcaaagcagatgcagaagtagatggagaggatgctaccaagcctgaagaagaggatggtgaagtaaaatatcccccaatagtgatcaaaagcacatttcctgaggaaatgcaaagatttatgcccccaggggataacgtccacactgtcattttggatttcactcaagtcaattttattgattctgttggagtgaaaactctggcagggattgtaaaagaatatggagacgtcggtatatatgtatacttagcaggatgcagtgcacaagttgtgaatgacctcactcggaatagattttttgaaaatcctgccctatgggagctgctgttccacagcattcatgatgcagttttaggcagccaacttagagaggcacttgctgaacaggaagcctcggctcccccttcccaggaggacttggagcccaatgccactcctgccactcctgaggcatagatgaggacctcaccctaggatggggt

SEQ ID NO: 17632 - protein, 712 aa, Homo sapiens
MDHAEENEILAATQRYYVERPIFSHPVLQERLHTKDKVPDSIADKLKQAFTCTPKKIRNIIYMFLPITKWLPAYKFKEYVLGDLVSGISTGVLQLPQGLAFAMLAAVPPIFGLYSSFYPVIMYCFLGTSRHISIGPFAVISLMIGGVAVRLVPDDIVIPGGVNATNGTEARDALRVKVAMSVTLLSGIIQFCLGVCRFGFVAIYLTEPLVRGFTTAAAVHVFTSMLKYLFGVKTKRYSGIFSVVYSTVAVLQNVKNLNVCSLGVGLMVFGLLLGGKEFNERFKEKLPAPIPLEFFAVVMGTGISAGFNLKESYNVDVVGTLPLGLLPPANPDTSLFHLVYVDAIAIAIVGFSVTISMAKTLANKHGYQVDGNQELIALGLCNSIGSLFQTFSISCSLSRSLVQEGTGGKTQLAGCLASLMILLVILATGFLFESLPQTIWLTTFVSSLFLGLDYGLITAVIIALLTVIYRTQSPSYKVLGKLPETDVYIDIDAYEEVKEIPGIKIFQINAPIYYANSDLYSNALKRKTGVNPAVIMGARRKAMRKYAKEVGNANMANATVVKADAEVDGEDATKPEEEDGEVKYPPIVIKSTFPEEMQRFMPPGDNVHTVILDFTQVNFIDSVGVKTLAGIVKEYGDVGIYVYLAGCSAQVVNDLTRNRFFENPALWELLFHSIHDAVLGSQLREALAEQEASAPPSQEDLEPNATPATPEA

SEQ ID NO: 17633 - DNA, 2098 bp, Homo sapiens
acctggaggcagcgcgcgcgtcgaagaggcagcggctgtggagcgcggcggggcggctccgcccagggcagcccgggctgggccaaggagcgagctctcccttctcctgctctcagcctcagtgatcaaggcttcagtgaactgcactggagctcccagcgggggatcttgtcccctgtcccgacttttgtgctgcacattggatctggtgacactcaggaaatgcttgtctccggctgttaaggaataatttcagagtactatggatcatgctgaagaaaatgaaatccttgcagcaacccagaggtactatgtggaaaggcctatctttagtcatccggtcctccaggaaagactacacacaaaggacaaggttcctgattccattgcggataagctgaaacaggcattcacatgtactcctaaaaaaataagaaatatcatttatatgttcctacccataactaaatggctgccagcatacaaattcaaggaatatgtgttgggtgacttggtctcaggcataagcacaggggtgcttcagcttcctcaaggtccttttgctgttattagcctgatgattggtggtgtagctgttcgattagtaccagatgatatagtcattccaggaggagtaaatgcaaccaatggcacagaggccagagatgccttgagagtgaaagtcgccatgtctgtgaccttactttcaggaatcattcagttttgcctaggtgtctgtaggtttggatttgtggccatatatctcacagagcctctggtccgtgggtttaccaccgcagcagctgtgcatgtcttcacctccatgttaaaatatctgtttggagttaaaacaaagcggtacagtggaatcttttccgtggtgtatgcgtcgggctgatggtttttggtttgctgttgggtggcaaggagtttaatgagagatttaaagagaaattgccggcgcctattcctttagagttctttgcggtcgtaatgggaactggcatttcagctgggtttaacttgaaagaatcatacaatgtggatgtcgttggaacacttcctctagggctgctacctccagccaatccggacaccagcctcttccaccttgtgtacgtagatgccattgccatagccatcgttggattttcagtgaccatctccatggccaagaccttagcaaataaacatggctaccaggttgacggcaatcaggagctcattgccctgggactgtgcaattccattggctcactcttccagaccttttcaatttcatgctccttgtctcgaagccttgttcaggagggaaccggtgggaagacacagcttgcaggttgtttggcctcattaatgattctgctggtcatattagcaactggattcctctttgaatcattgccccaggctgtgctgtcggccattgtgattgtcaacctgaagggaatgtttatgcagttctcagatctcccctttttctggagaaccagcaaaatagagctgaccatctggcttaccacttttgtgtcctccttgttcctgggattggactatggtttgatcactgctgtgatcattgctctgctgactgtgatttacagaacacagaggtgagtgcccagattggaatgggtgtgaatgtcccggcagagatgacaatgttgactttaggtgtagaccaaagtttaagttggtagaagtggagccctttgatgatttctagttagcgtgagagggagctataacactcatgtagcctgttgactagatgaacaaaatgccaatttaaaaattccatataattttgccaaatgctcttctatgtcacaatttatgctcccatcaatggttatgttaaaagagcctaatttccatcattgtttctgccattcctggtctagtgctatgctggtttatttatcctcttgtgatttgttttggcaccaagtactgacatgagtttcaatgacatgaagcaaactctgacaccaagttatcgtatgcattccttccactgtcatttcctccaccctgaaccactttcccttgttatctcttctccctagtaggaagctgagcccactagggaaagtat

SEQ ID NO: 17634 - protein, 239 aa, Homo sapiens [sequence omitted]

SEQ ID NO: 17635 - DNA, 700 bp, Homo sapiens
gagcactcttagcatgattagagttgttgtttccacacaacaaaagcgtgatgttattcagaaagagcaatcagaaaataaaaaagatgttgaacatttttttaaataactaaaataaaaataatttactagaaggctaataatggaaattcttcctggtccaagtccagtggtgtttacaactaattgatcacaaccagttactgatttctttgttccttcatttccactgcttcacttgactagcctaaaaaaatgatgatgctgatgatgatggcacttctagcaacacagagggcgaagctgactcattcagatctccctccaggacaaacacacaaaaatgaaggataaaacataacaaatgttcaaataaccttgaaataaagactgtcagaagaatgcagagaaaaatgtttaaaaaagaacaataataataagaaatcctacatgcagcccaagccataggaatttttctgtggaatatagaccctagagtgttgaatgatgaagttgtatcattcaaacctggaaagaaaatttggcttcaggcccacaggagaccaggaccatggaattgaaacactggataagcctggagctctaaagacctgtctagtccattaatagagtattaggcaaactctaaccactacttagggaaacaaggaagtcttgtaggccttgagtgaaagttaaa

SEQ ID NO: 17636 - protein, 40 aa, Homo sapiens
MMKLYHSNLERKFGFRPTGDQDHGIETLDKPGALKTCLVH

SEQ ID NO: 17637 - DNA, 2725 bp, Homo sapiens
gaggctttcttcacagctagctgatcggatccttgcagctgtttcttctgtaggtctcggagctcactgagaacgtccagcacgccttcccggcggggcccggcccaggtgcgcactagatgaggcagtcaaccaagtcaattggttcccgatcaactaaatctctcctaaaaataaacactgccgcgagcttcgagagttcagcgtgtcagagcctctatgatggcagagcacctgccgcgatgcctgattggtagggagaaggatttcccgggagggggccaataccaaattttagggctgttaggctctgagcagtcccttcgtgaccggataagtcagagacccggggtttgagccttgcccggcgctgagcggagggcccagtttcgggaccacagccttgctccctgggagctccgggcggccaatgccgggcaagcccagcccggcacaggaggaggcagggcccgtctccggaaagagggccagaggcagaactgagggcctggttttgtgtaattcgatttggatacaaacaggccagacccaaactggaaacggcgaagggctggattagcaccgaagggattcgaggaggcaaacgggaagtaaaaatgctgtgtggagctgcagagggcaaggggacaggggttgcaaaggaaagagcttcgtgagactttctccttcccggcgtagggaccagcagagtgcgggcaggtcagccctgtcaccggttcgtttagggaaaaagcgcgacatggggcctgggagacaggggcagaggcggtgacagcgagggcccctgctcgggtgggcccgcgggcctcagctcagtcccctcccgagggaccgcgacccccggccccgcggccgcccgcgcgcactcaccagcccgggctgccctgggcggagccgccccgccgcgctccacagccgctgcctcttcgacgcgcgcgctgcctccaggtgcggctctaggaggaggcgccgcgggcagtgccggccgcgccccgcgactcccggtaacccgagcccgccccgccccgctagggccaggccccgccgccaccctccgcgctgggacgccggggcgcgggcatccctgccgcctacggatctcttcccaagcacctagaactttccaaagcgtgcttggaatttaacaccttggtcgtcgatccccgcaaatatactctgatgagaccggctttcttcccataccgcccaggagtttctccaggtggcattcctgtcgccttgaggtggaacatcagtagaggctcgaggctgaagcaagcacaatacacaagagactccgattcgtacaggaacatttcgaaaacaggaaatcctgaggacaattatttcatcctgagcaggaacacatttactcttataaaagtttcagcttgagagacagctggcaagatggctgaataggaacagctccagtctgcagctcccagcaagatcaatgcagaaggtccaattcttttctaaaagtcttctggctagtcccagcatttccagggaagctgaacaggtgcagccggaggcttggagccactatggaagcagcacagttgatgcctcagaggatccagagaaaagaccagataactataattcagccttcacccatattgtgtctttttgattttgtctgagtatatatgccgcacaacaagcagcttatctctgagattcaaatagttactgcaattccattatctgtttttttactgtgagggatttggagccacatttagtcctacatcacagatacaggactcaagagtcaaagtgcacagaaatttgaattccgataagaatactctgagccagtttattctggggtacatacttcattttatgctagaactctgcaatcctgatgaaagagggcttgcattgctcaactaactaactcacccgtctctcctgcagtattagaaactacttctgtatgtacacgttacagtttctaggaactccatttttgcaagacagataggagccagaaaatttgttccttcaactgtatatcgctaattaaacataaaatcaaatcagcattttaggtacttgaataactagtctgtgcttacttttattcatatggaagcagtgtttaaattattctctgattgtaaactcacttatgtaaaccattatacaggaaaaaaatgagtaatgaagcaaagttctgaagcagatctatgtaagcaaatttcaataaccttcttaagagaatatgacacttagtagtggtgagggacattttaagctttttctatttacaagttttttttaaacgagggtgtttcaaagtaaatatttgctgttacgttatgccacatgatatactaataaatgaattaatgaaattaacctaaatatccagtattattattgaatatatagctactaaaattttatattcaaatatatccaaggacatgaggaaataaggatttaattctaaacaaaaaaagaagctatgaaatatatataatttaagactataattttgttaaaaatatgtttatgtaaatgcgctaaaaaaagttctttaagaatatatgccaaaatattgacaatggttatcccctgagtgatttttattttcatccttaggattttctgtattttctgtttcacattttgaacatgtatacttttacaagaaaatatgaactaaaattaaaaatttttaaactcc

SEQ ID NO: 17638 - protein, 71 aa, Homo sapiens
MRPAFFPYRPGVSPGGIPVALRWNISRGSRLKQAQYTRDSDSYRNISKTGNPEDNYFILSRNTFTLIKVSA

SEQ ID NO: 17639 - DNA, 1275 bp, Homo sapiens
ctttgctccatgagatggattaccagaaatacatttctgttagacacgactacatacttcttcctgaagatgccctcaccaacacaactcgacttcgctggtggcagccttttgtgatcagcaatggaattgtggtctctggggtggagcgtgctcagtgggcactggacaacattttgattggtggagcagaaatcaatcccagccaattggtggacacttttgatgatgaaggcacttcccatgaagaatcaaaaagtttattttttttcttccaacatgtgatgtgttgctctccattcttttaaatctcgcactacatctgatatcaggaaatatctgtgaaggacttggtgattacctgaaagcccttctcaagaccgagtgtacaccactttcccacactgtgaactaatgacaagtgacttatttgctcataagtaaatgtcttcatgttgatgtgtccgtgaaagttgtgatctgttgtaatatcagttacagtggcagtattgacaataagaaacagtttaacagaaaaatgaaatttaagcacaaaaaatttaagagattttatgtttaaaatggcatttagcacagtatttaacattcttggtcacaaagctatttaagtggactgtatttcggctatgtctcatgttttatatgattaaattatcattgtttgtcctttatgtattctcttctacaatacaacacattgaaactgtatttacttgttatgttgtaatattttgctgctgaatttggggctacttatattctgcagaaaattaattgaaatacctattcaagaagatagttgtaaagatattgtatctcctttaatatactccttaaaaatgtatgttggtttagcgttgttttgtggataagaaaaatgcttgaccctgaaatattttctactttaaattgtggatgaagaccctatctcccacaaataagttcccatttccttgtctaaagatctttttttaagtgttctgtggctgatttactaacagtaactgccattttttgtctgtgataacagagtgatttgtaaaacagtggttgttttttcattgtgttttcttcgtggattgttttttctgcgggtcatattcataccttctgatgaagttgtacaacaccagcaacattataatggccctgtagctctgaatgctatttgtgtaactgaaaggttgcactctagggtgaaccaagctataaaagcccatgcttaaataaaaattatgtccaaaagccattgaa

SEQ ID NO: 17640 - protein, 97 aa, Homo sapiens
MDYQKYISVRHDYILLPEDALTNTTRLRWWQPFVISNGIVVSGVERAQWALDNILIGGAEINPSQLVDTFDDEGTSHEESKSLFFFFQHVMCCSPFF

SEQ ID NO: 17641 - DNA, 8192 bp, Homo sapiens
ctcggcgggggcccgctcccaggcccgctcccgagcccgttccgctcccgtccgccttcttctcgccttctctccgcgtggctcctccgtcccggcgtctccaaaactgaatgagcgagcggcgcgtagggcgcgcggcggcggcggcggcggcggcggcatggagcgcagtggctgggcccggcagactttcctcctagcgctgttgctgggggcgacgctgagggcgcgcgcggcggctggctattacccccgcttttcgcccttctttttcctgtgcacccaccacggggagctggaaggggatggggagcagggcgaggtgctcatttccctgcatattgcgggcaaccccacctactacgttccgggacaagaataccatgtgacaatttcaacaagcaccttttttgacggcttgctggtgacaggactatacacatctacaagtgttcaggcatcacagagcattggaggttccagtgctttcggatttgggatcatgtctgaccaccagtttggtaaccagtttatgtgcagtgtggtagcctctcacgtgagtcacctgcccacaaccaacctcagtttcatctggattgctccacctgcgggcacaggctgtgtgaatttcatggctacagcaacacaccggggccaggttattttcaaagatgctttagcccagcagttgtgtgaacaaggagctccaacagatgtcactgtgcacccacatctagctgaaatacatagtgacagcattatcctgagagatgactttgactcctaccaccaactgcaattaaatccaaatatatgggttgaatgtaacaactgtgagactggagaacagtgtggcgcgattatgcatggcaatgccgtcaccttctgtgaaccatatggcccacgagaactgattaccacaggccttaatacaacaacagcttctgtcctccaattttccattgggtcaggttcatgtcgctttagttattcagaccccagcatcatcgtgttatatgccaagaataactctgcggactggattcagctagagaaaattagagccccttccaatgtcagcacaatcatccatatcctctaccttcctgaggacgccaaaggggagaatgtccaatttcagtggaagcaggaaaatcttcgtgtaggtgaagtgtatgaagcctgctgggccttagataacatcttgatcatcaattcagctcacagacaagtcgttttagaagatagtctcgacccagtggacacaggcaactggcttttcttcccaggagctacagttaagcatagctgtcagtcagatgggaactccatttatttccatggaaatgaaggcagcgagttcaattttgccaccaccagggatgtagatctttccacagaagatattcaagagcaatggtcagaagaatttgagagccagcctacaggatgggatgtcttgggagctgtcattggtacagaatgtggaacgatagaatcaggcttatcaatggtcttcctcaaagatggagagaggaaattatgcactccatccatggacactaccggttatgggaacctgaggttttactttgtgatgggaggaatttgtgaccctggaaattctcatgaaaatgacataatcctgtatgcaaaaattgaaggaagaaaagagcatataacactggataccctttcctattcctcatataaggttccgtctttggtttctgtggtcatcaatcctgaacttcagactcctgctaccaaattttgtctcaggcaaaagaaccatcaaggacataataggaatgtctgggctgtagactttttccatgtcttgcctgttctcccttctacaatgtctcacatgatacagttttccatcaatctgggatgtggaacgcatcagcctggtaacagtgtcagcttggaattttctaccaaccatgggcgctcctggtccctccttcacactgaatgcttacctgagatctgtgctggaccccacctcccccacagcactgtctactcctctgaaaactacagtgggtggaaccgaataacaattccccttcctaacgcagcactaacccggaacaccaggattcgctggagacaaacaggaccaatccttggaaacatgtgggcaattgataatgtttatattggcccgtcatgtctcaaattctgttctggcagaggacagtgcactagacatggttgcaagtgtgaccctggattttctggcccagcttgtgagatggcatcccagacattcccaatgtttatttctgaaagctttggcagttccaggctctcctcttaccataacttttactctatccgtggtgctgaagtcagctttggttgtggtgtcttggccagtggtaaggccctggttttcaacaaagatgggcggcgtcagctaattacatctttccttgacagctcacaatccaggtttctccagttcacactgagactggggagcaaatctgttctgagcacgtgcagagcccctgatcagcctggtgaaggagttttgttgcattattcttatgataatgggataacttggaaactcctggagcattattcatatctcagctatcatgagcccagaataatctccgtagaactaccaggtgatgcaaagcagtttggaattcagttcagatggtggcaaccgtatcattcttcccagagagaagatgtatgggctattgatgagattatcatgacatctgtgcttttcaacagcattagtcttgactttaccaatcttgtggaggtcactcagtctctgggattctaccttggaaatgttcagccatactgtggccacgactggaccctttgttttacaggagattctaaacttgcctcaagtatgcgctatgtggaaacacaatcaatgcagataggagcatcctatatgattcagttcagtttggtgatgggatgtggccagaaatacaccccacacatggacaaccaggtgaagctggagtactcaaccaaccacggccttacctggcacctcgtccaagaagaatgccttccaagtatgccaagttgtcaggaatttacatcagcaagtatttaccatgccagtgagtttacacagtggaggagagtcatagtgcttcttccccagaaaacttggtccagtgctacccgtttccgctggagccagagctattacacagctcaagacgagtgggctttggacagcatttacattgggcagcagtgccccaacatgtgcagtgggcatggctcatgcgatcatggcatatgcaggtgtgaccaggggtaccaaggcactgaatgccacccagaagctgcccttccgtccacaattatgtcagattttgagaaccagaatggctgggagtctgactggcaagaagttattgggggagaaattgtaaaaccagaacaagggtgtggtgtcatctcttctggatcatctctgtacttcagcaaggctgggaaaagacagctggtgagttgggacctggatacttcttgggtggactttgtccagttctacatccagataggcggagagagtgcttcatgcaacaagcctgacagcagagaggagggcgtcctccttcagtacagcaacaatgggggcatccagtggcacctgctagcagagatgtacttttcagacttcagcaaacccagatttgtctatctggagcttccagctgctgccaagaccccttgcaccaggttccgctggtggcagcccgtgttctcaggggaggactatgaccagtgggcagtcgatgacatcatcattctgtccgagaagcagaagcagatcatcccagttatcaatccaactttacctcagaacttttatgagaagccagcttttgattaccctatgaatcagatgagtgtgtggttgatgttggctaatgaaggaatggttaaaaatgaaaccttctgtgctgccacaccatcagcaatgatatttggaaaatcagatggagatcgatttgcagtaactcgagatttgaccctgaaacctggatatgtgctacagttcaagctaaacataggttgtgccaatcaattcagcagtactgctccagttcttcttcagtactctcatgatgctggtatgtcctggtttctggtgaaagaaggctgttacccggcttctgcaggcaaaggatgcgaaggaaactccagagaactaagtgagcccaccatgtatcacacaggggactttgaagaatggacaagaatcaccattgttattccaaggtctcttgcatccagcaagaccagattccgatggatccaggagagcagctcacagaaaaacgtgcctccatttggtttagatggagtgtacatatccgagccttgtcccagttactgcagtggccatggggactgcatttcaggagtgtgtttctgtgacctgggatatactgctgcacaaggaacctgtgtgtcaaatgtccccaatcacaatgagatgttcgataggtttgaggggaagctcagccctctgtggtacaagataacaggtgcccaggttggaactggctgtggaacacttaacgatggcaaatctctctacttcaatggccctgggaaaagggaagcccggacggtccctctggacaccaggaatatcagacttgttcaattttatatacaaattggaagcaaaacttcaggcattacctgcatcaaaccaagaactagaaatgaagggcttattgttcagtattcaaatgacaatgggatactctggcatttgcttcgagagttggacttcatgtccttcctggaaccacagatcatttccattgacctgccacaggacgcgaagacacctgcaacggcatttcgatggtggcaaccgcaacatgggaagcattcagcccagtgggctttggatgatgttcttataggaatgaatgacagctctcaaactggatttcaagacaaatttgatggctctatagatttgcaagccaactggtatcgaatccaaggaggtcaagttgatattgactgtctctctatggatactgctctgatattcactgaaaacataggaaaacctcgttatgctgagacctgggattttcatgtgtcagcatctacctttttgcagtttgaaatgagcatgggctgtagcaagcccttcagcaactcccacagtgtacagctccagtattctctgaacaatggcaaggactggcatcttgtcaccgaagagtgtgttcctccaaccattggctgtctgcattacacggaaagttcaatttacacctcggaaagattccagaattggaagcggatcactgtctaccttccactctccaccatttctcccaggacccggttcagatggattcaggccaactacactgtgggggctgattcctgggcgattgataatgttgtactggcctcagggtgcccttggatgtgctcaggacgagggatttgtgatgctggacgctgtgtgtgtgaccggggctttggtggaccctattgtgttcctgttgttcctctgccctcgattcttaaagacgatttcaatgggaatttacatcctgacctttggcctgaagtgtatggtgcagagagggggaatctgaatggtgaaaccatcaaatctggaacatctctaatttttaaaggggaaggactaaggatgcttatttcaagagatctagattgtacaaatacaatgtatgtccagttttcacttagatttatagcaaaaagtaccccagagagatctcactctattctgttacaattctccatcagtggaggaatcacttggcacctgatggatgaattttactttcctcaaacaacgaatatacttttcatcaatgttcccttgccatacactgcccaaaccaatgctacaagattcagactctggcaaccttataataacggtaagaaagaagaaatctggattgttgatgacttcattatcgatggaaataatgtaaacaaccctgtgatgctcttggatacatttgattttgggcccagagaagacaattggtttttctatcctggtggtaacatcggtctttattgtccatattcttcaaagggggcacctgaagaagattcagctatggtgtttgtttcaaatgaagttggtgagcattccattaccacccgtgacctaaatgtgaatgagaacaccatcatacaatttgagatcaacgttggctgttcgactgatagctcatccgcggatccagtgagactggaattttcaagggacttcggggcgacctggcaccttctgctgcccctctgctaccacagcagcagccacgtcagctctttatgctccaccgagcaccaccccagcagcacctactacgcaggaaccatgcagggctggaggagggaggtcgtgcactttgggaagctgcacctttgtggatctgtccgtttcagatggtaccagggattttaccctgccggctctcagccagtgacatgggccattgataatgtctacatcggtccccagtgtgaggagatgtgtaatggacaggggagctgtatcaatggaaccaaatgtatatgtgaccctggctactcaggtccaacctgtaaaataagcaccaaaaatcctgattttctcaaagatgatttcgaaggtcagctagaatctgatagattcttattaatgagtggtgggaaaccatctcgaaagtgtggaatcctttctagtggaaacaacctctttttcaatgaagatggcttgcgcatgttgatgacacgagacctggatttatcacatgctagatttgtgcagttcttcatgagactgggatgtggtaaaggcgttcctgaccccaggagtcaacccgtgctcctacagtattctctcaacggtggcctctcgtggagtcttcttcaggagttccttttcagcaattccagcaatgtgggcaggtacattgccctggagatacccttgaaagcccgttctggttctactcgccttcgctggtggcaaccgtctgagaatgggcacttctacagcccctgggttatcgatcagattcttattggaggaaatatttctggtaatacggtcttggaagatgatttcacaacccttgatagtaggaaatggctgcttcacccaggaggcaccaagatgcccgtgtgtggctctactggtgatgccctggtcttcattgaaaaggccagcacccgttacgtggtcagcacagacgttgccgtgaatgaggattccttcctacagatagacttcgctgcctcctgctcagtcacagactcttgttatgcgattgaattggaatactcagtagatcttggattgtcatggcacccattggtaagggactgtctgcctaccaatgtggaatgcagtcgctatcatctgcaacggatcctggtgtcagacactttcaacaagtggactagaatcactctgcctctccctccttataccaggtcccaagccactcgtttccgttggcatcaaccagctccttttgacaagcagcagacatgggcaatagataatgtctatatcggggatggctgcatagacatgtgcagtggccatgggagatgcatccagggaaactgcgtctgtgatgaacagtggggtggcctgtactgtgatgaccccgagacctctcttccaacccaactcaaagacaacttcaatcgagctccatccagtcagaactggctgactgtgaacggagggaaattgagtacagtgtgtggagccgtggcgtcgggaatggctctccatttcagtgggggttgtagtcgattattagtcactgtggatctaaacctcactaatgctgagttcatccaattttacttcatgtatgggtgcctgattacaccaaacaaccgtaaccaaggtgttctcttggaatattctgtcaatggaggcattacctggaacctgctcatggagattttctatgaccagtacagtaagcccggatttgtgaatatccttctccctcctgatgctaaagagattgccactcgcttccgctggtggcagccaagacatgacggcctggatcagaacgactgggccattgacaatgtcctcatctcaggctctgctgaccaaaggaccgttatgctggacaccttcagcagcgccc

SEQ ID NO: 17642 - protein, 3458 aa, Homo sapiens; identical to SEQ ID NO: 2100

SEQ ID NO: 17643 - DNA, 598 bp, Homo sapiens
ctcagtgggcactggacaacattttgattggtggagcagaaatcaatcccagccaattggtggacacttttgatgatgaaggcacttcccatgaagaaaactggagtttttaccctaatgctgtaaggacagcaggattttgtggcaatccatcctttcacctctattggccaaataaaaagaaggacaagactcacaatgctctctcctcccgagaactcattatacagccaggatacatgatgcagtttaaaattgtggtgggttgtgaagccacttcttgtggtgaccttcattccgtaatgctggaatacactaaggatgcaagatcggattcctggcagctcgtacagacccagtgccttccttcctcttctaacagcattggctgctcccctttccagttccatgaagccaccatctacaactctgtcaacagctcaagctgttccgctggatccagaagggagaagaaactgagaagcaaagctgggcaattgaccacgtgtacattggagaggcttgccccaagctctgcagcgggcacggatactgcacgaccggtgccatctgcatctgcgacgagagcttccaaggt

SEQ ID NO: 17644 - protein, 118 aa, Homo sapiens
MMQFKIVVGCEATSCGDLHSVMLEYTKDARSDSWQLVQTQCLPSSSNSIGCSPFQFHEATIYNSVNSSSCSAGSRREKKLRSKAGQLTTCTLERLAPSSAAGTDTARPVPSASATRAS

SEQ ID NO: 17645 - DNA, 1027 bp, Homo sapiens
ggaattcagttcagatggtggcaaccgtatcattcttcccagagagaagatgtatgggctattgatgagattatcatgacatctgtgcttttcaacagcattagtcttgactttaccaatcttgtggaggtcactcagtctctgggattctaccttggaaatgttcagccatactgtggccacgactggaccctttggctggagtgcaatggtgcgatctcaactcactgcaacctctgcctcccgggctcaaacgacacattttctatttgatagcctcagatgcttgtttttacagatgttctttcttagtcctggagactttaaagaagataaacgattaaagcaaagaaggtgtaaagatgtagaacaaaatgagatttcttagaattttatgcttctgaacatttaaattgacctgaattgacagtaattcaaactgatcatgtaccgtaaactatatccttcaagtttgtatagaagagttttttcctaacacttctaatataacaaagaatcatatcatgaatgcaagtcctgtatcatgtttattttcataaatagttagcatctgctcagataaatgcaaaagttgctgagcattttaatttaacacttgcattgaatgcatgataacagcagtttaatttctgtgctttgatcaaaaccctaagaacaatatcccttcacacaagtctgatgaatattcttaacccaccaccgctttaattggtggagatacatttactttgtgaaagtacaatcacagtaattatagaaaaaccataagaaaacataaataattgtacaatccccatgggcaccttgagcagcaccataggagttttattaacaaccacatgtgagcaatcgatttgactttctgatcttctctgaagcaaaaaggagttgtcttggttatgaaacaacagagagtataccctggtggtgataatgagactagagaaacacattaaccactttaataaggacatgaaaaatgcttgcttctcattaaagtgaaaca

SEQ ID NO: 17646 - protein, 75 aa, Homo sapiens
MFSHTVATTGPFGWSAMVRSQLTATSASRAQTTHFLFDSLRCLFLQMFFLSPGDFKEDKRLKQRRCKDVEQNEIS

SEQ ID NO: 17647 - DNA, 968 bp, Homo sapiens
gtttctagcagtggttttaaatcatggttcaacctgcccttaactcctctctgctctcgtttgtgtagtttctcctgaactgctcttggtctccatgaaggctactggcaggagcacatgagagaggtctcctaaaaacccagaacagaagatcattaagagagtgattgctcttgaaggagatattgtcagaaccataggacacaaaaaccggtatgtcaaagtcccccgtggtcacatctgggttgaaggtgatcatcatggacacagttttgacagtaattcttttgggccggtttccctaggacttctgcatgcccatgccacacatatcctgtggcccccagagcgctggcagaaattggaatctgttcttcctccagagcgcttaccagtacagagagaagaggaatgactgcatgaatctacctgagttgctggcattgggaggccagttactggaaaggaatggaaaaaagaagcctccaaaagggaaaaacttctgacaatatgatgctgtgcgagaaatatttacagcacattaaaacgatctgtattattaaataaataattttcaaatgttaaacagtattaaatggcacctgattttgtgttaaattttagttccctgttgtttaatgcccccaaaatatgcagacctttgggaatataaaaatattgcacccacatgtcttaatggggctgaatttcagattatttgttacatatacttattatattgattgttgggttttgattttggtgcttgctgctgaaataaattgaaaattaatattcaataaaaatgatgtatttgtcacttgctgttaaggtagaacaagaaggaacacatattatacacataatgatgggaattacattgtgatttgtactatctacaaaggagtaactgccagttaggaagaacagtaaacagtgatgttaaaataaaacaatgatttgctaag

SEQ ID NO: 17648 - protein, 63 aa, Homo sapiens [sequence omitted]

SEQ ID NO: 17649 - DNA, 1119 bp, Homo sapiens
cagacctcactagatttacctcctcatctggctcttcatttgtggtacttttaatgcaccagtaatggaacaagcagcaggagctaatggaccataagagggaaatttgttgtttaaacaatgattatcttttatatttggctaacatgaaaaggggaaagtacactttttctgtcacaccgcatgagaaggtctcctaaaaacccagaacagaagatcattaagagagtgattgctcttgaaggagatattgtcagccttccctgacatccagttccgtcttcgagtccctagacaatgtgatttttttgaatacatacgatagcaaatagaagagatttcctgaattcatgtgatagcaaatagaagagcttcagtgaaaggaatgttttatgttaatctctgtggaagtccagtttataggaaaaacatttgaaaataaaatggtttccctaggacttctgcatgcccatgccacacatatcctgtggcccccagagcgctggcagaaattggaatctgttcttcctccagagcgcttaccagtacagagagaagaggaatgactgcatgaatctacctgagttgctggcattgggaggccagttactggaaaggaatggaaaaaagaagcctccaaaagggaaaaacttctgacaatatgatgctgtgcgagaaatatttacagcacattaaaacgatctgtattattaaataaataattttcaaatgttaaacagtattaaatggcacctgattttgtgttaaattttagttccctgttgtttaatgcccccaaaatatgcagacctttgggaatataaaaatattgcacccacatgtcttaatggggctgaatttcagattatttgttacatatacttattatattgattgttgggttttgattttggtgcttgctgctgaaataaattgaaaattaatattcaataaaaatgatgtatttgtcacttgctgttaaggtagaacaagaaggaacacatattatacacataatgatgggaattacattgtgatttgtactatctacaaaggagtaactgccagttaggaagaacagtaaacagtgatgttaaaataaaacaatgatttgctaag

SEQ ID NO: 17650 - protein, 57 aa, Homo sapiens
MLISVEVQFIGKTFENKMVSLGLLHAHATHILWPPERWQKLESVLPPERLPVQREEE

SEQ ID NO: 17651 - DNA, 1138 bp, Homo sapiens
accccccagctccatggggacaaaagctactatgctctggacccttccagacctcactagatttacctcctcatctggctcttcatttgtggtacttttaatgcaccagtaatggtaggagaggacattgaagcaaggagacactttctgaacctctgttgccaaccgagaagagttagcctaagattgaagaagtgcatatctgaggtcaaggacaaggcgggcagtgctcaatgtcatcctttagaacagagggcaggaatcccatctggagagtggaggcaactgaaagagaggtctcctaaaaacccagaacagaagatcattaagagagtgattgctcttgaaggagatattgtcagaaccataggacacaaaaaccggtatgtcaaagtcccccgtggtcacatctgggttgaaggtgatcatcatggacacagttttgacagtaattcttttgggccggtttccctaggacttctgcatgcccatgccacacatatcctgtggcccccagagcgctggcagaaattggaatctgttcttcctccagagcgcttaccagtacagagagaagaggaatgactgcatgaatctacctgagttgctggcattgggaggccagttactggaaaggaatggaaaaaagaagcctccaaaagggaaaaacttctgacaatatgatgctgtgcgagaaatatttacagcacattaaaacgatctgtattattaaataaataattttcaaatgttaaacagtattaaatggcacctgattttgtgttaaattttagttccctgttgtttaatgcccccaaaatatgcagacctttgggaatataaaaatattgcacccacatgtcttaatggggctgaatttcagattatttgttacatatacttattatattgattgttgggttttgattttggtgcttgctgctgaaataaattgaaaattaatattcaataaaaatgatgtatttgtcacttgctgttaaggtagaacaagaaggaacacatattatacacataatgatgggaattacattgtgatttgtactatctacaaaggagtaactgccagttaggaagaacagtaaacagtgatgttaaaataaaacaatgatttgctaag

SEQ ID NO: 17652 - protein, 157 aa, Homo sapiens
MVGEDIEARRHFLNLCCQPRRVSLRLKKCISEVKDKAGSAQCHPLEQRAGIPSGEWRQLKERSPKNPEQKIIKRVIALEGDIVRTIGHKNRYVKVPRGHIWVEGDHHGHSFDSNSFGPVSLGLLHAHATHILWPPERWQKLESVLPPERLPVQREEE

SEQ ID NO: 17653 - DNA, 1372 bp, Homo sapiens
tctgaggcgcgtgcggcggccaccccagcctagtcctcttcttggtgccactggctaactaggttgagaaaccggcgccacaggcggcacacctggcccggagctggcccgctcctccccgccgagccggcgccccaacaacgcgccctctcccagtcctcacaaaggggcctagtccggcccccggctctggccgtgagggagcgctgtgggggcgcgctgccttctgcctggaagtgttgggcaggtggtgggagagcgtcaggcttgaacaacatgattttaaagcacgtgtctgtctgtcgttttttacttttagggttttggccaaattgggcgagggcacaaaataaccacttaccccttctcaccgaggaagagcgggagaaagggtatggcacagtcacaagggtgggtgaaaagatacatcaaggccttttgtaaaggcttctttgtggcggtgcctgtggcagtgactttcttggatcgggtcgcctgtgtggcaagagtagaaggagcatcgatgcagccttctttgaatcctggggggagccagtcatctgatgtggtgcttttgaaccactggaaagtgaggaattttgaagtacaccgtggtgacattgtatcattggtgtctcctaaaaacccagaacagaagatcattaagagagtgattgctcttgaaggagatattgtcaggtttccctaggacttctgcatgcccatgccacacatatcctgtggcccccagagcgctggcagaaattggaatctgttcttcctccagagcgcttaccagtacagagagaagaggaatgactgcatgaatctacctgagttgctggcattgggaggccagttactggaaaggaatggaaaaaagaagcctccaaaagggaaaaacttctgacaatatgatgctgtgcgagaaatatttacagcacattaaaacgatctgtattattaaataaataattttcaaatgttaaacagtattaaatggcacctgattttgtgttaaattttagttccctgttgtttaatgcccccaaaatatgcagacctttgggaatataaaaatattgcacccacatgtcttaatggggctgaatttcagattatttgttacatatacttattatattgattgttgggttttgattttggtgcttgctgctgaaataaattgaaaattaatattcaataaaaatgatgtatttgtcacttgctgttaaggtagaacaagaaggaacacatattatacacataatgatgggaattacattgtgatttgtactatctacaaaggagtaactgccagttaggaagaacagtaaacagtgatgttaaaataaaacaatgatttgctaag

SEQ ID NO: 17654 - protein, 104 aa, Homo sapiens
MAQSQGWVKRYIKAFCKGFFVAVPVAVTFLDRVACVARVEGASMQPSLNPGGSQSSDVVLLNHWKVRNFEVHRGDIVSLVSPKNPEQKIIKRVIALEGDIVRFP

SEQ ID NO: 17655 - DNA, 1524 bp, Homo sapiens
cggccgcgagtcctgcgtgatcgcgagcatgtgtgcgtgcgcgtgtttatctgaggcgcgtgcggcggccaccccagcctagtcctcttcttggtgccactggctaactaggttgagaaaccggcgccacaggcggcacacctggcccggagctggcccgctcctccccgccgagccggcgccccaacaacgcgccctctcccagtcctcacaaaggggcctagtccggcccccggctctggccgtgagggagcgctgtgggggcgcgctgccttctgcctggaagtgttgggcaggtggtgggagagcgtcaggcttgaacaacatgattttaaagcacgtgtctgtctgtcgttttttacttttagggttttggccaaattgggcgagggcacaaaataaccacttaccccttctcaccgaggaagagcgggagaaagggtatggcacagtcacaagggtgggtgaaaagatacatcaaggccttttgtaaaggcttctttgtggcggtgcctgtggcagtgactttcttggatcgggtcgcctgtgtggcaagagtagaaggagcatcgatgcagccttctttgaatcctggggggagccagtcatctgatgtggtgcttttgaaccactggaaagtgaggaattttgaagtacaccgtggtgacattgtatcattggtgtctcctaaaaacccagaacagaagatcattaagagagtgattgctcttgaaggagatattgtcagaaccataggacacaaaaaccggtatgtcaaagtcccccgtggtcacatctgggttgaaggtgatcatcatggacacagttttgacagtaattcttttgggccggtttccctaggacttctgcatgcccatgccacacatatcctgtggcccccagagcgctggcagaaattggaatctgttcttcctccagagcgcttaccagtacagagagaagaggaatgactgcatgaatctacctgagttgctggcattgggaggccagttactggaaaggaatggaaaaaagaagcctccaaaagggaaaaacttctgacaatatgatgctgtgcgagaaatatttacagcacattaaaacgatctgtattattaaataaataattttcaaatgttaaacagtattaaatggcacctgattttgtgttaaattttagttccctgttgtttaatgcccccaaaatatgcagacctttgggaatataaaaatattgcacccacatgtcttaatggggctgaatttcagattatttgttacatatacttattatattgattgttgggttttgattttggtgcttgctgctgaaataaattgaaaattaatattcaataaaaatgatgtatttgtcacttgctgttaaggtagaacaagaaggaacacatattatacacataatgatgggaattacattgtgatttgtactatctacaaaggagtaactgccagttaggaagaacagtaaacagtgatgttaaaataaaacaatgatttgctaag

SEQ ID NO: 17656 - protein, 175 aa, Homo sapiens; identical to SEQ ID NO: 2102

SEQ ID NO: 17657 - DNA, 1203 bp, Homo sapiens
gggcggggtctgcgcggggacttcccccgggctgagctgcgcagcggggttttggccaaattgggcgagggcacaaaataaccacttaccccttctcaccgaggaagagcgggagaaagggtatggcacagtcacaagggtgggtgaaaagatacatcaaggccttttgtaaaggcttctttgtggcggtgcctgtggcagtgactttcttggatcgggtcgcctgtgtggcaagagtagaaggagcatcgatgcagccttctttgaatcctggggggagccagtcatctgatgtggtgcttttgaaccactggaaagtgaggaattttgaagtacaccgtggtgacattgtatcattggtgtctcctaaaaacccagaacagaagatcattaagagagtgattgctcttgaaggagatattgtcagaaccataggacacaaaaaccggtatgtcaaagtcccccgtggtcacatctgggttgaaggtgatcatcatggacacagttttgacagtaattcttttgggccggtttccctaggacttctgcatgcccatgccacacatatcctgtggcccccagagcgctggcagaaattggaatctgttcttcctccagagcgcttaccagtacagagagaagaggaatgactgcatgaatctacctgagttgctggcattgggaggccagttactggaaaggaatggaaaaaagaagcctccaaaagggaaaaacttctgacaatatgatgctgtgcgagaaatatttacagcacattaaaacgatctgtattattaaataaataattttcaaatgttaaacagtattaaatggcacctgattttgtgttaaattttagttccctgttgtttaatgcccccaaaatatgcagacctttgggaatataaaaatattgcacccacatgtcttaatggggctgaatttcagattatttgttacatatacttattatattgattgttgggttttgattttggtgcttgctgctgaaataaattgaaaattaatattcaataaaaatgatgtatttgtcacttgctgttaaggtagaacaagaaggaacacatattatacacataatgatgggaattacattgtgatttgtactatctacaaaggagtaactgccagttaggaagaacagtaaacagtgatgttaaaataaaacaatgatttgctaag

SEQ ID NO: 17658 - protein, 175 aa, Homo sapiens; identical to SEQ ID NO: 2102

SEQ ID NO: 17659 - DNA, 1162 bp, Homo sapiens
gggttttggccaaattgggcgagggcacaaaataaccacttaccccttctcaccgaggaagagcgggagaaagggtatggcacagtcacaagggtgggtgaaaagatacatcaaggccttttgtaaaggcttctttgtggcggtgcctgtggcagtgactttcttggatcgggtcgcctgtgtggcaagagtagaaggagcatcgatgcagccttctttgaatcctggggggagccagtcatctgatgtggtgcttttgaaccactggaaagtgaggaattttgaagtacaccgtggtgacattgtatcattggtgtctcctaaaaacccagaacagaagatcattaagagagtgattgctcttgaaggagatattgtcagagatgggagaaaactgaaaaggatatgaaacagaaacttccgaatcagtgacaagaatgaaagctttagatgataagattgtaacaatcaggtgtttaagcagcctttagtaatgtcgtatttattgtacttgctgataaatcaagaacaattgttgacattcagcaagtaaatactgtgtggcatgatgtgtctcattgtgatcgctttctttaaacaagttgtagccaggcctatacaatgtggtagccaaaatgctttgactactacattgaggaagttttctgaccctgttttctaaaaaaacttgatcctaaagtatttgtattaatgatagtacacatattaactaatctcactgaaatgaacctcagtcagttttagagcagattctaggctagcagttctcacagcatggccagaggatcccaggggatccccactgggggcctatgagattaaaactactttcctaataatactaaagtgttacttgccgtttttcactctcattctcttgtgagtgtacagtggaattttccagatatgtaatattggagttgattgaatgcaggagcagatatgagaatccagctgttttctattaagccagaaactaaaaagatttgcaaaaatgtaaaaaaaaaaaatcattatttttactatttattgtttgcttttggaaaaggactataatttttatttaaatcgtattctttttgttaacataagggtttattattggtattttaaattgaatcaataaatgaaattttaaaac

SEQ ID NO: 17660 - protein, 110 aa, Homo sapiens
MAQSQGWVKRYIKAFCKGFFVAVPVAVTFLDRVACVARVEGASMQPSLNPGGSQSSDVVLLNHWKVRNFEVHRGDIVSLVSPKNPEQKIIKRVIALEGDIVRDGRKLKRI

SEQ ID NO: 17661 - DNA, 3430 bp, Homo sapiens
ggctcctctctggggagtggagggtgttcagttattaatgaccgctgagcaggcagcaccatgtcagtgtgacaactgatcgggtgaacgatgcaccactaaccaccatggaaacaaggaaaaataaagccagctcacaggatctctcttcactggattgagagcctcagcctgccgactgagaaaaagagttccaggaaaaagaaggaatcccggctgcagcctcctgccttcctttatattttaaaatagagagataagattgcgtgcatgtgtgcatatctatagtatatattttgtacactttgttacacagacacacaaatgcacctatttataccgggcaagaacacaaccatgtgattatctcaaccaaggaactgaggaatccagcacgcaaggacatcggaggtgggctagcactgaaactgcttttcaagcatcatgctgctattcctgcaaatactgaagaagcatgggatttaaatattttacttctaaataaatgaattactcaatctcctatgaccatctatacatactccaccttcaaaaagtacatcaatattatatcattaaggaaatagtaaccttctcttctccaatatgcatgacatttttggacaatgcaattgtggcactggcacttatttcagtgaagaaaaactttgtggttctatggcattcatcatttgacaaatgcaagcatcttccttatcaatcagctcctattgaacttactagcactgactgtggaatccttaagggcccattacatttctgaagaagaaagctaagatgaaggacatgccactccgaattcatgtgctacttggcctagctatcactacactagtacaagctgtagataaaaaagtggattgtccacggttatgtacgtgtgaaatcaggccttggtttacacccagatccatttatatggaagcatctacagtggattgtaatgatttaggtcttttaactttcccagccagattgccagctaacacacagattcttctcctacagactaacaatattgcaaaaattgaatactccacagactttccagtaaaccttactggcctggatttatctcaaaacaatttatcttcagtcaccaatattaatgtaaaaaagatgcctcagctcctttctgtgtacctagaggaaaacaaacttactgaactgcctgaaaaatgtctgtccgaactgagcaacttacaagaactctatattaatcacaacttgctttctacaatttcacctggagcctttattggcctacataatcttcttcgacttcatctcaattcaaatagattgcagatgatcaacagtaagtggtttgatgctcttccaaatctagagattctgatgattggggaaaatccaattatcagaatcaaagacatgaactttaagcctcttatcaatcttcgcagcctggttatagctggtataaacctcacagaaataccagataacgccttggttggactggaaaacttagaaagcatctctttttacgataacaggcttattaaagtaccccatgttgctcttcaaaaagttgtaaatctcaaatttttggatctaaataaaaatcctattaatagaatacgaaggggtgattttagcaatatgctacacttaaaagagttggggataaataatatgcctgagctgatttccatcgatagtcttgctgtggataacctgccagatttaagaaaaatagaagctactaacaaccctagattgtcttacattcaccccaatgcatttttcagactccccaagctggaatcactcatgctgaacagcaatgctctcagtgccctgtaccatggtaccattgagtctctgccaaacctcaaggaaatcagcatacacagtaaccccatcaggtgtgactgtgtcatccgttggatgaacatgaacaaaaccaacattcgattcatggagccagattcactgttttgcgtggacccacctgaattccaaggtcagaatgttcggcaagtgcatttcagggacatgatggaaatttgtctccctcttatagctcctgagagctttccttctaatctaaatgtagaagctgggagctatgtttcctttcactgtagagctactgcagaaccacagcctgaaatctactggataacaccttctggtcaaaaactcttgcctaataccctgacagacaagttctatgtccattctgagggaacactagatataaatggcgtaactcccaaagaagggggtttatatacttgtatagcaactaacctagttggcgctgacttgaagtctgttatgatcaaagtggatggatcttttccacaagataacaatggctctttgaatattaaaataagagatattcaggccaattcagttttggtgtcctggaaagcaagttctaaaattctcaaatctagtgttaaatggacagcctttgtcaagactgaaaattctcatgctgcgcaaagtgctcgaataccatctgatgtcaaggtatataatcttactcatctgaatccatcaactgagtataaaatttgtattgatattcccaccatctatcagaaaaacagaaaaaaatgtgtaaatgtcaccaccaaaggtttgcaccctgatcaaaaagagtatgaaaagaataataccacaacacttatggcctgtcttggaggccttctggggattattggtgtgatatgtcttatcagctgcctctctccagaaatgaactgtgatggtggacacagctatgtgaggaattacttacagaaaccaacctttgcattaggtgagctttatcctcctctgataaatctctgggaagcaggaaaagaaaaaagtacatcactgaaagtaaaagcaactgttataggtttaccaacaaatatgtcctaaaaaccaccaaggaaacctactccaaaaatgaacaaaaaaaaaaaaagcgaaagactgcagttgtgctaaaaacaaaacaaaacaaacaaacaaacaaaaaagtaaaaaaagattactttcgagagagaagtttaagcttcaccaatgctgctcctgaccaatggaaatatgtacaacttcagcattttaagtaactggcttcaaggggtactgtggcaaccaaataaaataactccattttctaaaactttcatgtaacttttatgtctggactacagttcaagtggacaaaaacatttctgtattttttttaagtaaataagagtagttgaactgagcaatacctcctcctgtgttgtattacacatattagccacgagtttttgcagtgaccagataaacttgaattgacacgtggtgtaataaaatggacaaattctgtagagtagacacagtgagtatgtggacctcttttataaggaaaaatacattttggattaaaatc

SEQ ID NO: 17662 - protein, 708 aa, Homo sapiens
MKDMPLRIHVLLGLAITTLVQAVDKKVDCPRLCTCEIRPWFTPRSIYMEASTVDCNDLGLLTFPARLPANTQILLLQTNNIAKIEYSTDFPVNLTGLDLSQNNLSSVTNINVKKMPQLLSVYLEENKLTELPEKCLSELSNLQELYINHNLLSTISPGAFIGLHNLLRLHLNSNRLQMINSKWFDALPNLEILMIGENPIIRIKDMNFKPLINLRSLVIAGINLTEIPDNALVGLENLESISFYDNRLIKVPHVALQKVVNLKFLDLNKNPINRIRRGDFSNMLHLKELGINNMPELISIDSLAVDNLPDLRKIEATNNPRLSYIHPNAFFRLPKLESLMLNSNALSALYHGTIESLPNLKEISIHSNPIRCDCVIRWMNMNKTNIRFMEPDSLFCVDPPEFQGQNVRQVHFRDMMEICLPLIAPESFPSNLNVEAGSYVSFHCRATAEPQPEIYWITPSGQKLLPNTLTDKFYVHSEGTLDINGVTPKEGGLYTCIATNLVGADLKSVMIKVDGSFPQDNNGSLNIKIRDIQANSVLVSWKASSKILKSSVKWTAFVKTENSHAAQSARIPSDVKVYNLTHLNPSTEYKICIDIPTIYQKNRKKCVNVTTKGLHPDQKEYEKNNTTTLMACLGGLLGIIGVICLISCLSPEMNCDGGHSYVRNYLQKPTFALGELYPPLINLWEAGKEKSTSLKVKATVIGLPTNMS

SEQ ID NO: 17663 - DNA, 3480 bp, Homo sapiens
ggctcctctctggggagtggagggtgttcagttattaatgaccgctgagcaggcagcaccatgtcagtgtgacaactgatcgggtgaacgatgcaccactaaccaccatggaaacaaggaaaaataaagccagctcacaggatctctcttcactggattgagagcctcagcctgccgactgagaaaaagagttccaggaaaaagaaggaatcccggctgcagcctcctgccttcctttatattttaaaatagagagataagattgcgtgcatgtgtgcatatctatagtatatattttgtacactttgttacacagacacacaaatgcacctatttataccgggcaagaacacaaccatgtgattatctcaaccaaggaactgaggaatccagcacgcaaggacatcggaggtgggctagcactgaaactgcttttcaagcatcatgctgctattcctgcaaatactgaagaagcatgggatttaaatattttacttctaaataaatgaattactcaatctcctatgaccatctatacatactccaccttcaaaaagtacatcaatattatatcattaaggaaatagtaaccttctcttctccaatatgcatgacatttttggacaatgcaattgtggcactggcacttatttcagtgaagaaaaactttgtggttctatggcattcatcatttgacaaatgcaagcatcttccttatcaatcagctcctattgaacttactagcactgactgtggaatccttaagggcccattacatttctgaagaagaaagctaagatgaaggacatgccactccgaattcatgtgctacttggcctagctatcactacactagtacaagctgtagataaaaaagtggattgtccacggttatgtacgtgtgaaatcaggccttggtttacacccagatccatttatatggaagcatctacagtggattgtaatgatttaggtcttttaactttcccagccagattgccagctaacacacagattcttctcctacagactaacaatattgcaaaaattgaatactccacagactttccagtaaaccttactggcctggatttatctcaaaacaatttatcttcagtcaccaatattaatgtaaaaaagatgcctcagctcctttctgtgtacctagaggaaaacaaacttactgaactgcctgaaaaatgtctgtccgaactgagcaacttacaagaactctatattaatcacaacttgctttctacaatttcacctggagcctttattggcctacataatcttcttcgacttcatctcaattcaaatagattgcagatgatcaacagtaagtggtttgatgctcttccaaatctagagattctgatgattggggaaaatccaattatcagaatcaaagacatgaactttaagcctcttatcaatcttcgcagcctggttatagctggtataaacctcacagaaataccagataacgccttggttggactggaaaacttagaaagcatctctttttacgataacaggcttattaaagtaccccatgttgctcttcaaaaagttgtaaatctcaaatttttggatctaaataaaaatcctattaatagaatacgaaggggtgattttagcaatatgctacacttaaaagagttggggataaataatatgcctgagctgatttccatcgatagtcttgctgtggataacctgccagatttaagaaaaatagaagctactaacaaccctagattgtcttacattcaccccaatgcatttttcagactccccaagctggaatcactcatgctgaacagcaatgctctcagtgccctgtaccatggtaccattgagtctctgccaaacctcaaggaaatcagcatacacagtaaccccatcaggtgtgactgtgtcatccgttggatgaacatgaacaaaaccaacattcgattcatggagccagattcactgttttgcgtggacccacctgaattccaaggtcagaatgttcggcaagtgcatttcagggacatgatggaaatttgtctccctcttatagctcctgagagctttccttctaatctaaatgtagaagctgggagctatgtttcctttcactgtagagctactgcagaaccacagcctgaaatctactggataacaccttctggtcaaaaactcttgcctaataccctgacagacaagttctatgtccattctgagggaacactagatataaatggcgtaactcccaaagaagggggtttatatacttgtatagcaactaacctagttggcgctgacttgaagtctgttatgatcaaagtggatggatcttttccacaagataacaatggctctttgaatattaaaataagagatattcaggccaattcagttttggtgtcctggaaagcaagttctaaaattctcaaatctagtgttaaatggacagcctttgtcaagactgaaaattctcatgctgcgcaaagtgctcgaataccatctgatgtcaaggtatataatcttactcatctgaatccatcaactgagtataaaatttgtattgatattcccaccatctatcagaaaaacagaaaaaaatgtgtaaatgtcaccaccaaaggtttgcaccctgatcaaaaagagtatgaaaagaataataccacaacacttatggcctgtcttggaggccttctggggattattggtgtgatatgtcttatcagctgcctctctccagaaatgaactgtgatggtggacacagctatgtgaggaattacttacagaaaccaacctttgcattaggtgagctttatcctcctctgataaatctctgggaagcaggaaaagaaaaaagtacatcactgaaagtaaaagcaactgttataggtttaccaacaaatatgtcctaaaaaccaccaaggaaacctactccaaaaatgaacaaaaaaaaaaaaagcgaaagactgcagttgtgctaaaaacaaaacaaaacaaacaaacaaacaaaaaagtaaaaaaagattactttcgagagagaagtttaagcttcaccaatgctgctcctgaccaatggaaatatgtacaacttcagcattttaagtaactggcttcaaggggtactgtggcaaccaaataaaataactccattttctaaaactttcatgtaacttttatgtctggactacagttcaagtggacaaaaacatttctgtattttttttaagtaaataagagtagttgaactgagcaatacctcctcctgtgttgtattacacatattagccacgagtttttgcagtgaccagataaacttgaattgacacgtggtgtaataaaatggacaaattctgtagagtagacacagtgagtatgtggacctcttttataaggaaaaatacattttggattaaaatcaattgcttctgtcttgttttgtttctaaataaagaataatttctgggaaa

SEQ ID NO: 17664 - protein, 708 aa, Homo sapiens; identical to SEQ ID NO: 17662

SEQ ID NO: 17665 - DNA, 3640 bp, Homo sapiens
agttattaatgaccgctgagcaggcagcaccatgtcagtgtgacaactgatcgggtgaacgatgcaccactaaccaccatggaaacaaggaaaaataaagccagctcacaggatctctcttcactggattgagagcctcagcctgccgactgagaaaaagagttccaggaaaaagaaggaatcccggctgcagcctcctgccttcctttatattttaaaatagagagataagattgcgtgcatgtgtgcatatctatagtatatattttgtacactttgttacacagacacacaaatgcacctatttataccgggcaagaacacaaccatgtgattatctcaaccaaggaactgaggaatccagcacgcaaggacatcggaggtgggctagcactgaaactgcttttcaaggaggtgaagcattccacagataatcagctactctattcagggaaggagtgtaaacatcaccactttttgcatgtttgcataaaaaaggcccactgaatcagttaaagacgaggaagaggaggagaaagagaaagaagaggaagatgttgggcaacatttatttaacatgctccacagcccggaccctggcatcatgctgctattcctgcaaatactgaagaagcatgggatttaaatattttacttctaaataaatgaattactcaatctcctatgaccatctatacatactccaccttcaaaaagtacatcaatattatatcattaaggaaatagtaaccttctcttctccaatatgcatgacatttttggacaatgcaattgtggcactggcacttatttcagtgaagaaaaactttgtggttctatggcattcatcatttgacaaatgcaagcatcttccttatcaatcagctcctattgaacttactagcactgactgtggaatccttaagggcccattacatttctgaagaagaaagctaagatgaaggacatgccactccgaattcatgtgctacttggcctagctatcactacactagtacaagctgtagataaaaaagtggattgtccacggttatgtacgtgtgaaatcaggccttggtttacacccagatccatttatatggaagcatctacagtggattgtaatgatttaggtcttttaactttcccagccagattgccagctaacacacagattcttctcctacagactaacaatattgcaaaaattgaatactccacagactttccagtaaaccttactggcctggatttatctcaaaacaatttatcttcagtcaccaatattaatgtaaaaaagatgcctcagctcctttctgtgtacctagaggaaaacaaacttactgaactgcctgaaaaatgtctgtccgaactgagcaacttacaagaactctatattaatcacaacttgctttctacaatttcacctggagcctttattggcctacataatcttcttcgacttcatctcaattcaaatagattgcagatgatcaacagtaagtggtttgatgctcttccaaatctagagattctgatgattggggaaaatccaattatcagaatcaaagacatgaactttaagcctcttatcaatcttcgcagcctggttatagctggtataaacctcacagaaataccagataacgccttggttggactggaaaacttagaaagcatctctttttacgataacaggcttattaaagtaccccatgttgctcttcaaaaagttgtaaatctcaaatttttggatctaaataaaaatcctattaatagaatacgaaggggtgattttagcaatatgctacacttaaaagagttggggataaataatatgcctgagctgatttccatcgatagtcttgctgtggataacctgccagatttaagaaaaatagaagctactaacaaccctagattgtcttacattcaccccaatgcatttttcagactccccaagctggaatcactcatgctgaacagcaatgctctcagtgccctgtaccatggtaccattgagtctctgccaaacctcaaggaaatcagcatacacagtaaccccatcaggtgtgactgtgtcatccgttggatgaacatgaacaaaaccaacattcgattcatggagccagattcactgttttgcgtggacccacctgaattccaaggtcagaatgttcggcaagtgcatttcagggacatgatggaaatttgtctccctcttatagctcctgagagctttccttctaatctaaatgtagaagctgggagctatgtttcctttcactgtagagctactgcagaaccacagcctgaaatctactggataacaccttctggtcaaaaactcttgcctaataccctgacagacaagttctatgtccattctgagggaacactagatataaatggcgtaactcccaaagaagggggtttatatacttgtatagcaactaacctagttggcgctgacttgaagtctgttatgatcaaagtggatggatcttttccacaagataacaatggctctttgaatattaaaataagagatattcaggccaattcagttttggtgtcctggaaagcaagttctaaaattctcaaatctagtgttaaatggacagcctttgtcaagactgaaaattctcatgctgcgcaaagtgctcgaataccatctgatgtcaaggtatataatcttactcatctgaatccatcaactgagtataaaatttgtattgatattcccaccatctatcagaaaaacagaaaaaaatgtgtaaatgtcaccaccaaaggtttgcaccctgatcaaaaagagtatgaaaagaataataccacaacacttatggcctgtcttggaggccttctggggattattggtgtgatatgtcttatcagctgcctctctccagaaatgaactgtgatggtggacacagctatgtgaggaattacttacagaaaccaacctttgcattaggtgagctttatcctcctctgataaatctctgggaagcaggaaaagaaaaaagtacatcactgaaagtaaaagcaactgttataggtttaccaacaaatatgtcctaaaaaccaccaaggaaacctactccaaaaatgaacaaaaaaaaaaaaagcgaaagactgcagttgtgctaaaaacaaaacaaaacaaacaaacaaacaaaaaagtaaaaaaagattactttcgagagagaagtttaagcttcaccaatgctgctcctgaccaatggaaatatgtacaacttcagcattttaagtaactggcttcaaggggtactgtggcaaccaaataaaataactccattttctaaaactttcatgtaacttttatgtctggactacagttcaagtggacaaaaacatttctgtattttttttaagtaaataagagtagttgaactgagcaatacctcctcctgtgttgtattacacatattagccacgagtttttgcagtgaccagataaacttgaattgacacgtggtgtaataaaatggacaaattctgtagagtagacacagtgagtatgtggacctcttttataaggaaaaatacattttggattaaaatcaattgcttctgtcttgttttgtttctaaataaagaataatttctgggaaa

SEQ ID NO: 17666 - protein, 708 aa, Homo sapiens; identical to SEQ ID NO: 17662

SEQ ID NO: 17667 - DNA, 3497 bp, Homo sapiens
agtgtgacaactgatcgggtgaacgatgcaccactaaccaccatggaaacaaggaaaaataaagccagctcacaggatctctcttcactggattgagagcctcagcctgccgactgagaaaaagagttccaggaaaaagaaggaatcccggctgcagcctcctgccttcctttatattttaaaatagagagataagattgcgtgcatgtgtgcatatctatagtatatattttgtacactttgttacacagacacacaaatgcacctatttataccgggcaagaacacaaccatgtgattatctcaaccaaggaactgaggaatccagcacgcaaggacatcggaggtgggctagcactgaaactgcttttcaagacgaggaagaggaggagaaagagaaagaagaggaagatgttgggcaacatttatttaacatgctccacagcccggaccctggcatcatgctgctattcctgcaaatactgaagaagcatgggatttaaatattttacttctaaataaatgaattactcaatctcctatgaccatctatacatactccaccttcaaaaagtacatcaatattatatcattaaggaaatagtaaccttctcttctccaatatgcatgacatttttggacaatgcaattgtggcactggcacttatttcagtgaagaaaaactttgtggttctatggcattcatcatttgacaaatgcaagcatcttccttatcaatcagctcctattgaacttactagcactgactgtggaatccttaagggcccattacatttctgaagaagaaagctaagatgaaggacatgccactccgaattcatgtgctacttggcctagctatcactacactagtacaagctgtagataaaaaagtggattgtccacggttatgtacgtgtgaaatcaggccttggtttacacccagatccatttatatggaagcatctacagtggattgtaatgatttaggtcttttaactttcccagccagattgccagctaacacacagattcttctcctacagactaacaatattgcaaaaattgaatactccacagactttccagtaaaccttactggcctggatttatctcaaaacaatttatcttcagtcaccaatattaatgtaaaaaagatgcctcagctcctttctgtgtacctagaggaaaacaaacttactgaactgcctgaaaaatgtctgtccgaactgagcaacttacaagaactctatattaatcacaacttgctttctacaatttcacctggagcctttattggcctacataatcttcttcgacttcatctcaattcaaatagattgcagatgatcaacagtaagtggtttgatgctcttccaaatctagagattctgatgattggggaaaatccaattatcagaatcaaagacatgaactttaagcctcttatcaatcttcgcagcctggttatagctggtataaacctcacagaaataccagataacgccttggttggactggaaaacttagaaagcatctctttttacgataacaggcttattaaagtaccccatgttgctcttcaaaaagttgtaaatctcaaatttttggatctaaataaaaatcctattaatagaatacgaaggggtgattttagcaatatgctacacttaaaagagttggggataaataatatgcctgagctgatttccatcgatagtcttgctgtggataacctgccagatttaagaaaaatagaagctactaacaaccctagattgtcttacattcaccccaatgcatttttcagactccccaagctggaatcactcatgctgaacagcaatgctctcagtgccctgtaccatggtaccattgagtctctgccaaacctcaaggaaatcagcatacacagtaaccccatcaggtgtgactgtgtcatccgttggatgaacatgaacaaaaccaacattcgattcatggagccagattcactgttttgcgtggacccacctgaattccaaggtcagaatgttcggcaagtgcatttcagggacatgatggaaatttgtctccctcttatagctcctgagagctttccttctaatctaaatgtagaagctgggagctatgtttcctttcactgtagagctactgcagaaccacagcctgaaatctactggataacaccttctggtcaaaaactcttgcctaataccctgacagacaagttctatgtccattctgagggaacactagatataaatggcgtaactcccaaagaagggggtttatatacttgtatagcaactaacctagttggcgctgacttgaagtctgttatgatcaaagtggatggatcttttccacaagataacaatggctctttgaatattaaaataagagatattcaggccaattcagttttggtgtcctggaaagcaagttctaaaattctcaaatctagtgttaaatggacagcctttgtcaagactgaaaattctcatgctgcgcaaagtgctcgaataccatctgatgtcaaggtatataatcttactcatctgaatccatcaactgagtataaaatttgtattgatattcccaccatctatcagaaaaacagaaaaaaatgtgtaaatgtcaccaccaaaggtttgcaccctgatcaaaaagagtatgaaaagaataataccacaacacttatggcctgtcttggaggccttctggggattattggtgtgatatgtcttatcagctgcctctctccagaaatgaactgtgatggtggacacagctatgtgaggaattacttacagaaaccaacctttgcattaggtgagctttatcctcctctgataaatctctgggaagcaggaaaagaaaaaagtacatcactgaaagtaaaagcaactgttataggtttaccaacaaatatgtcctaaaaaccaccaaggaaacctactccaaaaatgaacaaaaaaaaaaaaagcgaaagactgcagttgtgctaaaaacaaaacaaaacaaacaaacaaacaaaaaagtaaaaaaagattactttcgagagagaagtttaagcttcaccaatgctgctcctgaccaatggaaatatgtacaacttcagcattttaagtaactggcttcaaggggtactgtggcaaccaaataaaataactccattttctaaaactttcatgtaacttttatgtctggactacagttcaagtggacaaaaacatttctgtattttttttaagtaaataagagtagttgaactgagcaatacctcctcctgtgttgtattacacatattagccacgagtttttgcagtgaccagataaacttgaattgacacgtggtgtaataaaatggacaaattctgtagagtagacacagtgagtatgtggacctcttttataaggaaaaatacattttggattaaaatcaattgcttctgtcttgttttgtttctaaataaagaataatttctgggaaa

SEQ ID NO: 17668 - protein, 708 aa, Homo sapiens; identical to SEQ ID NO: 17662

SEQ ID NO: 17669 - DNA, 593 bp, Homo sapiens
gttttggccaaattgggcgagggcacaaaataaccacttaccccttctcaccgaggaagagcgggagaaagggtatggcacagtcacaagggtgggtgaaaagatacatcaaggccttttgtaaaggcttctttgtggcggtgcctgtggcagtgactttcttggatcgggtcgcctgtgtggcaagagtagaaggagcatcgatgcagccttctttgaatcctggggggagccagtcatctgatgtggtgcttttgaaccactggaaagtgaggaattttgaagtacaccgtggtgacattgtatcattggttttctcctgaactgctcttggtctccatgaaggctactggcaggagcacatgagagagcagcagcacagcaagtggataaaagcacagactctggagccagcctgtctagattcaaattttatttactctatctgtgatcttggcctcattaagttatctctgttttagtttttttcctatggttaatgatagtcccaacctcatagaatagctttgaacattcagtgagttattccacatgaagcacttagaggaactattagtattcaagtgtttcat

SEQ ID NO: 17670 - protein, 82 aa, Homo sapiens
MAQSQGWVKRYIKAFCKGFFVAVPVAVTFLDRVACVARVEGASMQPSLNPGGSQSSDVVLLNHWKVRNFEVHRGDIVSLVFS

SEQ ID NO: 17671 - DNA, 439 bp, Homo sapiens
gggttttggccaaattgggcgagggcacaaaataaccacttaccccttctcaccgaggaagagcgggagaaagggtatggcacagtcacaagggtgggtgaaaagatacatcaaggccttttgtaaaggcttctttgtggcggtgcctgtggcagtgactttcttggatcgggtcgcctgtgtggcaagagtagaaggagcatcgatgcagccttctttgaatcctggggggagccagtcatctgatgtggtgcttttgaaccactggaaagtgaggaattttgaagtacaccgtggtgacattgtatcattggtcagcagcacagcaagtggataaaagcacagactctggagccagcctgtctagattcaaattttatttactctatctgtgatcttggcctcattaagttatctctgttttagtttttttcctatg

SEQ ID NO: 17672 - protein, 86 aa, Homo sapiens
MAQSQGWVKRYIKAFCKGFFVAVPVAVTFLDRVACVARVEGASMQPSLNPGGSQSSDVVLLNHWKVRNFEVHRGDIVSLVSSTASG

SEQ ID NO: 17673 - DNA, 1169 bp, Homo sapiens
gcagctctttcaggaggaagacattaattttcataagaaatatgacatttataagaattgaaaagtttaaaaggaagtgcacagaaattgcttgacagggaacattttaaaacagtgctcttgagaagagactatctcaatgaatatctacttgggacctcctcaaaggaaagtgagatgacaaaattggtgatgtatgtgactccatactctagtgacagagaagataattacggtgaggtatctggaatgatccaaaggcaaattggaattttccaagagagaatgaagatgtatttgtgaagagaaagacagttggaaggaaatgttattttagtatatattctggccatacatgacttaacaagtatgaatttcaagaggacaataaaagagaaattatagtaatcaagataggaaatgattaaagaatgggagaaaattttagctgagagggaatgtgaagattaaatacaaattctaacagcctggttgacaagttgatgagcacatttacagatgagaaatgaagaaggaacaaaagaatgacttcaacagttttgtgtaagagccagcctcaggtttatattagaaagaatgaaagtagaatttgagcaaagaagtttctgaaagaggagaaaattaatgttttgccacagtttccttctaaagcttacccaatgattgacatacttttcttttttaagtgcctatttgtgggtgatctgatactttttgtatctaacctttcttttattattgaaagaaataagacaaaattcaggaaggagagaatgtatatcttttttgaaattagactaaatgggtgccttccatgttttgcctgttatgtgtagtaaatttgatcttgtaatataaaagtagctatattcaaataggctagaatatcttcatgattcttgtttgggaaaaataattgttacttatttgctagctgtattaactgtgcagaagctggaaaaacattggattttgggtcagattcagattcgagtgtaatactgttacttagcaactttttgattctgagtaagacacttcttcaggcagaagggtatgatcataagtatgcatgggaggctcaccaatgaatagaatggctcatgtagatgatctggaaagtacttacagtgcttaggaaagagtac

SEQ ID NO: 17674 - protein, 58 aa, Homo sapiens
MIDILFFFKCLFVGDLILFVSNLSFIIERNKTKFRKERMYIFFEIRLNGCLPCFACYV

SEQ ID NO: 17675 - DNA, 736 bp, Homo sapiens
gggttttggccaaattgggcgagggcacaaaataaccacttaccccttctcaccgaggaagagcgggagaaagggtatggcacagtcacaagggtgggtgaaaagatacatcaaggccttttgtaaaggcttctttgtggcggtgcctgtggcagtgactttcttggatcgggtcgcctgtgtggcaagagtagaaggagcatcgatgcagccttctttgaatcctggggggagccagtcatctgatgtggtgcttttgaaccactggaaagtgaggaattttgaagtacaccgtggtgacattgtatcattggtacggagtttcgctcttgttacccaggctggaatgcaatggcatgatctcagctcaccgcgacctccacttcccaagttcaagcgattctcctgtctcagcctcccgagtagcggggattacaggtgcccaccaccacgctcggctaatttagtatttttagtagagactgggtttctccatgttggtcaggctggccttgaactcctgacctcaggtgatctgcctgcctcagcctcccaaagtgctggtattacaggcgtgagccactgtccaaggccatcaatgtggaattttatacctagtgaaaatatctttcaaaaataaagatgaaataaaaacttgtttagatgaagtaaagatgaaaaaattagtcactggcagacctgtactgaaagatatgctaaaaaaagttcttcagac

SEQ ID NO: 17676 - protein, 187 aa, Homo sapiens
MAQSQGWVKRYIKAFCKGFFVAVPVAVTFLDRVACVARVEGASMQPSLNPGGSQSSDVVLLNHWKVRNFEVHRGDIVSLVRSFALVTQAGMQWHDLSSPRPPLPKFKRFSCLSLPSSGDYRCPPPRSANLVFLVETGFLHVGQAGLELLTSGDLPASASQSAGITGVSHCPRPSMWNFIPSENIFQK

SEQ ID NO: 17677 - DNA, 4819 bp, Homo sapiens
gcggccgctgcagccagccccgcggctccctcagacccgcgggcgcagccgccgggggtgaggcgcttggggaccgcgggccgagcggcggggatccccgagcaccatgctggacccgtcttccagcgaagaggagtcggacgaggggctggaagaggaaagccgcgatgtgctggtggcagccggcagctcgcagcgagctcctccagccccgactcgggaagggcggcgggacgcgccggggcgcgcgggcggcggcggcgcggccagatctgtgagcccgagcccctctgtgctcagcgaggggcgagacgagccccagcggcagctggacgatgagcaggagcggaggatccgcctgcagctctacgtcttcgtcgtgaggtgcatcgcgtaccccttcaacgccaagcagcccaccgacatggcccggaggcagcagaagcttaacaaacaacagttgcagttactgaaagaacggttccaggccttcctcaatggggaaacccaaattgtagctgacgaagcattttgcaacgcagttcggagttattatgaggtttttctaaagagtgaccgagtggccagaatggtacagagtggagggtgttctgctaatgacttcagagaagtatttaagaaaaacatagaaaaacgtgtgcggagtttgccagaaatagatggcttgagcaaagagacagtgttgagctcatggatagccaaatatgatgccatttacagaggtgaagaggacttgtgcaaacagccaaatagaatggccctaagtgcagtgtctgaacttattctgagcaaggaacaactctatgaaatgtttcagcagattctgggtattaaaaaactggaacaccagctcctttataatgcatgtcagctggataacgcagatgaacaagcagcccagatcagaagggaacttgatggccggctgcaattggcagataaaatggcaaaggaaagaaaattccccaaatttatagcaaaagatatggagaatatgtatatagaagagttgcggtcttcagtgaatttgctaatggccaatttggaaagtcttccagtttcgaaaggtggtccggaatttaaattacaaaaattaaaacgttcacagaactctgcatttttggacataggagatgagaatgagattcagctgtcaaagtccgacgtggtactgtcattcaccttagagattgtcataatggaagtgcaaggcctgaagtcagttgctcccaatcgaattgtttactgtacaatggaagtggaaggagaaaaacttcagacagaccaggccgaagcctcaaggccacaatgggggactcaaggagatttcaccaccacccatcctcggcctgtggtcaaagtgaaactcttcacagaaagcactggagttctggccctggaagataaagaactgggaagggtgatattatacccaacttctaatagctccaaatcagctgaattacaccgaatggtagttccaaaaaatagccaggattctgacttaaaaatcaaactggcagtgcgaatggataaaccagcacatatgaagcatagtggatatctgtatgcccttggacagaaggtttggaaaagatggaaaaaacgttactttgttctagttcaggttagccaatatacctttgctatgtgcagttatagagaaaagaagtctgaaccacaagaattaatgcagcttgaaggctatactgtggattataccgatccccacccaggccttcagggtggttgtatgttctttaatgctgttaaagaaggagatactgtaatctttgccagtgatgatgaacaggacagaatattatgggttcaagccatgtatagggccacaggtcaatcatataaaccagttcctgcaattcaaacccagaaactgaatcctaaaggaggaactctccatgcagatgctcagctttatgcagatcgttttcagaaacatggtatggatgagtttatttctgcaaacccctgcaagcttgatcatgccttcctttttagaatactccagaggcagactttggatcacagactgaatgattcctattcttgcttgggatggtttagccctggccaagtctttgtgttagatgagtactgtgcccgttatggtgtgagaggctgtcacagacatctctgctaccttgcagaactgatggaacattcagaaaatggtgctgtcattgaccctaccctgctccattacagctttgcattctgtgcctctcatgtgcacggcaacaggcctgatggaattgggactgtttcagtggaagaaaaagaaagatttgaggagataaaagagagactctcttcccttttagaaaatcagataagccatttcagatactgttttccctttggacgacctgaaggtgctctaaaagctacactttcattacttgaaagggttttaatgaaagatattgccactcccataccagcagaagaggtgaagaaagtggtcagaaaatgtctcgagaaagctgccttgatcaattacactagactcacagaatatgccaaaatagaagagaccatgaaccaggcatctcctgctagaaagctggaagagattcttcatctggcagagctctgcatagaagtcttacagcagaatgaagagcatcatgcagaggcatttgcctggtggcctgatttattggctgaacatgcagagaaattttgggctttatttacagtggatatggacactgcactagaggctcaaccgcaagactcctgggatagttttcctcttttccaactgcttaataatttcctccgaaatgacacacttttgtgtaatggaaaatttcacaaacacttgcaagaaatctttgtacccttggttgtccgctatgtggatctcatggagtcttccatcgcccagtcaattcacagaggttttgagcaggagacatggcagcctgtcaagaatatcgccaacagtcttcccaatgtagctcttccaaaagttccaagtctgcctcttaatcttccacagattcctaacatttctactgcttcgtggatgccttctttatatgagtccaccaatggctcagcaacatcagaagaccttttttggaagcttgatgcactgcaaatgtttgtctttgatctgcactggccagaacaggaatttgcccaccacttagagcaaagacttaaactaatggccagtgatatgctagaggcctgtgtcaaaagaacaagaactgcatttgaactcaagctacaaaaggcaagcaaaacaactgacttgcgcattccagcttccgtttgcactatgtttaatgtattagtcgatgccaaaaagcaaagcaccaaactctgtgccctggatggaggacaagagcaacagtaccattcaaaaatagatgatctgatcgacaacagtgtaaaagaaatcatttcactgttagtttcaaagtttgtttcagtgttggaaggcgtgttgtctaagctgtcaaggtatgatgaaggcactttcttttcatccattctgtcattcactgtgaaagcagctgcaaaatatgttgatgttccaaaaccaggaatggatctggcagacacctatattatgtttgttcggcaaaaccaagatattcttcgagaaaaggtcaatgaggaaatgtatatagaaaagttatttgatcaatggtacagcagttccatgaaagtcatttgcgtgtggttgactgatagattagacctccaactccatatttaccagctgaagacgctcatcaagattgtgaagaaaacctacagggactttcgattgcagggtgtgttggaaggaacactgaacagtaagacttatgatactgtgcacagacgtttaacagtagaggaggccacagcctctgtttcagaaggaggaggacttcagggcattactatgaaagacagtgacgaagaagaagaaggctgatatcacacagctttgcagaaggaaggaagaccttgatcgacattgttttttatttttttaaccttgtccttgtaattacattcattgtttgttttggccaaataaaaatgcttgtatttctttaaaaagtaagcctgaatgtagagtaaaaggggaaatgccaagattttggggtttttttgtttcctttttttgtttgtttgtttgtttgtttttttggagaagagcatcctcttttgtgtagtttgacctaaaaatgaaccttggctctgcttgtgatcagaacatgaacttttttttttaaagaagatttgagcatttttctgtaatcacatcaaaatgatgttttctgtgtaaagcgagatacatatttctcataatgcagcattgtgagaagtcagttcggaccactgcaccaacactgtcgtatccttgttaaaatggtgtgtaccttacaaattataatttatgtgccaggttcgttttgtacttaatttgctattattgtgatgtgtataaaatctttaatcttggttcttagtactttgaattggtctacaggtatattcctgggatgaaaggattgccaaacccaaatatagactagattatccaatgggtttgtgtctttgttccattctcaacatttcttctttcaactataagtaatccccaggtgtggggtagcaagtgtgcttccgtcaagataccatattctcctgctccagtataacagcttgcaggcaataaaaatctatttgctcataactacttctgtatttattagacttatatagagcaaatgcagtaaaagaggtttgcagtgtttcaaacatccca

SEQ ID NO: 17678 - protein, 1290 aa, Homo sapiens
MLDPSSSEEESDEGLEEESRDVLVAAGSSQRAPPAPTREGRRDAPGRAGGGGAARSVSPSPSVLSEGRDEPQRQLDDEQERRIRLQLYVFVVRCIAYPFNAKQPTDMARRQQKLNKQQLQLLKERFQAFLNGETQIVADEAFCNAVRSYYEVFLKSDRVARMVQSGGCSANDFREVFKKNIEKRVRSLPEIDGLSKETVLSSWIAKYDAIYRGEEDLCKQPNRMALSAVSELILSKEQLYEMFQQILGIKKLEHQLLYNACQLDNADEQAAQIRRELDGRLQLADKMAKERKFPKFIAKDMENMYIEELRSSVNLLMANLESLPVSKGGPEFKLQKLKRSQNSAFLDIGDENEIQLSKSDVVLSFTLEIVIMEVQGLKSVAPNRIVYCTMEVEGEKLQTDQAEASRPQWGTQGDFTTTHPRPVVKVKLFTESTGVLALEDKELGRVILYPTSNSSKSAELHRMVVPKNSQDSDLKIKLAVRMDKPAHMKHSGYLYALGQKVWKRWKKRYFVLVQVSQYTFAMCSYREKKSEPQELMQLEGYTVDYTDPHPGLQGGCMFFNAVKEGDTVIFASDDEQDRILWVQAMYRATGQSYKPVPAIQTQKLNPKGGTLHADAQLYADRFQKHGMDEFISANPCKLDHAFLFRILQRQTLDHRLNDSYSCLGWFSPGQVFVLDEYCARYGVRGCHRHLCYLAELMEHSENGAVIDPTLLHYSFAFCASHVHGNRPDGIGTVSVEEKERFEEIKERLSSLLENQISHFRYCFPFGRPEGALKATLSLLERVLMKDIATPIPAEEVKKVVRKCLEKAALINYTRLTEYAKIEETMNQASPARKLEEILHLAELCIEVLQQNEEHHAEAFAWWPDLLAEHAEKFWALFTVDMDTALEAQPQDSWDSFPLFQLLNNFLRNDTLLCNGKFHKHLQEIFVPLVVRYVDLMESSIAQSIHRGFEQETWQPVKNIANSLPNVALPKVPSLPLNLPQIPNISTASWMPSLYESTNGSATSEDLFWKLDALQMFVFDLHWPEQEFAHHLEQRLKLMASDMLEACVKRTRTAFELKLQKASKTTDLRIPASVCTMFNVLVDAKKQSTKLCALDGGQEQQYHSKIDDLIDNSVKEIISLLVSKFVSVLEGVLSKLSRYDEGTFFSSILSFTVKAAAKYVDVPKPGMDLADTYIMFVRQNQDILREKVNEEMYIEKLFDQWYSSSMKVICVWLTDRLDLQLHIYQLKTLIKIVKKTYRDFRLQGVLEGTLNSKTYDTVHRRLTVEEATASVSEGGGLQGITMKDSDEEEEG

SEQ ID NO: 17679 - DNA, 4616 bp, Homo sapiens
agttttcctttcgttctgcggccgctgcagccagccccgcggctccctcagacccgcgggcgcagccgccgggggtgaggcgcttggggaccgcgggccgagcggcggggatccccgagcaccatgctggacccgtcttccagcgaagaggagtcggacgaggggctggaagaggaaagccgcgatgtgctggtggcagccggcagctcgcagcgagctcctccagccccgactcgggaagggcgctggacgatgagcaggagcggaggatccgcctgcagctctacgtcttcgtcgtgaggtgcatcgcgtaccccttcaacgccaagcagcccaccgacatggcccggaggcagcagaagcttaacaaacaacagttgcagttactgaaagaacggttccaggccttcctcaatggggaaacccaaattgtagctgacgaagcattttgcaacgcagttcggagttattatgaggtttttctaaagagtgaccgagtggccagaatggtacagagtggagggtgttctgctaatgacttcagagaagtatttaagaaaaacatagaaaaacgtgtgcggagtttgccagaaatagatggcttgagcaaagagacagtgttgagctcatggatagccaaatatgatgccatttacagaggtgaagaggacttgtgcaaacagccaaatagaatggccctaagtgcagtgtctgaacttattctgagcaaggaacaactctatgaaatgtttcagcagattctgggtattaaaaaactggaacaccagctcctttataatgcatgtcagctggataacgcagatgaacaagcagcccagatcagaagggaacttgatggccggctgcaattggcagataaaatggcaaaggaaagaaaattccccaaatttatagcaaaagatatggagaatatgtatatagaagagttgcggtcttcagtgaatttgctaatggccaatttggaaagtcttccagtttcgaaaggtggtccggaatttaaattacaaaaattaaaacgttcacagaactctgcatttttggacataggagatgagaatgagattcagctgtcaaagtccgacgtggtactgtcattcaccttagagattgtcataatggaagtgcaaggcctgaagtcagttgctcccaatcgaattgtttactgtacaatggaagtggaaggagaaaaacttcagacagaccaggccgaagcctcaaggccacaatgggggactcaaggagatttcaccaccacccatcctcggcctgtggtcaaagtgaaactcttcacagaaagcactggagttctggccctggaagataaagaactgggaagggtgatattatacccaacttctaatagctccaaatcagctgaattacaccgaatggtagttccaaaaaatagccaggattctgacttaaaaatcaaactggcagtgcgaatggataaaccagcacatatgaagcatagtggatatctgtatgcccttggacagaaggtttggaaaagatggaaaaaacgttactttgttctagttcaggttagccaatatacctttgctatgtgcagttatagagaaaagaagtctgaaccacaagaattaatgcagcttgaaggctatactgtggattataccgatccccacccaggccttcagggtggttgtatgttctttaatgctgttaaagaaggagatactgtaatctttgccagtgatgatgaacaggacagaatattatgggttcaagccatgtatagggccacaggtcaatcatataaaccagttcctgcaattcaaacccagaaactgaatcctaaaggaggaactctccatgcagatgctcagctttatgcagatcgttttcagaaacatggtatggatgagtttatttctgcaaacccctgcaagcttgatcatgccttcctttttagaatactccagaggcagactttggatcacagactgaatgattcctattcttgcttgggatggtttagccctggccaagtctttgtgttagatgagtactgtgcccgttatggtgtgagaggctgtcacagacatctctgctaccttgcagaactgatggaacattcagaaaatggtgctgtcattgaccctaccctgctccattacagctttgcattctgtgcctctcatgtgcacggcaacaggcctgatggaattgggactgtttcagtggaagaaaaagaaagatttgaggagataaaagagagactctcttcccttttagaaaatcagataagccatttcagatactgttttccctttggacgacctgaaggtgctctaaaagctacactttcattacttgaaagggttttaatgaaagatattgccactcccataccagcagaagaggtgaagaaagtggtcagaaaatgtctcgagaaagctgccttgatcaattacactagactcacagaatatgccaaaatagaagagaccatgaaccaggcatctcctgctagaaagctggaagagattcttcatctggcagagctctgcatagaagtcttacagcagaatgaagagcatcatgcagaggcatttgcctggtggcctgatttattggctgaacatgcagagaaattttgggctttatttacagtggatatggacactgcactagaggctcaaccgcaagactcctgggatagttttcctcttttccaactgcttaataatttcctccgaaatgacacacttttgtgtaatggaaaatttcacaaacacttgcaagaaatctttgtacccttggttgtccgctatgtggatctcatggagtcttccatcgcccagtcaattcacagaggttttgagcaggagacatggcagcctgtcaacaatggctcagcaacatcagaagaccttttttggaagcttgatgcactgcaaatgtttgtctttgatctgcactggccagaacaggaatttgcccaccacttagagcaaagacttaaactaatggccagtgatatgctagaggcctgtgtcaaaagaacaagaactgcatttgaactcaagctacaaaaggcaagcaaaacaactgacttgcgcattccagcttccgtttgcactatgtttaatgtattagtcgatgccaaaaagcaaagcaccaaactctgtgccctggatggaggacaagagcaacagtaccattcaaaaatagatgatctgatcgacaacagtgtaaaagaaatcatttcactgttagtttcaaagtttgtttcagtgttggaaggcgtgttgtctaagctgtcaaggtatgatgaaggcactttcttttcatccattctgtcattcactgtgaaagcagctgcaaaatatgttgatgttccaaaaccaggaatggatctggcagacacctatattatgtttgttcggcaaaaccaagatattcttcgagaaaaggtcaatgaggaaatgtatatagaaaagttatttgatcaatggtacagcagttccatgaaagtcatttgcgtgtggttgactgatagattagacctccaactccatatttaccagctgaagacgctcatcaagattgtgaagaaaacctacagggactttcgattgcagggtgtgttggaaggaacactgaacagtaagacttatgatactgtgcacagacgtttaacagtagaggaggccacagcctctgtttcagaaggaggaggacttcagggcattactatgaaagacagtgacgaagaagaagaaggctgatatcacacagctttgcagaaggaaggaagaccttgatcgacattgttttttatttttttaaccttgtccttgtaattacattcattgtttgttttggccaaataaaaatgcttgtatttctttaaaaagtaagcctgaatgtagagtaaaaggggaaatgccaagattttggggtttttttgtttcctttttttgtttgtttgtttgtttgtttttttggagaagagcatcctcttttgtgtagtttgacctaaaaatgaaccttggctctgcttgtgatcagaacatgaacttttttttttaaagaagatttgagcatttttctgtaatcacatcaaaatgatgttttctgtgtaaagcgagatacatatttctcataatgcagcattgtgagaagtcagttcggaccactgcaccaacactgtcgtatccttgttaaaatggtgtgtaccttacaaattataatttatgtgccaggttcgttttgtacttaatttgctattattgtgatgtgtataaaatctttaatcttggttcttagtactttgaattggtctacaggtatattcctgggatgaaaggattgccaaacccaaatatagactagattatccaatgggtttgtgtctttgttccattctcaacatttcttctttcaactataagtaatccccaggtgtggggtagcaagtgtgcttccgtcaagataccatattctcctgctccagtataacagcttgcaggcaataaaaatctatttgctcataactacttctgtatttattagacttatatagagcaaatgcagtaaaagaggtttgcagtgtttcaaacatccca

SEQ ID NO: 17680 - protein, 1144 aa, Homo sapiens
MARRQQKLNKQQLQLLKERFQAFLNGETQIVADEAFCNAVRSYYEVFLKSDRVARMVQSGGCSANDFREVFKKNIEKRVRSLPEIDGLSKETVLSSWIAKYDAIYRGEEDLCKQPNRMALSAVSELILSKEQLYEMFQQILGIKKLEHQLLYNACQLDNADEQAAQIRRELDGRLQLADKMAKERKFPKFIAKDMENMYIEELRSSVNLLMANLESLPVSKGGPEFKLQKLKRSQNSAFLDIGDENEIQLSKSDVVLSFTLEIVIMEVQGLKSVAPNRIVYCTMEVEGEKLQTDQAEASRPQWGTQGDFTTTHPRPVVKVKLFTESTGVLALEDKELGRVILYPTSNSSKSAELHRMVVPKNSQDSDLKIKLAVRMDKPAHMKHSGYLYALGQKVWKRWKKRYFVLVQVSQYTFAMCSYREKKSEPQELMQLEGYTVDYTDPHPGLQGGCMFFNAVKEGDTVIFASDDEQDRILWVQAMYRATGQSYKPVPAIQTQKLNPKGGTLHADAQLYADRFQKHGMDEFISANPCKLDHAFLFRILQRQTLDHRLNDSYSCLGWFSPGQVFVLDEYCARYGVRGCHRHLCYLAELMEHSENGAVIDPTLLHYSFAFCASHVHGNRPDGIGTVSVEEKERFEEIKERLSSLLENQISHFRYCFPFGRPEGALKATLSLLERVLMKDIATPIPAEEVKKVVRKCLEKAALINYTRLTEYAKIEETMNQASPARKLEEILHLAELCIEVLQQNEEHHAEAFAWWPDLLAEHAEKFWALFTVDMDTALEAQPQDSWDSFPLFQLLNNFLRNDTLLCNGKFHKHLQEIFVPLVVRYVDLMESSIAQSIHRGFEQETWQPVNNGSATSEDLFWKLDALQMFVFDLHWPEQEFAHHLEQRLKLMASDMLEACVKRTRTAFELKLQKASKTTDLRIPASVCTMFNVLVDAKKQSTKLCALDGGQEQQYHSKIDDLIDNSVKEIISLLVSKFVSVLEGVLSKLSRYDEGTFFSSILSFTVKAAAKYVDVPKPGMDLADTYIMFVRQNQDILREKVNEEMYIEKLFDQWYSSSMKVICVWLTDRLDLQLHIYQLKTLIKIVKKTYRDFRLQGVLEGTLNSKTYDTVHRRLTVEEATASVSEGGGLQGITMKDSDEEEEG

SEQ ID NO: 17681 - DNA, 4745 bp, Homo sapiens
gcggccgctgcagccagccccgcggctccctcagacccgcgggcgcagccgccgggggtgaggcgcttggggaccgcgggccgagcggcggggatccccgagcaccatgctggacccgtcttccagcgaagaggagtcggacgaggggctggaagaggaaagccgcgatgtgctggtggcagccggcagctcgcagcgagctcctccagccccgactcgggaagggcggcgggacgcgccggggcgcgcgggcggcggcggcgcggccagatctgtgagcccgagcccctctgtgctcagcgaggggcgagacgagccccagcggcagctggacgatgagcaggagcggaggatccgcctgcagctctacgtcttcgtcgtgaggtgcatcgcgtaccccttcaacgccaagcagcccaccgacatggcccggaggcagcagaagcttaacaaacaacagttgcagttactgaaagaacggttccaggccttcctcaatggggaaacccaaattgtagctgacgaagcattttgcaacgcagttcggagttattatgaggtttttctaaagagtgaccgagtggccagaatggtacagagtggagggtgttctgctaatgacttcagagaagtatttaagaaaaacatagaaaaacgtgtgcggagtttgccagaaatagatggcttgagcaaagagacagtgttgagctcatggatagccaaatatgatgccatttacagaggtgaagaggacttgtgcaaacagccaaatagaatggccctaagtgcagtgtctgaacttattctgagcaaggaacaactctatgaaatgtttcagcagattctgggtattaaaaaactggaacaccagctcctttataatgcatgtcagctggataacgcagatgaacaagcagcccagatcagaagggaacttgatggccggctgcaattggcagataaaatggcaaaggaaagaaaattccccaaatttatagcaaaagatatggagaatatgtatatagaagagttgcggtcttcagtgaatttgctaatggccaatttggaaagtcttccagtttcgaaaggtggtccggaatttaaattacaaaaattaaaacgttcacagaactctgcatttttggacataggagatgagaatgagattcagctgtcaaagtccgacgtggtactgtcattcaccttagagattgtcataatggaagtgcaaggcctgaagtcagttgctcccaatcgaattgtttactgtacaatggaagtggaaggagaaaaacttcagacagaccaggccgaagcctcaaggccacaatgggggactcaaggagatttcaccaccacccatcctcggcctgtggtcaaagtgaaactcttcacagaaagcactggagttctggccctggaagataaagaactgggaagggtgatattatacccaacttctaatagctccaaatcagctgaattacaccgaatggtagttccaaaaaatagccaggattctgacttaaaaatcaaactggcagtgcgaatggataaaccagcacatatgaagcatagtggatatctgtatgcccttggacagaaggtttggaaaagatggaaaaaacgttactttgttctagttcaggttagccaatatacctttgctatgtgcagttatagagaaaagaagtctgaaccacaagaattaatgcagcttgaaggctatactgtggattataccgatccccacccaggccttcagggtggttgtatgttctttaatgctgttaaagaaggagatactgtaatctttgccagtgatgatgaacaggacagaatattatgggttcaagccatgtatagggccacaggtcaatcatataaaccagttcctgcaattcaaacccagaaactgaatcctaaaggaggaactctccatgcagatgctcagctttatgcagatcgttttcagaaacatggtatggatgagtttatttctgcaaacccctgcaagcttgatcatgccttcctttttagaatactccagaggcagactttggatcacagactgaatgattcctattcttgcttgggatggtttagccctggccaagtctttgtgttagatgagtactgtgcccgttatggtgtgagaggctgtcacagacatctctgctaccttgcagaactgatggaacattcagaaaatggtgctgtcattgaccctaccctgctccattacagctttgcattctgtgcctctcatgtgcacggcaacaggcctgatggaattgggactgtttcagtggaagaaaaagaaagatttgaggagataaaagagagactctcttcccttttagaaaatcagataagccatttcagatactgttttccctttggacgacctgaaggtgctctaaaagctacactttcattacttgaaagggttttaatgaaagatattgccactcccataccagcagaagaggtgaagaaagtggtcagaaaatgtctcgagaaagctgccttgatcaattacactagactcacagaatatgccaaaatagaagagaccatgaaccaggcatctcctgctagaaagctggaagagattcttcatctggcagagctctgcatagaagtcttacagcagaatgaagagcatcatgcagaggcatttgcctggtggcctgatttattggctgaacatgcagagaaattttgggctttatttacagtggatatggacactgcactagaggctcaaccgcaagactcctgggatagttttcctcttttccaactgcttaataatttcctccgaaatgacacacttttgtgtaatggaaaatttcacaaacacttgcaagaaatctttgtacccttggttgtccgctatgtggatctcatggagtcttccatcgcccagtcaattcacagaggttttgagcaggagacatggcagcctgtcaagaatatcgccaacagtcttcccaatgtagctcttccaaaagttccaagtctgcctcttaatcttccacagattcctaacatttctactgcttcgtggatgccttctttatatgagtccaccaatggctcagcaacatcagaagaccttttttggaagcttgatgcactgcaaatgtttgtctttgatctgcactggccagaacaggaatttgcccaccacttagagcaaagacttaaactaatggccagtgatatgctagaggcctgtgtcaaaagaacaagaactgcatttgaactcaagctacaaaaggcaagcaaaacaactgacttgcgcattccagcttccgtttgcactatgtttaatgtattagtcgatgccaaaaagcaaagcaccaaactctgtgccctggatggaggacaagagcaacagtaccattcaaaaatagatgatctgatcgacaacagtgtaaaagaaatcatttcactgttagtttcaaagtttgtttcagtgttggaaggcgtgttgtctaagctgtcaaggtatgatgaaggcactttcttttcatccattctgtcattcactgtgaaagcagctgcaaaatatgttgatgttccaaaaccaggaatggatctggcagacacctatattatgtttgttcggcaaaaccaagatattcttcgagaaaaggtcaatgaggaaatgtatatagaaaagttatttgatcaatggtacagcagttccatgaaagtcatttgcgtgtggttgactgatagattagacctccaactccatatttaccagctgaagacgctcatcaagattgtgaagaaaacctacagggactttcgattgcagggtgtgttggaaggaacactgaacagtaagacttatgatactgtgcacagacgtttaacagtagaggaggccacagcctctgtttcagaaggaggaggacttcagggcattactatgaaagacagtgacgaagaagaagaaggctgatatcacacagctttgcagaaggaaggaagaccttgatcgacattgttttttatttttttaaccttgtccttgtaattacattcattgtttgttttggccaaataaaaatgcttgtatttctttaaaaagtaagcctgaatgtagagtaaaaggggaaatgccaagattttggggtttttttgtttcctttttttgtttgtttgtttgtttgtttttttggagaagagcatcctcttttgtgtagtttgacctaaaaatgaaccttggctctgcttgtgatcagaacatgaacttttttttttaaagaagatttgagcatttttctgtaatcacatcaaaatgatgttttctgtgtaaagcgagatacatatttctcataatgcagcattgtgagaagtcagttcggaccactgcaccaacactgtcgtatccttgttaaaatggtgtgtaccttacaaattataatttatgtgccaggttcgttttgtacttaatttgctattattgtgatgtgtataaaatctttaatcttggttcttagtactttgaattggtctacaggtatattcctgggatgaaaggattgccaaacccaaatatagactagattatccaatgggtttgtgtctttgttccattctcaacatttcttctttcaactataagtaatccccaggtgtggggtagcaagtgtgcttccgtcaagataccatattctcctgctccagtataacagcttgcaggcaataaaaatctatttgctcat

SEQ ID NO: 17682 - protein, 1290 aa, Homo sapiens; identical to SEQ ID NO: 17678

SEQ ID NO: 17683 - DNA, 4640 bp, Homo sapiens
gcggccgctgcagccagccccgcggctccctcagacccgcgggcgcagccgccgggggtgaggcgcttggggaccgcgggccgagcggcggggatccccgagcaccatgctggacccgtcttccagcgaagaggagtcggacgaggggctggaagaggaaagccgcgatgtgctggtggcagccggcagctcgcagcgagctcctccagccccgactcgggaagggcggcgggacgcgccggggcgcgcgggcggcggcggcgcggccagatctgtgagcccgagcccctctgtgctcagcgaggggcgagacgagccccagcggcagctggacgatgagcaggagcggaggatccgcctgcagctctacgtcttcgtcgtgaggtgcatcgcgtaccccttcaacgccaagcagcccaccgacatggcccggaggcagcagaagcttaacaaacaacagttgcagttactgaaagaacggttccaggccttcctcaatggggaaacccaaattgtagctgacgaagcattttgcaacgcagttcggagttattatgaggtttttctaaagagtgaccgagtggccagaatggtacagagtggagggtgttctgctaatgacttcagagaagtatttaagaaaaacatagaaaaacgtgtgcggagtttgccagaaatagatggcttgagcaaagagacagtgttgagctcatggatagccaaatatgatgccatttacagaggtgaagaggacttgtgcaaacagccaaatagaatggccctaagtgcagtgtctgaacttattctgagcaaggaacaactctatgaaatgtttcagcagattctgggtattaaaaaactggaacaccagctcctttataatgcatgtcagctggataacgcagatgaacaagcagcccagatcagaagggaacttgatggccggctgcaattggcagataaaatggcaaaggaaagaaaattccccaaatttatagcaaaagatatggagaatatgtatatagaagagttgcggtcttcagtgaatttgctaatggccaatttggaaagtcttccagtttcgaaaggtggtccggaatttaaattacaaaaattaaaacgttcacagaactctgcatttttggacataggagatgagaatgagattcagctgtcaaagtccgacgtggtactgtcattcaccttagagattgtcataatggaagtgcaaggcctgaagtcagttgctcccaatcgaattgtttactgtacaatggaagtggaaggagaaaaacttcagacagaccaggccgaagcctcaaggccacaatgggggactcaaggagatttcaccaccacccatcctcggcctgtggtcaaagtgaaactcttcacagaaagcactggagttctggccctggaagataaagaactgggaagggtgatattatacccaacttctaatagctccaaatcagctgaattacaccgaatggtagttccaaaaaatagccaggattctgacttaaaaatcaaactggcagtgcgaatggataaaccagcacatatgaagcatagtggatatctgtatgcccttggacagaaggtttggaaaagatggaaaaaacgttactttgttctagttcaggttagccaatatacctttgctatgtgcagttatagagaaaagaagtctgaaccacaagaattaatgcagcttgaaggctatactgtggattataccgatccccacccaggccttcagggtggttgtatgttctttaatgctgttaaagaaggagatactgtaatctttgccagtgatgatgaacaggacagaatattatgggttcaagccatgtatagggccacaggtcaatcatataaaccagttcctgcaattcaaacccagaaactgaatcctaaaggaggaactctccatgcagatgctcagctttatgcagatcgttttcagaaacatggtatggatgagtttatttctgcaaacccctgcaagcttgatcatgccttcctttttagaatactccagaggcagactttggatcacagactgaatgattcctattcttgcttgggatggtttagccctggccaagtctttgtgttagatgagtactgtgcccgttatggtgtgagaggctgtcacagacatctctgctaccttgcagaactgatggaacattcagaaaatggtgctgtcattgaccctaccctgctccattacagctttgcattctgtgcctctcatgtgcacggcaacaggcctgatggaattgggactgtttcagtggaagaaaaagaaagatttgaggagataaaagagagactctcttcccttttagaaaatcagataagccatttcagatactgttttccctttggacgacctgaaggtgctctaaaagctacactttcattacttgaaagggttttaatgaaagatattgccactcccataccagcagaagaggtgaagaaagtggtcagaaaatgtctcgagaaagctgccttgatcaattacactagactcacagaatatgccaaaatagaagagaccatgaaccaggcatctcctgctagaaagctggaagagattcttcatctggcagagctctgcatagaagtcttacagcagaatgaagagcatcatgcagaggcatttgcctggtggcctgatttattggctgaacatgcagagaaattttgggctttatttacagtggatatggacactgcactagaggctcaaccgcaagactcctgggatagttttcctcttttccaactgcttaataatttcctccgaaatgacacacttttgtgtaatggaaaatttcacaaacacttgcaagaaatctttgtacccttggttgtccgctatgtggatctcatggagtcttccatcgcccagtcaattcacagaggttttgagcaggagacatggcagcctgtcaacaatggctcagcaacatcagaagaccttttttggaagcttgatgcactgcaaatgtttgtctttgatctgcactggccagaacaggaatttgcccaccacttagagcaaagacttaaactaatggccagtgatatgctagaggcctgtgtcaaaagaacaagaactgcatttgaactcaagctacaaaaggcaagcaaaacaactgacttgcgcattccagcttccgtttgcactatgtttaatgtattagtcgatgccaaaaagcaaagcaccaaactctgtgccctggatggaggacaagagtttggtagtcaatggcaacagtaccattcaaaaatagatgatctgatcgacaacagtgtaaaagaaatcatttcactgttagtttcaaagtttgtttcagtgttggaaggcgtgttgtctaagctgtcaaggtatgatgaaggcactttcttttcatccattctgtcattcactgtgaaagcagctgcaaaatatgttgatgttccaaaaccaggaatggatctggcagacacctatattatgtttgttcggcaaaaccaagatattcttcgagaaaaggtcaatgaggaaatgtatatagaaaagttatttgatcaatggtacagcagttccatgaaagtcatttgcgtgtggttgactgatagattagacctccaactccatatttaccagctgaagacgctcatcaagattgtgaagaaaacctacagggactttcgattgcagggtgtgttggaaggaacactgaacagtaagacttatgatactgtgcacagacgtttaacagtagaggaggccacagcctctgtttcagaaggaggaggacttcagggcattactatgaaagacagtgacgaagaagaagaaggctgatatcacacagctttgcagaaggaaggaagaccttgatcgacattgttttttatttttttaaccttgtccttgtaattacattcattgtttgttttggccaaataaaaatgcttgtatttctttaaaaagtaagcctgaatgtagagtaaaaggggaaatgccaagattttggggtttttttgtttcctttttttgtttgtttgtttgtttgtttttttggagaagagcatcctcttttgtgtagtttgacctaaaaatgaaccttggctctgcttgtgatcagaacatgaacttttttttttaaagaagatttgagcatttttctgtaatcacatcaaaatgatgttttctgtgtaaagcgagatacatatttctcataatgcagcattgtgagaagtcagttcggaccactgcaccaacactgtcgtatccttgttaaaatggtgtgtaccttacaaattataatttatgtgccaggttcgttttgtacttaatttgctattattgtgatgtgtataaaatctttaatcttggttcttagtactttgaattggtctacaggtatattcctgggatgaaaggattgccaaacccaaatatagactagattatccaatgggtttgtgtctttgttccattctcaacatttcttctttcaactataagtaatccccaggtgtggggtagcaagtgtgcttccgtcaagataccatattctcctgctccagtataacagcttgcaggcaataaaaatctatttgctcat

SEQ ID NO: 17684 - protein, 1255 aa, Homo sapiens
MLDPSSSEEESDEGLEEESRDVLVAAGSSQRAPPAPTREGRRDAPGRAGGGGAARSVSPSPSVLSEGRDEPQRQLDDEQERRIRLQLYVFVVRCIAYPFNAKQPTDMARRQQKLNKQQLQLLKERFQAFLNGETQIVADEAFCNAVRSYYEVFLKSDRVARMVQSGGCSANDFREVFKKNIEKRVRSLPEIDGLSKETVLSSWIAKYDAIYRGEEDLCKQPNRMALSAVSELILSKEQLYEMFQQILGIKKLEHQLLYNACQLDNADEQAAQIRRELDGRLQLADKMAKERKFPKFIAKDMENMYIEELRSSVNLLMANLESLPVSKGGPEFKLQKLKRSQNSAFLDIGDENEIQLSKSDVVLSFTLEIVIMEVQGLKSVAPNRIVYCTMEVEGEKLQTDQAEASRPQWGTQGDFTTTHPRPVVKVKLFTESTGVLALEDKELGRVILYPTSNSSKSAELHRMVVPKNSQDSDLKIKLAVRMDKPAHMKHSGYLYALGQKVWKRWKKRYFVLVQVSQYTFAMCSYREKKSEPQELMQLEGYTVDYTDPHPGLQGGCMFFNAVKEGDTVIFASDDEQDRILWVQAMYRATGQSYKPVPAIQTQKLNPKGGTLHADAQLYADRFQKHGMDEFISANPCKLDHAFLFRILQRQTLDHRLNDSYSCLGWFSPGQVFVLDEYCARYGVRGCHRHLCYLAELMEHSENGAVIDPTLLHYSFAFCASHVHGNRPDGIGTVSVEEKERFEEIKERLSSLLENQISHFRYCFPFGRPEGALKATLSLLERVLMKDIATPIPAEEVKKVVRKCLEKAALINYTRLTEYAKIEETMNQASPARKLEEILHLAELCIEVLQQNEEHHAEAFAWWPDLLAEHAEKFWALFTVDMDTALEAQPQDSWDSFPLFQLLNNFLRNDTLLCNGKFHKHLQEIFVPLVVRYVDLMESSIAQSIHRGFEQETWQPVNNGSATSEDLFWKLDALQMFVFDLHWPEQEFAHHLEQRLKLMASDMLEACVKRTRTAFELKLQKASKTTDLRIPASVCTMFNVLVDAKKQSTKLCALDGGQEFGSQWQQYHSKIDDLIDNSVKEIISLLVSKFVSVLEGVLSKLSRYDEGTFFSSILSFTVKAAAKYVDVPKPGMDLADTYIMFVRQNQDILREKVNEEMYIEKLFDQWYSSSMKVICVWLTDRLDLQLHIYQLKTLIKIVKKTYRDFRLQGVLEGTLNSKTYDTVHRRLTVEEATASVSEGGGLQGITMKDSDEEEEG

SEQ ID NO: 17685 - DNA, 1448 bp, Homo sapiens
aagcagtatctagagttaacagtaggggatttatttttcaatctaaagtttttcacctctctctagtaagacatctgaaactcataagccatctttaagaatttcttacaaaaacatgctggaagacagtggatcttgtttgtatcctgaagatttttttctcttcgttattttaaattaattgtcaacagatgtgcaactgttaggttggttcttaagtcactcggagaagagagagatgcatctactcaaggttggcacttggagaaacaacactgcctcttcctggcttatgaagttcagtgttctttggcttgttagtcagaactgttgcagagcaagtgttgtttggatggcttatatgaacatatcatttcatgttgggaatcatgtgttgtcagagttgggagagactggagtctttggaagaagctccactttgaagagagtggcaggagttatagtgccaccagagggaaaaatccaaaatgcatgtaatcccaataccattttcagccgatcaaagtactcagagacctggcttgcacttattgaacggggaggttgtaccttcacacagaaaattaaagtggcaactgagaagggagccagtggagtgatcatctataacgttccaggtactggcaaccaggtgttccccatgtttcatcaggcatttgaagatgtcgttgtggttatgattggtaacttaaaaggcacggaaattttccatttaattaagaagggagttctcattacagccgtggttgaggtggggagaaagcacatcatctggatgaatcactatttggtctcttttgtgattgtcacaactgctaccttagcatatttcatcttttatcacattcatagactttgtttagcaaggattcagaaccggagatggcagcgattaacaacagatcttcagaacacatttggacaactccaacttcgagtagtaaaagagggggatgaagaaataaatccaaatggggatagctgcgtaatttgctttgaacgctataagcctaatgacatagttcgtattctgacttgtaaacattttttccacaagaattgcattgacccctggattttaccccatgggacatgccccatttgcaaatgtgatattcttaaagttttggggattcaagtggttgttgaaaatggaacagaacctttgcaagttctaatgtcaaatgaactgcctgaaaccttatcacctagtgaagaggagacaaataatgaagtttctcctgcaggaacctcagataaagtaatccatgtggaggagaaccctacttctcagaataatgacatccagcctcattcagtagtggaagatgttcatccttcaccttgatggcatgacttttgaggaagtgtattaaacctgtatgtgaaatcaggtcctaatactgacaagcagtttgtctgtttga

SEQ ID NO: 17686 - protein, 376 aa, Homo sapiens; identical to SEQ ID NO: 2110

SEQ ID NO: 17687 - DNA, 201 bp, Homo sapiens
gacctggcttgcacttattgaacggggaggttgtaccttcacacagaaaattaaagtggcaactgagaagggagccagtggagtgatcatctataacgttccaggaacctcagataaagtaatccatgtggaggagaaccctacttctcagaataatgacatccagcctcattcagtagtggaagatgttcatccttcacc

SEQ ID NO: 17688 - protein, 65 aa, Homo sapiens
TWLALIERGGCTFTQKIKVATEKGASGVIIYNVPGTSDKVIHVEENPTSQNNDIQPHSVVEDVHP

SEQ ID NO: 17689 - DNA, 844 bp, Homo sapiens
atattaaaatactggaaggagcaagatagctttgatccagggagaccttttccatttatgtgctttagtaatctgccgccaacaagctatcttctttatgttcttctacaactgatgttgttttgttttctcatgtttgtctcttaatagacaaatggaggcatgagcttccttagaattaccccttcgacgcatagttctgtttcatctggacttttgaggcttagtatctttctactacttagctttcctgactcaaacggaaaagccatttggacagctcacctgaatataacatttcaggggacggaaaatatagtcgcggtgatgataagcaacctgaaaggcatggaaattttgcactcgattcagaaaggagtctatgtgacagtcatcattgaagtggggagaatgcacatgcagtgggaggcgaagtcaaataaagacagatgtgaagaaagctattgaccagcttcaactgcgagttctcaaagaaggggatgaggaattagacctaaatgaagacaactgtgttgtttgctttgacacatacaaaccccaagatgtagtacgcattttaacttgcaaacattttttccataaggcatgcattgacccctggcttttagcccataggacatgtcccatgtgcaagtgtgacatcctgaaaacttaagaaatctggagaattttctgaagatgtaaccagatctttccaaatacaaagattagataaattgtcttattgtactttatgtagagagaaaatttcagcttctctacccaagtatgaacaagggtgaaatttgtgttttaaaaataaaactccttatcatgcccagct

SEQ ID NO: 17690 - protein, 101 aa, Homo sapiens
MSFLRITPSTHSSVSSGLLRLSIFLLLSFPDSNGKAIWTAHLNITFQGTENIVAVMISNLKGMEILHSIQKGVYVTVIIEVGRMHMQWEAKSNKDRCEESY

SEQ ID NO: 17691 - DNA, 1303 bp, Homo sapiens
gtaccaatcacaagtcttgttattttgtttcattatgagaaagataatctactaaatattaaaatactggaaggagcaagatagctttgatccagggagaccttttccatttatgtgctttagtaatctgccgccaacaagctatcttctttatgttcttctacaactgatgttgttttgttttctcatgtttgtctcttaatagacaaatggaggcatgagcttccttagaattaccccttcgacgcatagttctgtttcatctggacttttgaggcttagtatctttctactacttagctttcctgactcaaacggaaaagccatttggacagctcacctgaatataacatttcaggttggaaatgagatcacatcggaattaggagagagtggagtgttcgggaatcattctcctctggaaagggtgtctggtgtggtggcacttcctgaaggatggaatcagaatgcctgtcatcctttgaccaatttcagcaggcccaaacaggcagactcatggctggccctcatcgaacgtggaggctgtacttttacacataaaatcaacgtggcagcagagaagggagcaaatggggtgatcatctacaactatcaaggtacgggcagtaaagtatttcccatgtctcaccaggggacggaaaatatagtcgcggtgatgataagcaacctgaaaggcatggaaattttgcactcgattcagaaaggagtctatgtgacagtcatcattgaagtggggagaatgcacatgcagtgggtgagccattacatcatgtatctatttaccttcctggctgccacaattgcctacttttacttagattgcgtctggagacttacacctagagtgcccaattctttcaccaggaggcgaagtcaaataaagacagatgtgaagaaagctattgaccagcttcaactgcgagttctcaaagaaggggatgaggaattagacctaaatgaagacaactgtgttgtttgctttgacacatacaaaccccaagatgtagtacgcattttaacttgcaaacattttttccataaggcatgcattgacccctggcttttagcccataggacatgtcccatgtgcaagtgtgacatcctgaaaacttaagaaatctggagaattttctgaagatgtaaccagatctttccaaatacaaagattagataaattgtcttattgtactttatgtagagagaaaatttcagcttctctacccaagtatgaacaagggtgaaatttgtgttttaaaaataaaactccttatcatgcccagct

SEQ ID NO: 17692 - protein, 305 aa, Homo sapiens; identical to SEQ ID NO: 2112

SEQ ID NO: 17693 - DNA, 2881 bp, Homo sapiens
attgaagccacctgctcaggacaatgaaattcttcagttacattctggtttatcgccgatttctcttcgtggttttcactgtgttggttttactacctctgcccatcgtcctccacaccaaggaagcagaatgtgcctacacactctttgtggtcgccacattttggctcacagaagcattgcctctgtcggtaacagctttgctacctagtttaatgttacccatgtttgggatcatgccttctaagaaggtggcatctgcttatttcaaggattttcacttactgctaattggagttatctgtttagcaacatccatagaaaaatggaatttgcacaagagaattgctctgaaaatggtgatgatggttggtgtaaatcctgcatggctgacgctggggttcatgagcagcactgcctttttgtctatgtggctcagcaacacctcgacggctgccatggtgatgcccattgcggaggctgtagtgcagcagatcatcaatgcagaagcagaggtcgaggccactcagatgacttacttcaacggatcaaccaaccacggactagaaattgatgaaagtgttaatggacatgaaataaatgagaggaaagagaaaacaaaaccagttccaggatacaataatgatacagggaaaatttcaagcaaggtggagttggaaaagaactcaggcatgagaaccaaatatcgaacaaagaagggccacgtgacacgtaaacttacgtgtttgtgcattgcctactcttctaccattggtggactgacaacaatcactggtacctccaccaacttgatctttgcagagtatttcaatacacgctatcctgactgtcgttgcctcaactttggatcatggtttacgttttccttcccagctgcccttatcattctactcttatcctggatctggcttcagtggcttttcctaggattcaattttaaggagatgttcaaatgtggcaaaaccaaaacagtccaacaaaaagcttgtgctgaggtgattaagcaagaataccaaaagcttgggccaataaggtatcaagaaattgtgaccttggtcctcttcattataatggctctgctatggtttagtcgagaccccggatttgttcctggttggtctgcacttttttcagagtaccctggttttgctacagattcaactgttgctttacttatagggctgctattctttcttatcccagctaagacactgactaaaactacacctacaggagaaattgttgcttttgattactctccactgattacttggaaagaattccagtcattcatgccctgggatatagccattcttgttggtggagggtttgccctggcagatggttgtgaggagtctggattatctaagtggataggaaataaattatctcctctgggttcattaccagcatggctaataattctgatatcttctttgatggtgacatctttaactgaggtagccagcaatccagctaccattacactctttctcccaatattatctccattggccgaagccattcatgtgaaccctctttatattctgataccttctactctgtgtacttcatttgcattcctcctaccagtagcaaatccacccaatgctattgtcttttcatatggtcatctgaaagtcattgacatggttaaagctggacttggtgtcaacattgttggtgttgctgtggttatgcttggcatatgtacttggattgtacccatgtttgacctctacacttacccttcgtgggctcctgctatgagtaatgagaccatgccataataagcacaaaatttctgactatcttgcggtaatttctggaagacattaatgattgactgtaaaatgtggctctaaataactaatgacacacatttaaatcagttatggtgtagctgctgcaattcctgtgaatacccgaaacctgctgttataactcagagtccatatttgttattgcagtgcaactaaagagcatctatgtgccttcatcaagaagcccatgttttgagattttgctcatgaaccatctgcaacttgcttcatcataagaataatttataacttgaccttcaaagagattagagcatttgtttcatcttacagttggagttcaatgtaacattttaaatgcaatttattatttcagaaatttcccatgaaactaaaaatagaaaataagatatacaagttaattcggtacttggataaatcatttctgcattgttgttccagagaatttgctgagaaatcaaagccatggtcatctggtgatgaagagaaaagtttaatctaaatgatatgtgcatttcctcatttaaaaaatccaattggattattcttaatatatacatgtaatatgaaaattgagattgaagcactaattccaaaattatggctgaatatactaaataacagaaaagttacagataagaatttatttctactgaactctatagttagtgtaatataattcatatttttatgatattggcacactgagaaattcattttgtagagctatggataaggcttgctatgatttgcactattagtacagtatagttagaaaggaaagctgaacactataaaactattaacatattttcgtatatgagtaacaactttgcttaagtgtttatcttagttcagaaatacataatgtcatatgttaaaaataaagagatgtagaaatctaaatgaattatcactgtgtatacagacagaaaaatcacataactctggtgtgttaacattgcaatgaaaaaatgaaaaaaagaaggaaaaaagaataagaatgaaaactgctgacgtattacaaaacagaaaaataaatgatttaaaatcaaatc

SEQ ID NO: 17694 - protein, 595 aa, Homo sapiens; identical to SEQ ID NO: 2114

SEQ ID NO: 17695 - DNA, 3040 bp, Homo sapiens
aggatacgaccaacagctgagaacgcggcgagtatggaagctgcgtcttaggagcctgggaaagcacttcgacgagaatagtttggtttcgtacacaggaaaatgtctaatcaacaggagaagtatgaagctcagaatatagtcaattcaacagaagagagtgatgatgcttttgatactgtcactattccagttccctcagaagagcctcaagagtcagatcaaactgaagagcatgaatctggaatagaacaattcagtgagagccatgcaatacatgttgaggagcagagtgaccaaagcttttcaagcctggaaccagacaatgaacaactcatggaagaggttatatcaccaagacaagtttcatatactccgcaacatcatgaaaagcaatatgcaatgcagaggccaaatgatgatagtttggcatttctggataaaataaagtctgtaaaggaatctttgcaagaatcagtggaagattctctagcaacagtaaaagttgtacttattccagtgggccaggaaattgtaataccttttaaggttgataccattcttaaatatcttaaggaccatttttcacacttattaggtatcccacattctgtactgcagataagatactcaggaaaaattcttaaaaataatgagactctagtacaacatggagttaagccacaggaaattgtacaagtggaaatcttttctacaaatccagatctgtatccagtcagaagaatagatggattaactgatgtctctcaaatcataactgtcactgtccaaactggacttgatcaataccagcaggtacctgttgagattgtcaaatctgactttcacaaaccatttcttggtggattcagacataaagtaacaggagtagagtatcacaatgctggaacacaaactgtacctaaaaggattcccgaaagactcagtatattttgtagggatacgcagacagtttttcagaaaaaaaatctccaacaaactacaaatacaacatccacacagatgactaacattggtgtatatgtatcaaatatgactgataaactggtaacaccaggaaagtatttttcagcagcagaataccatgctcaaagactaaaggcggtgatagtgatacagacttactacaggcaatggcatgctaaaatcttcgtagagaatttaagaagacagaaaagcttaagactggaatgggaaacacagcaagaactaaggaagataagagaaaaagaagaatggataaaattggactatcaccggaggcataatcctaaaacaaatgaagattttgaatttctttataatgcattagaattctggcggcaagaagaacttacacgtattaaccaatcttttactggagctgaaaggaaagctgctctgtgtgaacttctggaaaaagagactcagataattgcttccattgggagacatagatacattgcttatatggcaaatcaggaagcagcaatacaagcttttttggataagtgttcagctccaaaaatatggagaacccctaatggcaaaacaattgagatggatacgcagttcaccatcagagccagagagctgcaaaatatctataagtgcattatgctgaaaaatatctcccaagatgagaggctggatgtgctgttaactcttaaacacactgtaaaggaacatgaatgtaaactaactcaggaaattctagaattgattgacagagaggttgaccttatgatgagaggagtcaaacatcataaccttgaaggactcagaaaaagaattgcgacactcttttttcattatatcaaaacacctctgtttaatcctgaagttgcaaaataccttaaggtccctcaagacccattgaaattttataagaagatttacttttgccacagttgccagctttatttgccttctacagaattttctgtatcatccacctcacgccgcatataccggtgtcgtaactgcattaaccttcagaatgaggctcaaaaacgagaatcatttttgaagtacaaatgtttacttcaacagctctactatacagaagctgattatgaagatgattctaaaattgctttcttgatgcagctacaagacattcagtacctgacagagaacatctgggcgtcccagtcagtcctcagtgcttgcgacaatctcagtgatctggtcatggtcagatggaataaatccctggagtggtccccctggaactgcattcttcttaccaaagatgaagcagctgctcatctcaagctaacaagtattgaagagggatatgaacgctcatttattcacaagatcaaacacaaacatatcctggctaagaactatttttctcaggttccagtgctggcttcatttatacttgatgatggtgaaattgatgagatcagatggaagtatcactcagacacaacacctaagattatagaatcccagaggcctcctcattaggtgatccaggagtatttgtttgatgatcggcattttgttcactgctaatagggtaatacagaggtcacagagtatggaaatggaatttaatctgtttattgattttgttttttgtttttcatagtattttgagttatataaagagaaaacatttctatataagtaagtattctttgttaggaagttggtgctaaattgaaatgcaattttgttactgaaattaatattttggggtaaagaaaacattttaaaatgtgttttcacattaaattttttaaattttttcaagtatattagagttaaaatctaacaaacagccaaataaaaactagacaactttcaagttatttattttagatagaatgtagttataggaagctaatcagtatgtggaggggaggaaacattataaagtgctctttcttgaaaacttctttaagtaggataaaaaaatttatattttagtataggcatttgaatctttgcagtttatcgtctgctttcaccttccatccttctcataatcccaataaaacaacacttgaaactatttataaataaa

SEQ ID NO: 17696 - protein, 791 aa, Homo sapiens
MSNQQEKYEAQNIVNSTEESDDAFDTVTIPVPSEEPQESDQTEEHESGIEQFSESHAIHVEEQSDQSFSSLEPDNEQLMEEVISPRQVSYTPQHHEKQYAMQRPNDDSLAFLDKIKSVKESLQESVEDSLATVKVVLIPVGQEIVIPFKVDTILKYLKDHFSHLLGIPHSVLQIRYSGKILKNNETLVQHGVKPQEIVQVEIFSTNPDLYPVRRIDGLTDVSQIITVTVQTGLDQYQQVPVEIVKSDFHKPFLGGFRHKVTGVEYHNAGTQTVPKRIPERLSIFCRDTQTVFQKKNLQQTTNTTSTQMTNIGVYVSNMTDKLVTPGKYFSAAEYHAQRLKAVIVIQTYYRQWHAKIFVENLRRQKSLRLEWETQQELRKIREKEEWIKLDYHRRHNPKTNEDFEFLYNALEFWRQEELTRINQSFTGAERKAALCELLEKETQIIASIGRHRYIAYMANQEAAIQAFLDKCSAPKIWRTPNGKTIEMDTQFTIRARELQNIYKCIMLKNISQDERLDVLLTLKHTVKEHECKLTQEILELIDREVDLMMRGVKHHNLEGLRKRIATLFFHYIKTPLFNPEVAKYLKVPQDPLKFYKKIYFCHSCQLYLPSTEFSVSSTSRRIYRCRNCINLQNEAQKRESFLKYKCLLQQLYYTEADYEDDSKIAFLMQLQDIQYLTENIWASQSVLSACDNLSDLVMVRWNKSLEWSPWNCILLTKDEAAAHLKLTSIEEGYERSFIHKIKHKHILAKNYFSQVPVLASFILDDGEIDEIRWKYHSDTTPKIIESQRPPH

SEQ ID NO: 17697 - DNA, 3299 bp, Homo sapiens
gagcaactgccggcctccgcccccagccgcagccggtcactggcggcgccttccgcgccaagcttgggggccttttcggggtcctacatggcacggcttccgacccccggcccgggacggggctcgcaggccccagaggggcaggctggagaaggaggaggttaggtgtcttcaggagggttgctgagcccaaggacgcgccatcgccgcggagaaggagccggaccccttgggcggagcgcccaatgtgtggtccctcacgccgtcccgcaccttgctttttagggttctttttccgctttctgagcccttttataccttacgtttagaaggggaaaatcatcctcccacaccttctccccgactttttgccttttttgtcttgaagttacccaaaggtctgtgtattgttctcagtggtcccaagaattactcgaatatagttgtttttctgagggaggatggatggagataactatcctgatcccagtgtcactttttaaggcattcgcttcaagagacaagcagtttagaatcaggcagaactggattgcaaaatttatgggcagaccggaaaatgtctaatcaacaggagaagtatgaagctcagaatatagtcaattcaacagaagagagtgatgatgcttttgatactgtcactattccagttccctcagaagagcctcaagagtcagatcaaactgaagagcatgaatctggaatagaacaattcagtgagagccatgcaatacatgttgaggagcagagtgaccaaagcttttcaagcctggaaccagacaatgaacaactcatggaagaggttatatcaccaagacaagtttcatatactccgcaacatcatgaaaagcaatatgcaatgcagaggccaaatgatgatagtttggcatttctggataaaataaagtctgtaaaggaatctttgcaagaatcagtggaagattctctagcaacagtaaaagttgtacttattccagtgggccaggaaattgtaataccttttaaggttgataccattcttaaatatcttaaggaccatttttcacacttattaggtatcccacattctgtactgcagataagatactcaggaaaaattcttaaaaataatgagactctagtacaacatggagttaagccacaggaaattgtacaagtggaaatcttttctacaaatccagatctgtatccagtcagaagaatagatggattaactgatgtctctcaaatcataactgtcactgtccaaactggacttgatcaataccagcaggtacctgttgagattgtcaaatctgactttcacaaaccatttcttggtggattcagacataaagtaacaggagtagagtatcacaatgctggaacacaaactgtacctaaaaggattcccgaaagactcagtatattttgtagggatacgcagacagtttttcagaaaaaaaatctccaacaaactacaaatacaacatccacacagatgactaacattggtgtatatgtatcaaatatgactgataaactggtaacaccaggaaagtatttttcagcagcagaataccatgctcaaagactaaaggcggtgatagtgatacagacttactacaggcaatggcatgctaaaatcttcgtagagaatttaagaagacagaaaagcttaagactggaatgggaaacacagcaagaactaaggaagataagagaaaaagaagaatggataaaattggactatcaccggaggcataatcctaaaacaaatgaagattttgaatttctttataatgcattagaattctggcggcaagaagaacttacacgtattaaccaatcttttactggagctgaaaggaaagctgctctgtgtgaacttctggaaaaagagactcagataattgcttccattgggagacatagatacattgcttatatggcaaatcaggaagcagcaatacaagcttttttggataagtgttcagctccaaaaatatggagaacccctaatggcaaaacaattgagatggatacgcagttcaccatcagagccagagagctgcaaaatatctataagtgcattatgctgaaaaatatctcccaagatgagaggctggatgtgctgttaactcttaaacacactgtaaaggaacatgaatgtaaactaactcaggaaattctagaattgattgacagagaggttgaccttatgatgagaggagtcaaacatcataaccttgaaggactcagaaaaagaattgcgacactcttttttcattatatcaaaacacctctgtttaatcctgaagttgcaaaataccttaaggtccctcaagacccattgaaattttataagaagatttacttttgccacagttgccagctttatttgccttctacagaattttctgtatcatccacctcacgccgcatataccggtgtcgtaactgcattaaccttcagaatgaggctcaaaaacgagaatcatttttgaagtacaaatgtttacttcaacagctctactatacagaagctgattatgaagatgattctaaaattgctttcttgatgcagctacaagacattcagtacctgacagagaacatctgggcgtcccagtcagtcctcagtgcttgcgacaatctcagtgatctggtcatggtcagatggaataaatccctggagtggtccccctggaactgcattcttcttaccaaagatgaagcagctgctcatctcaagctaacaagtattgaagagggatatgaacgctcatttattcacaagatcaaacacaaacatatcctggctaagaactatttttctcaggttccagtgctggcttcatttatacttgatgatggtgaaattgatgagatcagatggaagtatcactcagacacaacacctaagattatagaatcccagaggcctcctcattaggtgatccaggagtatttgtttgatgatcggcattttgttcactgctaatagggtaatacagaggtcacagagtatggaaatggaatttaatctgtttattgattttgttttttgtttttcatagtattttgagttatataaagagaaaacatttctatataagtaagtattctttgttaggaagttggtgctaaattgaaatgcaattttgttactgaaattaatattttggggtaaagaaaacattttaaaatgtgttttcacattaaattttttaaattttttcaagtatattagagttaaaatctaacaaacagccaaataaaaactagacaactttcaagtt

SEQ ID NO: 17698 - protein, 791 aa, Homo sapiens; identical to SEQ ID NO: 17696

SEQ ID NO: 17699 - DNA, 2824 bp, Homo sapiens
aggatacgaccaacagctgagaacgcggcgagtatggaagctgcgtcttaggagcctgggaaagcacttcgacgagaatagtttggtttcgtacacaggaaaatgtctaatcaacaggagaagtatgaagctcagaatatagtcaattcaacagaagagagtgatgatgcttttgatactgtcactattccagttccctcagaagagcctcaagagtcagatcaaactgaagagcatgaatctggaatagaacaattcagtgagagccatgcaatacatgttgaggagcagagtgaccaaagcttttcaagcctggaaccagacaatgaacaactcatggaagaggttatatcaccaagacaagtttcatatactccgcaacatcatgaaaagcaatatgcaatgcagaggccaaatgatgatagtttggcatttctggataaaataaagtctgtaaaggaatctttgcaagaatcagtggaagattctctagcaacagtaaaagttgtacttattccagtgggccaggaaattgtaataccttttaaggttgataccattcttaaatatcttaaggaccatttttcacacttattaggtatcccacattctgtactgcagataagatactcaggaaaaattcttaaaaataatgagactctagtacaacatggagttaagccacaggaaattgtacaagtggaaatcttttctacaaatccagatctgtatccagtcagaagaatagatggattaactgatgtctctcaaatcataactgtcactgtccaaactggacttgatcaataccagcaggtacctgttgagattgtcaaatctgactttcacaaaccatttcttggtggattcagacataaagtaacaggagtagagtatcacaatgctggaacacaaactgtacctaaaaggattcccgaaagactcagtatattttgtagggatacgcagacagtttttcagaaaaaaaatctccaacaaactacaaatacaacatccacacagatgactaacattggtgtatatgtatcaaatatgactgataaactggtaacaccaggaaagtatttttcagcagcagaataccatgctcaaagactaaaggcggtgatagtgatacagacttactacaggcaatggcatgctaaaatcttcgtagagaatttaagaagacagaaaagcttaagactggaatgggaaacacagcaagaactaaggaagataagagaaaaagaagaatggataaaattggactatcaccggaggcataatcctaaaacaaatgaagattttgaatttctttataatgcattagaattctggcggcaagaagaacttacacgtattaaccaatcttttactggagctgaaaggaaagctgctctgtgtgaacttctggaaaaagagactcagataattgcttccattgggagacatagatacattgcttatatggcaaatcaggaagcagcaatacaagcttttttggataagtgttcagctccaaaaatatggagaacccctaatggcaaaacaattgagatggatacgcagttcaccatcagagccagagagctgcaaaatatctataagtgcattatgctgaaaaatatctcccaagatgagaggctggatgtgctgttaactcttaaacacactgtaaaggaacatgaatgtaaactaactcaggaaattctagaattgattgacagagaggttgaccttatgatgagaggagtcaaacatcataaccttgaaggactcagaaaaagaattgcgacactcttttttcattatatcaaaacacctctgtttaatcctgaagttgcaaaataccttaaggtccctcaagacccattgaaattttataagaagatttacttttgccacagttgccagctttatttgccttctacagaattttctgtatcatccacctcacgccgcatataccggtgtcgtaactgcattaaccttcagaatgaggctcaaaaacgagaatcatttttgaagtacaaatgtttacttcaacagctctactatacagaagctgattatgaagatgattctaaaattgctttcttgatgcagctacaagacattcagtacctgacagagaacatctgggcgtcccagtcagtcctcagtgcttgcgacaatctcagtgatctggtcatggtcagatggaataaatccctggagtggtccccctggaactgcattcttcttaccaaagatgaagcagctgctcatctcaagctaacaagtattgaagagggatatgaacgctcatttattcacaagatcaaacacaaacatatcctggctaagaactatttttctcaggttccagtgctggcttcatttatacttgatgatggtgaaattgatgagatcagatggaagtatcactcagacacaacacctaagattatagaatcccagaggcctcctcattaggtgatccaggagtatttgtttgatgatcggcattttgttcactgctaatagggtaatacagaggtcacagagtatggaaatggaatttaatctgtttattgattttgttttttgtttttcatagtattttgagttatataaagagaaaacatttctatataagtaagtattctttgttaggaagttggtgctaaattgaaatgcaattttgttactgaaattaatattttggggtaaagaaaacattttaaaatgtgttttcacattaaattttttaaattttttcaagtatattagagttaaaatctaacaaacagccaaataaaaactagacaactttcaagtt

SEQ ID NO: 17700 - protein, 791 aa, Homo sapiens; identical to SEQ ID NO: 17696

SEQ ID NO: 17701 - DNA, 3023 bp, Homo sapiens
gagcaactgccggcctccgcccccagccgcagccggtcactggcggcgccttccgcgccaagcttgggggccttttcggggtcctacatggcacggcttccgacccccggcccgggacggggctcgcaggccccagaggggcaggctggagaaggaggaggaaaatgtctaatcaacaggagaagtatgaagctcagaatatagtcaattcaacagaagagagtgatgatgcttttgatactgtcactattccagttccctcagaagagcctcaagagtcagatcaaactgaagagcatgaatctggaatagaacaattcagtgagagccatgcaatacatgttgaggagcagagtgaccaaagcttttcaagcctggaaccagacaatgaacaactcatggaagaggttatatcaccaagacaagtttcatatactccgcaacatcatgaaaagcaatatgcaatgcagaggccaaatgatgatagtttggcatttctggataaaataaagtctgtaaaggaatctttgcaagaatcagtggaagattctctagcaacagtaaaagttgtacttattccagtgggccaggaaattgtaataccttttaaggttgataccattcttaaatatcttaaggaccatttttcacacttattaggtatcccacattctgtactgcagataagatactcaggaaaaattcttaaaaataatgagactctagtacaacatggagttaagccacaggaaattgtacaagtggaaatcttttctacaaatccagatctgtatccagtcagaagaatagatggattaactgatgtctctcaaatcataactgtcactgtccaaactggacttgatcaataccagcaggtacctgttgagattgtcaaatctgactttcacaaaccatttcttggtggattcagacataaagtaacaggagtagagtatcacaatgctggaacacaaactgtacctaaaaggattcccgaaagactcagtatattttgtagggatacgcagacagtttttcagaaaaaaaatctccaacaaactacaaatacaacatccacacagatgactaacattggtgtatatgtatcaaatatgactgataaactggtaacaccaggaaagtatttttcagcagcagaataccatgctcaaagactaaaggcggtgatagtgatacagacttactacaggcaatggcatgctaaaatcttcgtagagaatttaagaagacagaaaagcttaagactggaatgggaaacacagcaagaactaaggaagataagagaaaaagaagaatggataaaattggactatcaccggaggcataatcctaaaacaaatgaagattttgaatttctttataatgcattagaattctggcggcaagaagaacttacacgtattaaccaatcttttactggagctgaaaggaaagctgctctgtgtgaacttctggaaaaagagactcagataattgcttccattgggagacatagatacattgcttatatggcaaatcaggaagcagcaatacaagcttttttggataagtgttcagctccaaaaatatggagaacccctaatggcaaaacaattgagatggatacgcagttcaccatcagagccagagagctgcaaaatatctataagtgcattatgctgaaaaatatctcccaagatgagaggctggatgtgctgttaactcttaaacacactgtaaaggaacatgaatgtaaactaactcaggaaattctagaattgattgacagagaggttgaccttatgatgagaggagtcaaacatcataaccttgaaggactcagaaaaagaattgcgacactcttttttcattatatcaaaacacctctgtttaatcctgaagttgcaaaataccttaagatgggtggagaatatctttccatggcattatagtaaatgctccatctataatggagacgtgtgctaacgtgttttcatgaggttgactgatatatttgctaatttaatgcctaggaggcatgaagataaaataatcattcaagataaacaaaatgtgtaaatctcagaataagaaaaggaaccagataattatttaggtccctcaagacccattgaaattttataagaagatttacttttgccacagttgccagctttatttgccttctacagaattttctgtatcatccacctcacgccgcatataccggtgtcgtaactgcattaaccttcagaatgaggctcaaaaacgagaatcatttttgaagtacaaatgtttacttcaacagctctactatacagaagctgattatgaagatgattctaaaattgctttcttgatgcagctacaagacattcagtacctgacagagaacatctgggcgtcccagtcagtcctcagtgcttgcgacaatctcagtgatctggtcatggtcagatggaataaatccctggagtggtccccctggaactgcattcttcttaccaaagatgaagcagctgctcatctcaagctaacaagtattgaagagggatatgaacgctcatttattcacaagatcaaacacaaacatatcctggctaagaactatttttctcaggttccagtgctggcttcatttatacttgatgatggtgaaattgatgagatcagatggaagtatcactcagacacaacacctaagattatagaatcccagaggcctcctcattaggtgatccaggagtatttgtttgatgatcggcattttgttcactgctaatagggtaatacagaggtcacagagtatggaaatggaatttaatctgtttattgattttgttttttgtttttcatagtattttgagttatataaagagaaaacatttctatataagtaagtattctttgttaggaagttggtgctaaattgaaatgcaattttgttactgaaattaatattttggggtaaagaaaacattttaaaatgtgttttcacattaaattttttaaattttttc

SEQ ID NO: 17702 - protein, 596 aa, Homo sapiens
MSNQQEKYEAQNIVNSTEESDDAFDTVTIPVPSEEPQESDQTEEHESGIEQFSESHAIHVEEQSDQSFSSLEPDNEQLMEEVISPRQVSYTPQHHEKQYAMQRPNDDSLAFLDKIKSVKESLQESVEDSLATVKVVLIPVGQEIVIPFKVDTILKYLKDHFSHLLGIPHSVLQIRYSGKILKNNETLVQHGVKPQEIVQVEIFSTNPDLYPVRRIDGLTDVSQIITVTVQTGLDQYQQVPVEIVKSDFHKPFLGGFRHKVTGVEYHNAGTQTVPKRIPERLSIFCRDTQTVFQKKNLQQTTNTTSTQMTNIGVYVSNMTDKLVTPGKYFSAAEYHAQRLKAVIVIQTYYRQWHAKIFVENLRRQKSLRLEWETQQELRKIREKEEWIKLDYHRRHNPKTNEDFEFLYNALEFWRQEELTRINQSFTGAERKAALCELLEKETQIIASIGRHRYIAYMANQEAAIQAFLDKCSAPKIWRTPNGKTIEMDTQFTIRARELQNIYKCIMLKNISQDERLDVLLTLKHTVKEHECKLTQEILELIDREVDLMMRGVKHHNLEGLRKRIATLFFHYIKTPLFNPEVAKYLKMGGEYLSMAL

SEQ ID NO: 17703 - DNA, 3028 bp, Homo sapiens
gccggcctccgcccccagccgcagccggtcactggcggcgccttccgcgccaagcttgggggccttttcggggtcctacatggcacggcttccgacccccggcccgggacggggctcgcaggccccagaggggcaggctggagaaggaggaggttaggtgtcttcaggagggttgctgagcccaaggacgcgccatcgccgcggagaaggagccggaccccttgggcggagcgcccaatgtgtggtccctcacgccgtcccgcaccttgctttttagggttctttttccgctttctgagcccttttataccttacgtttagaaggggaaaatcatcctcccacaccttctccccgactttttgccttttttgtcttgaagttacccaaaggtctgtgtattgttctcagtggtcccaagaattactcgaatatagttgtttttctgagggaggatggatggagataactatcctgatcccagtgtcactttttaaggcattcgcttcaagagacaagcagtttagaatcaggcagaactggattgcaaaatttatgggcagaccggaaaatgtctaatcaacaggagaagtatgaagctcagaatatagtcaattcaacagaagagagtgatgatgcttttgatactgtcactattccagttccctcagaagagcctcaagagtcagatcaaactgaagagcatgaatctggaatagaacaattcagtgagagccatgcaatacatgttgaggagcagagtgaccaaagcttttcaagcctggaaccagacaatgaacaactcatggaagaggttatatcaccaagacaagtttcatatactccgcaacatcatgaaaagcaatatgcaatgcagaggccaaatgatgatagtttggcatttctggataaaataaagtctgtaaaggaatctttgcaagaatcagtggaagattctctagcaacagtaaaagttgtacttattccagtgggccaggaaattgtaataccttttaaggttgataccattcttaaatatcttaaggaccatttttcacacttattaggtatcccacattctgtactgcagataagatactcaggaaaaattcttaaaaataatgagactctagtacaacatggagttaagccacaggaaattgtacaagtggaaatcttttctacaaatccagatctgtatccagtcagaagaatagatggattaactgatgtctctcaaatcataactgtcactgtccaaactggacttgatcaataccagcaggtacctgttgagattgtcaaatctgactttcacaaaccatttcttggtggattcagacataaagtaacaggagtagagtatcacaatgctggaacacaaactgtacctaaaaggattcccgaaagactcagtatattttgtagggatacgcagacagtttttcagaaaaaaaatctccaacaaactacaaatacaacatccacacagatgactaacattggtgtatatgtatcaaatatgactgataaactggtaacaccaggaaagtatttttcagcagcagaataccatgctcaaagactaaaggcggtgatagtgatacagacttactacaggcaatggcatgctaaaatcttcgtagagaatttaagaagacagaaaagcttaagactggaatgggaaacacagcaagaactaaggaagataagagaaaaagaagaatggataaaattggactatcaccggaggcataatcctaaaacaaatgaagattttgaatttctttataatgcattagaattctggcggcaagaagaacttacacgtattaaccaatcttttactggagctgaaaggaaagctgctctgtgtgaacttctggaaaaagagactcagataattgcttccattgggagacatagatacattgcttatatggcaaatcaggaagcagcaatacaagcttttttggataagtgttcagctccaaaaatatggagaacccctaatggcaaaacaattgagatggatacgcagttcaccatcagagccagagagctgcaaaatatctataagtgcattatgctgaaaaatatctcccaagatgagaggctggatgtgctgttaactcttaaacacactgtaaaggaacatgaatgtaaactaactcaggaaattctagaattgattgacagagaggttgaccttatgatgagaggagtcaaacatcataaccttgaaggactcagaaaaagaattgcgacactcttttttcattatatcaaaacacctctgtttaatcctgaagttgcaaaataccttaaggtccctcaagacccattgaaattttataagaagatttacttttgccacagttgccagctttatttgccttctacagaattttctgtatcatccacctcacgccgcatataccggtgtcgtaactgcattaaccttcagaatgaggctcaaaaacgagaatcatttttgaagtacaaatgtttacttcaacagctctactatacagaagctgattatgaagatgattctaaaattgctttcttgatgcagctacaagacattcagtacctgacagagaacatctgggcgtcccagtcagtcctcagtgcttgcgacaatctcagtgatctggtcatggtcagatggaataaatccctggagtggtccccctggaactgcattcttcttaccaaagatgaagcagctgctcatctcaagctaacaagtattgaagagggatatgaacgctcatttattcacaagatcaaacacaaacatatcctggctaagaactatttttctcaggttccagtgctggcttcatttatacttgatgatggtgaaattgatgagatcagatggaagtatcactcagacacaacacctaagattatagaatcccagaggcctcctcattaggtgatccaggagtatttgtttgatgatcggcattttgttcactgctaatagggtaatacagaggtcacagagtatggaaatgg

SEQ ID NO: 17704 - protein, 791 aa, Homo sapiens; identical to SEQ ID NO: 17696

SEQ ID NO: 17705 - DNA, 2561 bp, Homo sapiens
aggatacgaccaacagctgagaacgcggcgagtatggaagctgcgtcttaggagcctgggaaagcacttcgacgagaatagtttggtttcgtacacaggaaaatgtctaatcaacaggagaagtatgaagctcagaatatagtcaattcaacagaagagagtgatgatgcttttgatactgtcactattccagttccctcagaagagcctcaagagtcagatcaaactgaagagcatgaatctggaatagaacaattcagtgagagccatgcaatacatgttgaggagcagagtgaccaaagcttttcaagcctggaaccagacaatgaacaactcatggaagaggttatatcaccaagacaagtttcatatactccgcaacatcatgaaaagcaatatgcaatgcagaggccaaatgatgatagtttggcatttctggataaaataaagtctgtaaaggaatctttgcaagaatcagtggaagattctctagcaacagtaaaagttgtacttattccagtgggccaggaaattgtaataccttttaaggttgataccattcttaaatatcttaaggaccatttttcacacttattaggtatcccacattctgtactgcagataagatactcaggaaaaattcttaaaaataatgagactctagtacaacatggagttaagccacaggaaattgtacaagtggaaatcttttctacaaatccagatctgtatccagtcagaagaatagatggattaactgatgtctctcaaatcataactgtcactgtccaaactggacttgatcaataccagcaggtacctgttgagattgtcaaatctgactttcacaaaccatttcttggtggattcagacataaagtaacaggagtagagtatcacaatgctggaacacaaactgtacctaaaaggattcccgaaagactcagtatattttgtagggatacgcagacagtttttcagaaaaaaaatctccaacaaactacaaatacaacatccacacagatgactaacattggtgtatatgtatcaaatatgactgataaactggtaacaccaggaaagtatttttcagcagcagaataccatgctcaaagactaaaggcggtgatagtgatacagacttactacaggcaatggcatgctaaaatcttcgtagagaatttaagaagacagaaaagcttaagactggaatgggaaacacagcaagaactaaggaagataagagaaaaagaagaatggataaaattggactatcaccggaggcataatcctaaaacaaatgaagattttgaatttctttataatgcattagaattctggcggcaagaagaacttacacgtattaaccaatcttttactggagctgaaaggaaagctgctctgtgtgaacttctggaaaaagagactcagataattgcttccattgggagacatagatacattgcttatatggcaaatcaggaagcagcaatacaagcttttttggataagtgttcagctccaaaaatatggagaacccctaatggcaaaacaattgagatggatacgcagttcaccatcagagccagagagctgcaaaatatctataagtgcattatgctgaaaaatatctcccaagatgagaggctggatgtgctgttaactcttaaacacactgtaaaggaacatgaatgtaaactaactcaggaaattctagaattgattgacagagaggttgaccttatgatgagaggagtcaaacatcataaccttgaaggactcagaaaaagaattgcgacactcttttttcattatatcaaaacacctctgtttaatcctgaagttgcaaaataccttaaggtccctcaagacccattgaaattttataagaagatttacttttgccacagttgccagctttatttgccttctacagaattttctgtatcatccacctcacgccgcatataccggtgtcgtaactgcattaaccttcagaatgaggctcaaaaacgagaatcatttttgaagtacaaatgtttacttcaacagctctactatacagaagctgattatgaagatgattctaaaattgctttcttgatgcagctacaagacattcagtacctgacagagaacatctgggcgtcccagtcagtcctcagtgcttgcgacaatctcagtgatctggtcatggtcagatggaataaatccctggagtggtccccctggaactgcattcttcttaccaaagatgaagcagctgctcatctcaagctaacaagtattgaagagggatatgaacgctcatttattcacaagatcaaacacaaacatatcctggctaagaactatttttctcaggttccagtgctggcttcatttatacttgatgatggtgaaattgatgagatcagatggaagtatcactcagacacaacacctaagattatagaatcccagaggcctcctcattaggtgatccaggagtatttgtttgatgatcggcattttgttcactgctaatagggtaatacagaggtcacagagtatggaaatgg

SEQ ID NO: 17706 - protein, 791 aa, Homo sapiens; identical to SEQ ID NO: 17696

SEQ ID NO: 17707 - DNA, 457 bp, Homo sapiens
gatgtttatttcagcttaaattcttatttgctacttttattcaggaattattgacatgacagatgtatatttccttgtagagaatcttagatgtactagggctttaatgtaagtcaccaagaagtgctggctcaatattccatgttgtattagtcagatttctcctgacagagaacatctgggcgtcccagtcagtcctcagtgcttgcgacaatctcagtgatctggtcatggtcagatggaataaatccctggagtggtccccctggaactgcattcttcttaccaaagatgaagcagctgctcatctcaagatgatgcaatctgtaaaacattttgatgggtaagttgagggactcctgaagagttcgtagagagctccatttacactaggtccaggatcccgagagttaatactgattctctgcattctttaattccacacaaggtgtcagct

SEQ ID NO: 17708 - protein, 38 aa, Homo sapiens
MVRWNKSLEWSPWNCILLTKDEAAAHLKMMQSVKHFDG

SEQ ID NO: 17709 - DNA, 731 bp, Homo sapiens
tcctctgttcccagacaagggcagttcaggggcttccacttggtcttcctcatcatgatagctcttactccacaggtcaagaaatcaagggtagtgaggctgtgccaactataaagtattctattccagttatatattcaaggaccagggaaataaatgctgggtggcccagtagatccattatgagctggacctgggccaggacttgatttaatttttgttttcacataccccagactctcacaggatcctgggtctttatactgccacaacaattagtcatttgattcaggatgtccctgagaagaaacatgaccttagatgaggcagtttgttttcagctgatggtagctgtctatctgtaggcaagatggctctcttcagcacagggaattgtcggagagaagctcagtggagagctatcagctaccacaacctgccgctgagagtctgcttcagtgctgaagtagggctgatctgggcagcacactcaaacattcattacaatgaatatgttgtctacattcctaattaaaagggaaaccctactgttattaggaccataatgtaagctcaatatttaatgtaagcttatataataagtgggcaatacaggtaaaaagtatttgggttctgaattgtgcttgtgagttctcaagttaataagacacttggcagatgttcgttcagtatagcatagaaatataggttgtttctgtgtgatcatcggt

SEQ ID NO: 17710 - protein, 54 aa, Homo sapiens
MALFSTGNCRREAQWRAISYHNLPLRVCFSAEVGLIWAAHSNIHYNEYVVYIPN

SEQ ID NO: 17711 - DNA, 3626 bp, Homo sapiens
ggctcctcccctttctcctgccatgtttcttctccccgccccctcgcctctggctcctcccccttttccctatcgcgttcctcctttgcagcccccatccccctcctctggctcctcttcttccctaccgcgatcctccttccagaccccggcccccagcccgcctctagctccttcccttatttcctgccgcgctcctccttcccgacaccgcccctccgcctctggctactcctcttctctcctgccgcactcctccttcccggccccacctccccgcctctggctcatccccttctcttctgccgccctcctccttcccggccccgcccccagtctttggctcctccccctaccctgccgcgctcctccttcccggcccctccccgctgccctcttctggctcctcccccccacccgcctctggctcctctccttcccacccctgccgtgctccggcaggaagaggtggtgccagggccgttgctaggatacgaccaacagctgagaacgcggcgagtatggaagctgcgtcttaggagcctgggaaagcacttcgacgagaatagtttggtttcgtacacaggaaaatgtctaatcaacaggagaagtatgaagctcagaatatagtcaattcaacagaagagagtgatgatgcttttgatactgtcactattccagttccctcagaagagcctcaagagtcagatcaaactgaagagcatgaatctggaatagaacaattcagtgagagccatgcaatacatgttgaggagcagagtgaccaaagcttttcaagcctggaaccagacaatgaacaactcatggaagaggttatatcaccaagacaagtttcatatactccgcaacatcatgaaaagcaatatgcaatgcagaggccaaatgatgatagtttggcatttctggataaaataaagtctgtaaaggaatctttgcaagaatcagtggaagattctctagcaacagtaaaagttgtacttattccagtgggccaggaaattgtaataccttttaaggttgataccattcttaaatatcttaaggaccatttttcacacttattaggtatcccacattctgtactgcagataagatactcaggaaaaattcttaaaaataatgagactctagtacaacatggagttaagccacaggaaattgtacaagtggaaatcttttctacaaatccagatctgtatccagtcagaagaatagatggattaactgatgtctctcaaatcataactgtcactgtccaaactggttcgttatttgatgtcttttagataaagtatttttgagtcccttcttggttgagctttcattgaatcttggtgttatctctcaggacttgatcaataccagcaggtacctgttgagattgtcaaatctgactttcacaaaccatttcttggtggattcagacataaagtaacaggagtagagtatcacaatgctggaacacaaactgtacctaaaaggattcccgaaagactcagtatattttgtagggatacgcaggtaatgtttttatttgtctctttaggtttttgaaggtatagactcaataattgtactgtatgactctctcaaatttctcttaagtaattatatggcaattaataaaagaaaatgaactcacatatgtagaaaaactcccttatgtatatatataggggatactgatttaaatttttaatgttttcttttagacagtttttcagaaaaaaaatctccaacaaactacaaatacaacatccacacagatgactaacattggtgtatatgtatcaaatatgactgataaactggtaacaccaggaaagtatttttcagcagcagaataccatgctcaaagactaaaggcggtgagataacttttattgtggatgaatactaaaaatttgatatataagccagttgttccgagtgtgtctctttctccaagccacatttgcttgagaaagaatgctcatgagtatgggtcatatttcactgctaacaaagcagtctttatctccagtattcccccatgtaaagaaccagcatcctaaatgctcctaatccttccttttctcttagggaaacccagcttctttgtgtattgcctttggccattattagccttctcaacactgctgtcccttggccttaaatcttgtcacagtagaatcaccaagggaactttcgagactaattgaaaccaaataggacagtagtcgattttctctgatattaacatagccgctccaactctgttttatttttttgcatagtctctcatttttcattcttttactttcaacctatttgatctacctcctaccatcaatttactgtgagtaaaaatgacctgaaagcagtgactttaagagattttgcttttcaaatgacaagaaatctggagctaggctattcagcccaagacctttagagacaaacttgtagtgaaaaaaagttaagtctgttgacttaattgccctgaaggagacagtataccaggggaaccatggggttaactttatagcaggctttatcagtgccagttattccagcctgataattttttactttttcagtccaaactaaatttcaccaaataaaggaatatatggagttattatataatttggggaagagtgaagtttgagtgggatttaggggaagcagtattctgattgtctcaatgcaaaacaagggtgtgtataaatgggccaacattaggtctggactgtgaagtagaccaaggtcacgttcctttggaaacaaagttaaaagagatgggaaatgtttcttagaagttctctgaagttcagcaccttggttgtataattgaggctgcttctctctgtcaaagtgacgtgcaacctctaggcaagagtggaatgtttgtttcttactgatctaatttcagacaggaaagtttctgatagtttctgaatttagagaacgaagtttctcagtgagtaagaagatagcagtcactaaaagaaggggattgttgaaatattttatagttgtagagtgtccttgggagaaatactgtttttgttaattttgtagctgacctgattagtgcctgttattccagcctgacaattttttactttctcagtcttaattaatttttactttcttactatactgggcatgggtggtgactctatgatgtcatcagaatcataaactcctttcatctttctactccattaagctcatcatgagcttgttactgtatgaagataaaatggttgactaactttcatcatgcctgcattccatgtgagaagaagggaaaagtcaaggcagcatgttccatgaatgccaccttcaaggatttccccggaaagccccacccagtgacttctacttgcatcccattggcttgaactatgtcatgtgactatccctactgcaaaagtgtgtgataaatgaatttttaaagtagcatatcattgctcctcaatgagattgcaatcttagtaagagaaagtagggcaaaatggatattaagtaaggaaatggaaatttctgtcattttccaaactccaaaaaatgatattgaaagaataaaagtataaatatacaaggacaaagaatacatg

SEQ ID NO: 17712 - protein, 238 aa, Homo sapiens
MSNQQEKYEAQNIVNSTEESDDAFDTVTIPVPSEEPQESDQTEEHESGIEQFSESHAIHVEEQSDQSFSSLEPDNEQLMEEVISPRQVSYTPQHHEKQYAMQRPNDDSLAFLDKIKSVKESLQESVEDSLATVKVVLIPVGQEIVIPFKVDTILKYLKDHFSHLLGIPHSVLQIRYSGKILKNNETLVQHGVKPQEIVQVEIFSTNPDLYPVRRIDGLTDVSQIITVTVQTGSLFDVF

SEQ ID NO: 17713 - DNA, 1671 bp, Homo sapiens
tgaattttcaccaaatatttagtaaaaagagtatgatgaaagaaaagttgtatttttaagtgtttttatataggaattttaaaatatataggatattgaaacattcagttagtatgcttctttaattttttttctccctgaaattataggaaccagatgttaaaaaattagaagaccaacttcaaggcggtcaattagaagaggtgattcttcaggctgaacatgaactaaatctggcaagaaaaatgagggaatggaaactatgggagccattagtggaagagcctcctgccgatcagtggaaatggccaatataattattaagtgactttggtgtgttcatgggaaactgatgtaattaaatattctgttatattaagagcgtgttcttattactgacattttgtaatcaagaaaagtgatatagaaaatatgtaggagactgttaaaattggtgattatggtaatatggtcatgtgaatcaatttttgatttataaagtactcacacaagttgtttcaaagatgatatttctgtgaacagagaggccatgggaagatttgaaaattattaaagaaaaattcctacagattttcaatgcagagaccataatcaaaaagtaaactttctttagtagtatgttcaatacatcatttaattttttaagttatcctgaagaaggaaaggtccttaattattatagtctaaacaaatttatagattactgtttgaagtaaataatacgagtgaatattttcaaatgtgataaaatagcacaagtggctggtgataaaatttgaaattatggttaacctcagctgtgatcttatgtatgtaaagtgaaatttaaatagataattataggttgattacaaaatccatagtgtcattttattttagtcattattgaattataccatttactctgttttcttatagtcttaattttattatattttgttgttactgtattatatttgaaaaccttcaaattagaatacattgtacagttaaagaaattgacttggtacttaaaagaaagatttcccattgcatacaggttattggagaaattttccttttgttgcatttgtggaagttagttttctggcccgtggcctttaattttcttaatcaacctaattacatcaggatagaggtagagtttctgtaaaagaagagacattaagagttcctgaaatttatatctggcatacggataggcttatattcaaaacatcttagtcatacgaccataaattaaaagtggagtcactaaatagtttgcagtacgtttctaatataagtgtaggtgggtatcaaaacaagacaaatgctgttcagggaaagaagttggcaagcttaaggttaaacaaaaataaaattacatgtgttttcgccttcctagctccctgtcattcctaaatacttggttaaatttaacgtggtatctctttccttcatagatagtactatactcttgtggggttttgtgtatacgtgtgtgtgtgtgtgtgtgtgtgtgtgtgtgtgtgtgtgtgtgtgcacgcgcatgcgcacatttgctcagaatgagaaaaaaatggtatttttccttctttccagtatatttctcccctcatagagctgtaacatgaatactaaataaatattaaataaggtggattctta

SEQ ID NO: 17714 - protein, 32 aa, Homo sapiens
MFNTSFNFLSYPEEGKVLNYYSLNKFIDYCLK

SEQ ID NO: 17715 - DNA, 1563 bp, Homo sapiens
ccagaaaaacaccctgaaaagacaaagccttatttacatatgaaccagatgttaaaaaattagaagaccaacttcaaggcggtcaattagaagaggtgattcttcaggctgaacatgaactaaatctggcaagaaaaatgagggaatggaaactatgggagccattagtggaagagcctcctgccgatcagtggaaatggccaatataattattaagtgactttggtgtgttcatgggaaactgatgtaattaaatattctgttatattaagagcgtgttcttattactgacattttgtaatcaagaaaagtgatatagaaaatatgtaggagactgttaaaattggtgattatggtaatatggtcatgtgaatcaatttttgatttataaagtactcacacaagttgtttcaaagatgatatttctgtgaacagagaggccatgggaagatttgaaaattattaaagaaaaattcctacagattttcaatgcagagaccataatcaaaaagtaaactttctttagtagtatgttcaatacatcatttaattttttaagttatcctgaagaaggaaaggtccttaattattatagtctaaacaaatttatagattactgtttgaagtaaataatacgagtgaatattttcaaatgtgataaaatagcacaagtggctggtgataaaatttgaaattatggttaacctcagctgtgatcttatgtatgtaaagtgaaatttaaatagataattataggttgattacaaaatccatagtgtcattttattttagtcattattgaattataccatttactctgttttcttatagtcttaattttattatattttgttgttactgtattatatttgaaaaccttcaaattagaatacattgtacagttaaagaaattgacttggtacttaaaagaaagatttcccattgcatacaggttattggagaaattttccttttgttgcatttgtggaagttagttttctggcccgtggcctttaattttcttaatcaacctaattacatcaggatagaggtagagtttctgtaaaagaagagacattaagagttcctgaaatttatatctggcatacggataggcttatattcaaaacatcttagtcatacgaccataaattaaaagtggagtcactaaatagtttgcagtacgtttctaatataagtgtaggtgggtatcaaaacaagacaaatgctgttcagggaaagaagttggcaagcttaaggttaaacaaaaataaaattacatgtgttttcgccttcctagctccctgtcattcctaaatacttggttaaatttaacgtggtatctctttccttcatagatagtactatactcttgtggggttttgtgtatacgtgtgtgtgtgtgtgtgtgtgtgtgtgtgtgtgtgtgtgtgtgtgcacgcgcatgcgcacatttgctcagaatgagaaaaaaatggtatttttccttctttccagtatatttctcccctcatagagctgtaacatgaatactaaataaatattaaataaggtggattctta

SEQ ID NO: 17716 - protein, 32 aa, Homo sapiens; identical to SEQ ID NO: 17714

SEQ ID NO: 17717 - DNA, 1871 bp, Homo sapiens
gctgtcatggcgggtgtgctgaagaagaccactggccttgtgggattggctgtgtgcaatactcctcacgagaggctaagaatattgtacacaaagattcttgatgttcttgaggaaatccctaaaaatgcagcatatagaaagtatacagaacagattacaaatgagaagctggctatggttaaagcgcctatcataatgcaaattatcagtagttaatcaataagaaggtgttatttgagcaaagatttgaaaagtggtgaagaaacaagtgatgcagataccctgggccatccagcaagataccctgaggcagtaacatatcacgtcttgtgttgaaaagcaaaatgaaccagatgttaaaaaattagaagaccaacttcaaggcggtcaattagaagaggtgattcttcaggctgaacatgaactaaatctggcaagaaaaatgagggaatggaaactatgggagccattagtggaagagcctcctgccgatcagtggaaatggccaatataattattaagtgactttggtgtgttcatgggaaactgatgtaattaaatattctgttatattaagagcgtgttcttattactgacattttgtaatcaagaaaagtgatatagaaaatatgtaggagactgttaaaattggtgattatggtaatatggtcatgtgaatcaatttttgatttataaagtactcacacaagttgtttcaaagatgatatttctgtgaacagagaggccatgggaagatttgaaaattattaaagaaaaattcctacagattttcaatgcagagaccataatcaaaaagtaaactttctttagtagtatgttcaatacatcatttaattttttaagttatcctgaagaaggaaaggtccttaattattatagtctaaacaaatttatagattactgtttgaagtaaataatacgagtgaatattttcaaatgtgataaaatagcacaagtggctggtgataaaatttgaaattatggttaacctcagctgtgatcttatgtatgtaaagtgaaatttaaatagataattataggttgattacaaaatccatagtgtcattttattttagtcattattgaattataccatttactctgttttcttatagtcttaattttattatattttgttgttactgtattatatttgaaaaccttcaaattagaatacattgtacagttaaagaaattgacttggtacttaaaagaaagatttcccattgcatacaggttattggagaaattttccttttgttgcatttgtggaagttagttttctggcccgtggcctttaattttcttaatcaacctaattacatcaggatagaggtagagtttctgtaaaagaagagacattaagagttcctgaaatttatatctggcatacggataggcttatattcaaaacatcttagtcatacgaccataaattaaaagtggagtcactaaatagtttgcagtacgtttctaatataagtgtaggtgggtatcaaaacaagacaaatgctgttcagggaaagaagttggcaagcttaaggttaaacaaaaataaaattacatgtgttttcgccttcctagctccctgtcattcctaaatacttggttaaatttaacgtggtatctctttccttcatagatagtactatactcttgtggggttttgtgtatacgtgtgtgtgtgtgtgtgtgtgtgtgtgtgtgtgtgtgtgtgtgtgcacgcgcatgcgcacatttgctcagaatgagaaaaaaatggtatttttccttctttccagtatatttctcccctcatagagctgtaacatgaatactaaataaatattaaataaggtggattctta

SEQ ID NO: 17718 - protein, 70 aa, Homo sapiens
MAGVLKKTTGLVGLAVCNTPHERLRILYTKILDVLEEIPKNAAYRKYTEQITNEKLAMVKAPIIMQIISS

SEQ ID NO: 17719 - DNA, 1569 bp, Homo sapiens
ggcgctgtcatggcgggtgtgctgaagaagaccactggccttgtgggattggctgtgtgcaatactcctcacgagaggctaagaatattgtacacaaagattcttgatgttcttgaggaaatccctaaaaatgcagcatatagaaagtatacagaacagattacaaatgagaagctggctatggttaaagcgatcagtggaaatggccaatataattattaagtgactttggtgtgttcatgggaaactgatgtaattaaatattctgttatattaagagcgtgttcttattactgacattttgtaatcaagaaaagtgatatagaaaatatgtaggagactgttaaaattggtgattatggtaatatggtcatgtgaatcaatttttgatttataaagtactcacacaagttgtttcaaagatgatatttctgtgaacagagaggccatgggaagatttgaaaattattaaagaaaaattcctacagattttcaatgcagagaccataatcaaaaagtaaactttctttagtagtatgttcaatacatcatttaattttttaagttatcctgaagaaggaaaggtccttaattattatagtctaaacaaatttatagattactgtttgaagtaaataatacgagtgaatattttcaaatgtgataaaatagcacaagtggctggtgataaaatttgaaattatggttaacctcagctgtgatcttatgtatgtaaagtgaaatttaaatagataattataggttgattacaaaatccatagtgtcattttattttagtcattattgaattataccatttactctgttttcttatagtcttaattttattatattttgttgttactgtattatatttgaaaaccttcaaattagaatacattgtacagttaaagaaattgacttggtacttaaaagaaagatttcccattgcatacaggttattggagaaattttccttttgttgcatttgtggaagttagttttctggcccgtggcctttaattttcttaatcaacctaattacatcaggatagaggtagagtttctgtaaaagaagagacattaagagttcctgaaatttatatctggcatacggataggcttatattcaaaacatcttagtcatacgaccataaattaaaagtggagtcactaaatagtttgcagtacgtttctaatataagtgtaggtgggtatcaaaacaagacaaatgctgttcagggaaagaagttggcaagcttaaggttaaacaaaaataaaattacatgtgttttcgccttcctagctccctgtcattcctaaatacttggttaaatttaacgtggtatctctttccttcatagatagtactatactcttgtggggttttgtgtatacgtgtgtgtgtgtgtgtgtgtgtgtgtgtgtgtgtgtgtgtgtgtgcacgcgcatgcgcacatttgctcagaatgagaaaaaaatggtatttttccttctttccagtatatttctcccctcatagagctgtaacatgaatactaaataaatattaaataaggtggattctta

SEQ ID NO: 17720 - protein, 70 aa, Homo sapiens
MAGVLKKTTGLVGLAVCNTPHERLRILYTKILDVLEEIPKNAAYRKYTEQITNEKLAMVKAISGNGQYNY

SEQ ID NO: 17721 - DNA, 1236 bp, Homo sapiens
ggcgctgtcatggcgggtgtgctgaagaagaccactggccttgtgggattggctgtgtgcaatactcctcacgagaggctaagaatattgtacacaaagattcttgatgttcttgaggaaatccctaaaaatgcagcatatagaaagtatacagaacagattacaaatgagaagctggctatggttaaagcggaaccagatgttaaaaaattagaagaccaacttcaaggcggtcaattagaagaggaaaggtccttaattattatagtctaaacaaatttatagattactgtttgaagtaaataatacgagtgaatattttcaaatgtgataaaatagcacaagtggctggtgataaaatttgaaattatggttaacctcagctgtgatcttatgtatgtaaagtgaaatttaaatagataattataggttgattacaaaatccatagtgtcattttattttagtcattattgaattataccatttactctgttttcttatagtcttaattttattatattttgttgttactgtattatatttgaaaaccttcaaattagaatacattgtacagttaaagaaattgacttggtacttaaaagaaagatttcccattgcatacaggttattggagaaattttccttttgttgcatttgtggaagttagttttctggcccgtggcctttaattttcttaatcaacctaattacatcaggatagaggtagagtttctgtaaaagaagagacattaagagttcctgaaatttatatctggcatacggataggcttatattcaaaacatcttagtcatacgaccataaattaaaagtggagtcactaaatagtttgcagtacgtttctaatataagtgtaggtgggtatcaaaacaagacaaatgctgttcagggaaagaagttggcaagcttaaggttaaacaaaaataaaattacatgtgttttcgccttcctagctccctgtcattcctaaatacttggttaaatttaacgtggtatctctttccttcatagatagtactatactcttgtggggttttgtgtatacgtgtgtgtgtgtgtgtgtgtgtgtgtgtgtgtgtgtgtgtgtgtgcacgcgcatgcgcacatttgctcagaatgagaaaaaaatggtatttttccttctttccagtatatttctcccctcatagagctgtaacatgaatactaaataaatattaaataaggtggattctta

SEQ ID NO: 17722 - protein, 87 aa, Homo sapiens
MAGVLKKTTGLVGLAVCNTPHERLRILYTKILDVLEEIPKNAAYRKYTEQITNEKLAMVKAEPDVKKLEDQLQGGQLEEERSLIIIV

SEQ ID NO: 17723 - DNA, 1608 bp, Homo sapiens
accgagtcgttggcgctgtcatggcgggtgtgctgaagaagaccactggccttgtgggattggctgtgtgcaatactcctcacgaggaaccagatgttaaaaaattagaagaccaacttcaaggcggtcaattagaagaggtgattcttcaggctgaacatgaactaaatctggcaagaaaaatgagggaatggaaactatgggagccattagtggaagagcctcctgccgatcagtggaaatggccaatataattattaagtgactttggtgtgttcatgggaaactgatgtaattaaatattctgttatattaagagcgtgttcttattactgacattttgtaatcaagaaaagtgatatagaaaatatgtaggagactgttaaaattggtgattatggtaatatggtcatgtgaatcaatttttgatttataaagtactcacacaagttgtttcaaagatgatatttctgtgaacagagaggccatgggaagatttgaaaattattaaagaaaaattcctacagattttcaatgcagagaccataatcaaaaagtaaactttctttagtagtatgttcaatacatcatttaattttttaagttatcctgaagaaggaaaggtccttaattattatagtctaaacaaatttatagattactgtttgaagtaaataatacgagtgaatattttcaaatgtgataaaatagcacaagtggctggtgataaaatttgaaattatggttaacctcagctgtgatcttatgtatgtaaagtgaaatttaaatagataattataggttgattacaaaatccatagtgtcattttattttagtcattattgaattataccatttactctgttttcttatagtcttaattttattatattttgttgttactgtattatatttgaaaaccttcaaattagaatacattgtacagttaaagaaattgacttggtacttaaaagaaagatttcccattgcatacaggttattggagaaattttccttttgttgcatttgtggaagttagttttctggcccgtggcctttaattttcttaatcaacctaattacatcaggatagaggtagagtttctgtaaaagaagagacattaagagttcctgaaatttatatctggcatacggataggcttatattcaaaacatcttagtcatacgaccataaattaaaagtggagtcactaaatagtttgcagtacgtttctaatataagtgtaggtgggtatcaaaacaagacaaatgctgttcagggaaagaagttggcaagcttaaggttaaacaaaaataaaattacatgtgttttcgccttcctagctccctgtcattcctaaatacttggttaaatttaacgtggtatctctttccttcatagatagtactatactcttgtggggttttgtgtatacgtgtgtgtgtgtgtgtgtgtgtgtgtgtgtgtgtgtgtgtgtgtgcacgcgcatgcgcacatttgctcagaatgagaaaaaaatggtatttttccttctttccagtatatttctcccctcatagagctgtaacatgaatactaaataaatattaaataaggtggattctta

SEQ ID NO: 17724 - protein, 77 aa, Homo sapiens
MAGVLKKTTGLVGLAVCNTPHEEPDVKKLEDQLQGGQLEEVILQAEHELNLARKMREWKLWEPLVEEPPADQWKWPI

SEQ ID NO: 17725 - DNA, 1683 bp, Homo sapiens
gtcaccgagtcgttggcgctgtcatggcgggtgtgctgaagaagaggctaagaatattgtacacaaagattcttgatgttcttgaggaaatccctaaaaatgcagcatatagaaagtatacagaacagattacaaatgagaagctggctatggttaaagcggaaccagatgttaaaaaattagaagaccaacttcaaggcggtcaattagaagaggtgattcttcaggctgaacatgaactaaatctggcaagaaaaatgagggaatggaaactatgggagccattagtggaagagcctcctgccgatcagtggaaatggccaatataattattaagtgactttggtgtgttcatgggaaactgatgtaattaaatattctgttatattaagagcgtgttcttattactgacattttgtaatcaagaaaagtgatatagaaaatatgtaggagactgttaaaattggtgattatggtaatatggtcatgtgaatcaatttttgatttataaagtactcacacaagttgtttcaaagatgatatttctgtgaacagagaggccatgggaagatttgaaaattattaaagaaaaattcctacagattttcaatgcagagaccataatcaaaaagtaaactttctttagtagtatgttcaatacatcatttaattttttaagttatcctgaagaaggaaaggtccttaattattatagtctaaacaaatttatagattactgtttgaagtaaataatacgagtgaatattttcaaatgtgataaaatagcacaagtggctggtgataaaatttgaaattatggttaacctcagctgtgatcttatgtatgtaaagtgaaatttaaatagataattataggttgattacaaaatccatagtgtcattttattttagtcattattgaattataccatttactctgttttcttatagtcttaattttattatattttgttgttactgtattatatttgaaaaccttcaaattagaatacattgtacagttaaagaaattgacttggtacttaaaagaaagatttcccattgcatacaggttattggagaaattttccttttgttgcatttgtggaagttagttttctggcccgtggcctttaattttcttaatcaacctaattacatcaggatagaggtagagtttctgtaaaagaagagacattaagagttcctgaaatttatatctggcatacggataggcttatattcaaaacatcttagtcatacgaccataaattaaaagtggagtcactaaatagtttgcagtacgtttctaatataagtgtaggtgggtatcaaaacaagacaaatgctgttcagggaaagaagttggcaagcttaaggttaaacaaaaataaaattacatgtgttttcgccttcctagctccctgtcattcctaaatacttggttaaatttaacgtggtatctctttccttcatagatagtactatactcttgtggggttttgtgtatacgtgtgtgtgtgtgtgtgtgtgtgtgtgtgtgtgtgtgtgtgtgtgcacgcgcatgcgcacatttgctcagaatgagaaaaaaatggtatttttccttctttccagtatatttctcccctcatagagctgtaacatgaatactaaataaatattaaataaggtggattctta

SEQ ID NO: 17726 - protein, 101 aa, Homo sapiens
MAGVLKKRLRILYTKILDVLEEIPKNAAYRKYTEQITNEKLAMVKAEPDVKKLEDQLQGGQLEEVILQAEHELNLARKMREWKLWEPLVEEPPADQWKWPI

SEQ ID NO: 17727 - DNA, 1937 bp, Homo sapiens
gtcaccgagtcgttggcgctgtcatggcgggtgtgctgaagaagaccactggccttgtgggattggctgtgtgcaatactcctcacgagaaattcaaataagaaaaattaaaaaaaaaaatttgcagtgcttcggacctcactttgaaaaatactgattcaggctgggtgggctcacgcctgtaatcccagcactttgggaggctgaggtgggcggatcacctgaagtcaggagtttgagaccatcctggccaacatggcaaaaccctgtctctactaaaaatagaaaaaatagccagaggctaagaatattgtacacaaagattcttgatgttcttgaggaaatccctaaaaatgcagcatatagaaagtatacagaacagattacaaatgagaagctggctatggttaaagcggaaccagatgttaaaaaattagaagaccaacttcaaggcggtcaattagaagaggtgattcttcaggctgaacatgaactaaatctggcaagaaaaatgagggaatggaaactatgggagccattagtggaagagcctcctgccgatcagtggaaatggccaatataattattaagtgactttggtgtgttcatgggaaactgatgtaattaaatattctgttatattaagagcgtgttcttattactgacattttgtaatcaagaaaagtgatatagaaaatatgtaggagactgttaaaattggtgattatggtaatatggtcatgtgaatcaatttttgatttataaagtactcacacaagttgtttcaaagatgatatttctgtgaacagagaggccatgggaagatttgaaaattattaaagaaaaattcctacagattttcaatgcagagaccataatcaaaaagtaaactttctttagtagtatgttcaatacatcatttaattttttaagttatcctgaagaaggaaaggtccttaattattatagtctaaacaaatttatagattactgtttgaagtaaataatacgagtgaatattttcaaatgtgataaaatagcacaagtggctggtgataaaatttgaaattatggttaacctcagctgtgatcttatgtatgtaaagtgaaatttaaatagataattataggttgattacaaaatccatagtgtcattttattttagtcattattgaattataccatttactctgttttcttatagtcttaattttattatattttgttgttactgtattatatttgaaaaccttcaaattagaatacattgtacagttaaagaaattgacttggtacttaaaagaaagatttcccattgcatacaggttattggagaaattttccttttgttgcatttgtggaagttagttttctggcccgtggcctttaattttcttaatcaacctaattacatcaggatagaggtagagtttctgtaaaagaagagacattaagagttcctgaaatttatatctggcatacggataggcttatattcaaaacatcttagtcatacgaccataaattaaaagtggagtcactaaatagtttgcagtacgtttctaatataagtgtaggtgggtatcaaaacaagacaaatgctgttcagggaaagaagttggcaagcttaaggttaaacaaaaataaaattacatgtgttttcgccttcctagctccctgtcattcctaaatacttggttaaatttaacgtggtatctctttccttcatagatagtactatactcttgtggggttttgtgtatacgtgtgtgtgtgtgtgtgtgtgtgtgtgtgtgtgtgtgtgtgtgtgcacgcgcatgcgcacatttgctcagaatgagaaaaaaatggtatttttccttctttccagtatatttctcccctcatagagctgtaacatgaatactaaataaatattaaataaggtggattctta

SEQ ID NO: 17728 - protein, 59 aa, Homo sapiens
MVKAEPDVKKLEDQLQGGQLEEVILQAEHELNLARKMREWKLWEPLVEEPPADQWKWPI

SEQ ID NO: 17729 - DNA, 1530 bp, Homo sapiens
gtgcgtcaccgagtcgttggcgctgtcatggcgggtgtgctgaagaagaccactggccttgtgggattggctgtgtgcaatactcctcacgagaggctaagaatattgtacacaaagattcttgatgttcttgaggaaatccctaaaaatgcagcatatagaaagtatacagaacagattacaaatgagaagctggctatggttaaagcggaaccagatgttaaaaaattagaagaccaacttcaaggcggtcaattagaagaggtgattcttcaggctgaacatgaactaaatctggcaagaaaaatgagggaatggaaactatgggagccattagtggaagagcctcctgccgatcagtggaaatggccaatataattattaagtgactttggtgtgttcatgggaaactgatgtaattaaatattctgttatattaagagcgtgttcttattactgacattttgtaatcaagaaaataaactttctttagtagtatgttcaatacatcatttaattttttaagttatcctgaagaaggaaaggtccttaattattatagtctaaacaaatttatagattactgtttgaagtaaataatacgagtgaatattttcaaatgtgataaaatagcacaagtggctggtgataaaatttgaaattatggttaacctcagctgtgatcttatgtatgtaaagtgaaatttaaatagataattataggttgattacaaaatccatagtgtcattttattttagtcattattgaattataccatttactctgttttcttatagtcttaattttattatattttgttgttactgtattatatttgaaaaccttcaaattagaatacattgtacagttaaagaaattgacttggtacttaaaagaaagatttcccattgcatacaggttattggagaaattttccttttgttgcatttgtggaagttagttttctggcccgtggcctttaattttcttaatcaacctaattacatcaggatagaggtagagtttctgtaaaagaagagacattaagagttcctgaaatttatatctggcatacggataggcttatattcaaaacatcttagtcatacgaccataaattaaaagtggagtcactaaatagtttgcagtacgtttctaatataagtgtaggtgggtatcaaaacaagacaaatgctgttcagggaaagaagttggcaagcttaaggttaaacaaaaataaaattacatgtgttttcgccttcctagctccctgtcattcctaaatacttggttaaatttaacgtggtatctctttccttcatagatagtactatactcttgtggggttttgtgtatacgtgtgtgtgtgtgtgtgtgtgtgtgtgtgtgtgtgtgtgtgtgtgcacgcgcatgcgcacatttgctcagaatgagaaaaaaatggtatttttccttctttccagtatatttctcccctcatagagctgtaacatgaatactaaataaatattaaataaggtggattctta

SEQ ID NO: 17730 - protein, 116 aa, Homo sapiens; identical to SEQ ID NO: 2118

SEQ ID NO: 17731 - DNA, 1814 bp, Homo sapiens
tggagctaagctgtttccagggtgacagagtggcgacctcggtggtcgattgagcaggtctgagaattgttcccaaagggttgtgcgtcaccgagtcgttggcgctgtcatggcgggtgtgctgaagaagaccactggccttgtgggattggctgtgtgcaatactcctcacgagaggctaagaatattgtacacaaagattcttgatgttcttgaggaaatccctaaaaatgcagcatatagaaagtatacagaacagattacaaatgagaagctggctatggttaaagcggaaccagatgttaaaaaattagaagaccaacttcaaggcggtcaattagaagaggtgattcttcaggctgaacatgaactaaatctggcaagaaaaatgagggaatggaaactatgggagccattagtggaagagcctcctgccgatcagtggaaatggccaatataattattaagtgactttggtgtgttcatgggaaactgatgtaattaaatattctgttatattaagagcgtgttcttattactgacattttgtaatcaagaaaagtgatatagaaaatatgtaggagactgttaaaattggtgattatggtaatatggtcatgtgaatcaatttttgatttataaagtactcacacaagttgtttcaaagatgatatttctgtgaacagagaggccatgggaagatttgaaaattattaaagaaaaattcctacagattttcaatgcagagaccataatcaaaaagtaaactttctttagtagtatgttcaatacatcatttaattttttaagttatcctgaagaaggaaaggtccttaattattatagtctaaacaaatttatagattactgtttgaagtaaataatacgagtgaatattttcaaatgtgataaaatagcacaagtggctggtgataaaatttgaaattatggttaacctcagctgtgatcttatgtatgtaaagtgaaatttaaatagataattataggttgattacaaaatccatagtgtcattttattttagtcattattgaattataccatttactctgttttcttatagtcttaattttattatattttgttgttactgtattatatttgaaaaccttcaaattagaatacattgtacagttaaagaaattgacttggtacttaaaagaaagatttcccattgcatacaggttattggagaaattttccttttgttgcatttgtggaagttagttttctggcccgtggcctttaattttcttaatcaacctaattacatcaggatagaggtagagtttctgtaaaagaagagacattaagagttcctgaaatttatatctggcatacggataggcttatattcaaaacatcttagtcatacgaccataaattaaaagtggagtcactaaatagtttgcagtacgtttctaatataagtgtaggtgggtatcaaaacaagacaaatgctgttcagggaaagaagttggcaagcttaaggttaaacaaaaataaaattacatgtgttttcgccttcctagctccctgtcattcctaaatacttggttaaatttaacgtggtatctctttccttcatagatagtactatactcttgtggggttttgtgtatacgtgtgtgtgtgtgtgtgtgtgtgtgtgtgtgtgtgtgtgtgtgtgcacgcgcatgcgcacatttgctcagaatgagaaaaaaatggtatttttccttctttccagtatatttctcccctcatagagctgtaacatgaatactaaataaatattaaataaggtggattctta

SEQ ID NO: 17732 - protein, 116 aa, Homo sapiens; identical to SEQ ID NO: 2118

SEQ ID NO: 17733 - DNA, 1966 bp, Homo sapiens
agggagtgttgctactgatggaacaaaaccaaaccacttggaattaacgcacaatttaaagagatggggtttgaccttgttgtccaggctggtttcaaactcctgagttcgagcaatctacccacccttcaaagtgttgggatcacagatattttaccattacaatatagatggagattttcatctattaataaaagatgttctctattcacaaatggaaatggagcaacagtacacaatttctgccccagaattcatggctggtgcagatggaaatattggcatagttccagaggagttaaaggactcacccaggccgtacagctgaggctaagaatattgtacacaaagattcttgatgttcttgaggaaatccctaaaaatgcagcatatagaaagtatacagaacagattacaaatgagaagctggctatggttaaagcggaaccagatgttaaaaaattagaagaccaacttcaaggcggtcaattagaagaggtgattcttcaggctgaacatgaactaaatctggcaagaaaaatgagggaatggaaactatgggagccattagtggaagagcctcctgccgatcagtggaaatggccaatataattattaagtgactttggtgtgttcatgggaaactgatgtaattaaatattctgttatattaagagcgtgttcttattactgacattttgtaatcaagaaaagtgatatagaaaatatgtaggagactgttaaaattggtgattatggtaatatggtcatgtgaatcaatttttgatttataaagtactcacacaagttgtttcaaagatgatatttctgtgaacagagaggccatgggaagatttgaaaattattaaagaaaaattcctacagattttcaatgcagagaccataatcaaaaagtaaactttctttagtagtatgttcaatacatcatttaattttttaagttatcctgaagaaggaaaggtccttaattattatagtctaaacaaatttatagattactgtttgaagtaaataatacgagtgaatattttcaaatgtgataaaatagcacaagtggctggtgataaaatttgaaattatggttaacctcagctgtgatcttatgtatgtaaagtgaaatttaaatagataattataggttgattacaaaatccatagtgtcattttattttagtcattattgaattataccatttactctgttttcttatagtcttaattttattatattttgttgttactgtattatatttgaaaaccttcaaattagaatacattgtacagttaaagaaattgacttggtacttaaaagaaagatttcccattgcatacaggttattggagaaattttccttttgttgcatttgtggaagttagttttctggcccgtggcctttaattttcttaatcaacctaattacatcaggatagaggtagagtttctgtaaaagaagagacattaagagttcctgaaatttatatctggcatacggataggcttatattcaaaacatcttagtcatacgaccataaattaaaagtggagtcactaaatagtttgcagtacgtttctaatataagtgtaggtgggtatcaaaacaagacaaatgctgttcagggaaagaagttggcaagcttaaggttaaacaaaaataaaattacatgtgttttcgccttcctagctccctgtcattcctaaatacttggttaaatttaacgtggtatctctttccttcatagatagtactatactcttgtggggttttgtgtatacgtgtgtgtgtgtgtgtgtgtgtgtgtgtgtgtgtgtgtgtgtgtgcacgcgcatgcgcacatttgctcagaatgagaaaaaaatggtatttttccttctttccagtatatttctcccctcatagagctgtaacatgaatactaaataaatattaaataaggtggattctta

SEQ ID NO: 17734 - protein, 182 aa, Homo sapiens
MGFDLVVQAGFKLLSSSNLPTLQSVGITDILPLQYRWRFSSINKRCSLFTNGNGATVHNFCPRIHGWCRWKYWHSSRGVKGLTQAVQLRLRILYTKILDVLEEIPKNAAYRKYTEQITNEKLAMVKAEPDVKKLEDQLQGGQLEEVILQAEHELNLARKMREWKLWEPLVEEPPADQWKWPI

SEQ ID NO: 17735 - DNA, 1941 bp, Homo sapiens
aattcagctgcagggagtgttgctactgatggaacaaaaccaaaccacttggaattaacgcacaatttaaagagatggggtttgaccttgttgtccaggctggtttcaaactcctgagttcgagcaatctacccacccttcaaagtgttgggatcacaggtgactcttagaatcatctagtcaaaatggaattgtgactatggaaatattggcatagttccagaggagttaaaggactcacccaggccgtacagctgaccactggccttgtgggattggctgtgtgcaatactcctcacgagaggctaagaatattgtacacaaagattcttgatgttcttgaggaaatccctaaaaatgcagcatatagaaagtatacagaacagattacaaatgagaagctggctatggttaaagcggaaccagatgttaaaaaattagaagaccaacttcaaggcggtcaattagaagaggtgattcttcaggctgaacatgaactaaatctggcaagaaaaatgagggaatggaaactatgggagccattagtggaagagcctcctgccgatcagtggaaatggccaatataattattaagtgactttggtgtgttcatgggaaactgatgtaattaaatattctgttatattaagagcgtgttcttattactgacattttgtaatcaagaaaagtgatatagaaaatatgtaggagactgttaaaattggtgattatggtaatatggtcatgtgaatcaatttttgatttataaagtactcacacaagttgtttcaaagatgatatttctgtgaacagagaggccatgggaagatttgaaaattattaaagaaaaattcctacagattttcaatgcagagaccataatcaaaaagtaaactttctttagtagtatgttcaatacatcatttaattttttaagttatcctgaagaaggaaaggtccttaattattatagtctaaacaaatttatagattactgtttgaagtaaataatacgagtgaatattttcaaatgtgataaaatagcacaagtggctggtgataaaatttgaaattatggttaacctcagctgtgatcttatgtatgtaaagtgaaatttaaatagataattataggttgattacaaaatccatagtgtcattttattttagtcattattgaattataccatttactctgttttcttatagtcttaattttattatattttgttgttactgtattatatttgaaaaccttcaaattagaatacattgtacagttaaagaaattgacttggtacttaaaagaaagatttcccattgcatacaggttattggagaaattttccttttgttgcatttgtggaagttagttttctggcccgtggcctttaattttcttaatcaacctaattacatcaggatagaggtagagtttctgtaaaagaagagacattaagagttcctgaaatttatatctggcatacggataggcttatattcaaaacatcttagtcatacgaccataaattaaaagtggagtcactaaatagtttgcagtacgtttctaatataagtgtaggtgggtatcaaaacaagacaaatgctgttcagggaaagaagttggcaagcttaaggttaaacaaaaataaaattacatgtgttttcgccttcctagctccctgtcattcctaaatacttggttaaatttaacgtggtatctctttccttcatagatagtactatactcttgtggggttttgtgtatacgtgtgtgtgtgtgtgtgtgtgtgtgtgtgtgtgtgtgtgtgtgtgcacgcgcatgcgcacatttgctcagaatgagaaaaaaatggtatttttccttctttccagtatatttctcccctcatagagctgtaacatgaatactaaataaatattaaataaggtggattctta

SEQ ID NO: 17736 - protein, 59 aa, Homo sapiens; identical to SEQ ID NO: 17728

SEQ ID NO: 17737 - DNA, 1411 bp, Homo sapiens
tgaattttcaccaaatatttagtaaaaagagtatgatgaaagaaaagttgtatttttaagtgtttttatataggaattttaaaatatataggatattgaaacattcagttagtatgcttctttaattttttttctccctgaaattataggaaccagatgttaaaaaattagaagaccaacttcaaggcggtcaattagaagaggtgattcttcaggctgaacatgaactaaatctggcaagaaaaatgagggaatggaaactatgggagccattagtggaagagcctcctgccgatcagtggaaatggccaatataattattaagtgactttggtgtgttcatgggaaactgatgtaattaaatattctgttatattaagagcgtgttcttattactgacattttgtaatcaagaaaagtgatatagaaaatatgtaggagactgttaaaattggtgattatggtaatatggtcatgtgaatcaatttttgatttataaagtactcacacaagttgtttcaaagatgatatttctgtgaacagagaggccatgggaagatttgaaaattattaaagaaaaattcctacagattttcaatgcagagaccataatcaaaaagtaaactttctttagtagtatgttcaatacatcatttaattttttaagttatcctgaagaaggaaaggtccttaattattatagtctaaacaaatttatagattactgtttgaagtaaataatacgagtgaatattttcaaatgtgataaaatagcacaagtggctggtgataaaatttgaaattatggttaacctcagctgtgatcttatgtatgtaaagtgaaatttaaatagataattataggttgattacaaaatccatagtgtcattttattttagtcattattgaattataccatttactctgttttcttatagtcttaattttattatattttgttgttactgtattatatttgaaaaccttcaaattagaatacattgtacagttaaagaaattgacttggtacttaaaagaaagatttcccattgcatacaggttattggagaaattttccttttgttgcatttgtggaagttagttttctggcccgtggcctttaattttcttaatcaacctaattacatcaggatagaggtagagtttctgtaaaagaagagacattaagagttcctgaaatttatatctggcatacggataggcttatattcaaaacatcttagtcatacgaccataaattaaaagtggagtcactaaatagtttgcagtacgtttctaatataagtgtaggtgggtatcaaaacaagacaaatgctgttcagggaaagaagttggcaagcttaaggttaaacaaaaataaaattacatgtgttttcgccttcctagctc

SEQ ID NO: 17738 - protein, 32 aa, Homo sapiens; identical to SEQ ID NO: 17714

SEQ ID NO: 17739 - DNA, 1303 bp, Homo sapiens
ccagaaaaacaccctgaaaagacaaagccttatttacatatgaaccagatgttaaaaaattagaagaccaacttcaaggcggtcaattagaagaggtgattcttcaggctgaacatgaactaaatctggcaagaaaaatgagggaatggaaactatgggagccattagtggaagagcctcctgccgatcagtggaaatggccaatataattattaagtgactttggtgtgttcatgggaaactgatgtaattaaatattctgttatattaagagcgtgttcttattactgacattttgtaatcaagaaaagtgatatagaaaatatgtaggagactgttaaaattggtgattatggtaatatggtcatgtgaatcaatttttgatttataaagtactcacacaagttgtttcaaagatgatatttctgtgaacagagaggccatgggaagatttgaaaattattaaagaaaaattcctacagattttcaatgcagagaccataatcaaaaagtaaactttctttagtagtatgttcaatacatcatttaattttttaagttatcctgaagaaggaaaggtccttaattattatagtctaaacaaatttatagattactgtttgaagtaaataatacgagtgaatattttcaaatgtgataaaatagcacaagtggctggtgataaaatttgaaattatggttaacctcagctgtgatcttatgtatgtaaagtgaaatttaaatagataattataggttgattacaaaatccatagtgtcattttattttagtcattattgaattataccatttactctgttttcttatagtcttaattttattatattttgttgttactgtattatatttgaaaaccttcaaattagaatacattgtacagttaaagaaattgacttggtacttaaaagaaagatttcccattgcatacaggttattggagaaattttccttttgttgcatttgtggaagttagttttctggcccgtggcctttaattttcttaatcaacctaattacatcaggatagaggtagagtttctgtaaaagaagagacattaagagttcctgaaatttatatctggcatacggataggcttatattcaaaacatcttagtcatacgaccataaattaaaagtggagtcactaaatagtttgcagtacgtttctaatataagtgtaggtgggtatcaaaacaagacaaatgctgttcagggaaagaagttggcaagcttaaggttaaacaaaaataaaattacatgtgttttcgccttcctagctc

SEQ ID NO: 17740 - protein, 32 aa, Homo sapiens; identical to SEQ ID NO: 17714

SEQ ID NO: 17741 - DNA, 1611 bp, Homo sapiens
gctgtcatggcgggtgtgctgaagaagaccactggccttgtgggattggctgtgtgcaatactcctcacgagaggctaagaatattgtacacaaagattcttgatgttcttgaggaaatccctaaaaatgcagcatatagaaagtatacagaacagattacaaatgagaagctggctatggttaaagcgcctatcataatgcaaattatcagtagttaatcaataagaaggtgttatttgagcaaagatttgaaaagtggtgaagaaacaagtgatgcagataccctgggccatccagcaagataccctgaggcagtaacatatcacgtcttgtgttgaaaagcaaaatgaaccagatgttaaaaaattagaagaccaacttcaaggcggtcaattagaagaggtgattcttcaggctgaacatgaactaaatctggcaagaaaaatgagggaatggaaactatgggagccattagtggaagagcctcctgccgatcagtggaaatggccaatataattattaagtgactttggtgtgttcatgggaaactgatgtaattaaatattctgttatattaagagcgtgttcttattactgacattttgtaatcaagaaaagtgatatagaaaatatgtaggagactgttaaaattggtgattatggtaatatggtcatgtgaatcaatttttgatttataaagtactcacacaagttgtttcaaagatgatatttctgtgaacagagaggccatgggaagatttgaaaattattaaagaaaaattcctacagattttcaatgcagagaccataatcaaaaagtaaactttctttagtagtatgttcaatacatcatttaattttttaagttatcctgaagaaggaaaggtccttaattattatagtctaaacaaatttatagattactgtttgaagtaaataatacgagtgaatattttcaaatgtgataaaatagcacaagtggctggtgataaaatttgaaattatggttaacctcagctgtgatcttatgtatgtaaagtgaaatttaaatagataattataggttgattacaaaatccatagtgtcattttattttagtcattattgaattataccatttactctgttttcttatagtcttaattttattatattttgttgttactgtattatatttgaaaaccttcaaattagaatacattgtacagttaaagaaattgacttggtacttaaaagaaagatttcccattgcatacaggttattggagaaattttccttttgttgcatttgtggaagttagttttctggcccgtggcctttaattttcttaatcaacctaattacatcaggatagaggtagagtttctgtaaaagaagagacattaagagttcctgaaatttatatctggcatacggataggcttatattcaaaacatcttagtcatacgaccataaattaaaagtggagtcactaaatagtttgcagtacgtttctaatataagtgtaggtgggtatcaaaacaagacaaatgctgttcagggaaagaagttggcaagcttaaggttaaacaaaaataaaattacatgtgttttcgccttcctagctc

SEQ ID NO: 17742 - protein, 70 aa, Homo sapiens; identical to SEQ ID NO: 17718

SEQ ID NO: 17743 - DNA, 1309 bp, Homo sapiens
ggcgctgtcatggcgggtgtgctgaagaagaccactggccttgtgggattggctgtgtgcaatactcctcacgagaggctaagaatattgtacacaaagattcttgatgttcttgaggaaatccctaaaaatgcagcatatagaaagtatacagaacagattacaaatgagaagctggctatggttaaagcgatcagtggaaatggccaatataattattaagtgactttggtgtgttcatgggaaactgatgtaattaaatattctgttatattaagagcgtgttcttattactgacattttgtaatcaagaaaagtgatatagaaaatatgtaggagactgttaaaattggtgattatggtaatatggtcatgtgaatcaatttttgatttataaagtactcacacaagttgtttcaaagatgatatttctgtgaacagagaggccatgggaagatttgaaaattattaaagaaaaattcctacagattttcaatgcagagaccataatcaaaaagtaaactttctttagtagtatgttcaatacatcatttaattttttaagttatcctgaagaaggaaaggtccttaattattatagtctaaacaaatttatagattactgtttgaagtaaataatacgagtgaatattttcaaatgtgataaaatagcacaagtggctggtgataaaatttgaaattatggttaacctcagctgtgatcttatgtatgtaaagtgaaatttaaatagataattataggttgattacaaaatccatagtgtcattttattttagtcattattgaattataccatttactctgttttcttatagtcttaattttattatattttgttgttactgtattatatttgaaaaccttcaaattagaatacattgtacagttaaagaaattgacttggtacttaaaagaaagatttcccattgcatacaggttattggagaaattttccttttgttgcatttgtggaagttagttttctggcccgtggcctttaattttcttaatcaacctaattacatcaggatagaggtagagtttctgtaaaagaagagacattaagagttcctgaaatttatatctggcatacggataggcttatattcaaaacatcttagtcatacgaccataaattaaaagtggagtcactaaatagtttgcagtacgtttctaatataagtgtaggtgggtatcaaaacaagacaaatgctgttcagggaaagaagttggcaagcttaaggttaaacaaaaataaaattacatgtgttttcgccttcctagctc

SEQ ID NO: 17744 - protein, 70 aa, Homo sapiens; identical to SEQ ID NO: 17720

SEQ ID NO: 17745 - DNA, 976 bp, Homo sapiens
ggcgctgtcatggcgggtgtgctgaagaagaccactggccttgtgggattggctgtgtgcaatactcctcacgagaggctaagaatattgtacacaaagattcttgatgttcttgaggaaatccctaaaaatgcagcatatagaaagtatacagaacagattacaaatgagaagctggctatggttaaagcggaaccagatgttaaaaaattagaagaccaacttcaaggcggtcaattagaagaggaaaggtccttaattattatagtctaaacaaatttatagattactgtttgaagtaaataatacgagtgaatattttcaaatgtgataaaatagcacaagtggctggtgataaaatttgaaattatggttaacctcagctgtgatcttatgtatgtaaagtgaaatttaaatagataattataggttgattacaaaatccatagtgtcattttattttagtcattattgaattataccatttactctgttttcttatagtcttaattttattatattttgttgttactgtattatatttgaaaaccttcaaattagaatacattgtacagttaaagaaattgacttggtacttaaaagaaagatttcccattgcatacaggttattggagaaattttccttttgttgcatttgtggaagttagttttctggcccgtggcctttaattttcttaatcaacctaattacatcaggatagaggtagagtttctgtaaaagaagagacattaagagttcctgaaatttatatctggcatacggataggcttatattcaaaacatcttagtcatacgaccataaattaaaagtggagtcactaaatagtttgcagtacgtttctaatataagtgtaggtgggtatcaaaacaagacaaatgctgttcagggaaagaagttggcaagcttaaggttaaacaaaaataaaattacatgtgttttcgccttcctagctc

SEQ ID NO: 17746 - protein, 87 aa, Homo sapiens; identical to SEQ ID NO: 17722

SEQ ID NO: 17747 - DNA, 1348 bp, Homo sapiens
accgagtcgttggcgctgtcatggcgggtgtgctgaagaagaccactggccttgtgggattggctgtgtgcaatactcctcacgaggaaccagatgttaaaaaattagaagaccaacttcaaggcggtcaattagaagaggtgattcttcaggctgaacatgaactaaatctggcaagaaaaatgagggaatggaaactatgggagccattagtggaagagcctcctgccgatcagtggaaatggccaatataattattaagtgactttggtgtgttcatgggaaactgatgtaattaaatattctgttatattaagagcgtgttcttattactgacattttgtaatcaagaaaagtgatatagaaaatatgtaggagactgttaaaattggtgattatggtaatatggtcatgtgaatcaatttttgatttataaagtactcacacaagttgtttcaaagatgatatttctgtgaacagagaggccatgggaagatttgaaaattattaaagaaaaattcctacagattttcaatgcagagaccataatcaaaaagtaaactttctttagtagtatgttcaatacatcatttaattttttaagttatcctgaagaaggaaaggtccttaattattatagtctaaacaaatttatagattactgtttgaagtaaataatacgagtgaatattttcaaatgtgataaaatagcacaagtggctggtgataaaatttgaaattatggttaacctcagctgtgatcttatgtatgtaaagtgaaatttaaatagataattataggttgattacaaaatccatagtgtcattttattttagtcattattgaattataccatttactctgttttcttatagtcttaattttattatattttgttgttactgtattatatttgaaaaccttcaaattagaatacattgtacagttaaagaaattgacttggtacttaaaagaaagatttcccattgcatacaggttattggagaaattttccttttgttgcatttgtggaagttagttttctggcccgtggcctttaattttcttaatcaacctaattacatcaggatagaggtagagtttctgtaaaagaagagacattaagagttcctgaaatttatatctggcatacggataggcttatattcaaaacatcttagtcatacgaccataaattaaaagtggagtcactaaatagtttgcagtacgtttctaatataagtgtaggtgggtatcaaaacaagacaaatgctgttcagggaaagaagttggcaagcttaaggttaaacaaaaataaaattacatgtgttttcgccttcctagctc

SEQ ID NO: 17748 - protein, 77 aa, Homo sapiens; identical to SEQ ID NO: 17724

SEQ ID NO: 17749 - DNA, 1423 bp, Homo sapiens
gtcaccgagtcgttggcgctgtcatggcgggtgtgctgaagaagaggctaagaatattgtacacaaagattcttgatgttcttgaggaaatccctaaaaatgcagcatatagaaagtatacagaacagattacaaatgagaagctggctatggttaaagcggaaccagatgttaaaaaattagaagaccaacttcaaggcggtcaattagaagaggtgattcttcaggctgaacatgaactaaatctggcaagaaaaatgagggaatggaaactatgggagccattagtggaagagcctcctgccgatcagtggaaatggccaatataattattaagtgactttggtgtgttcatgggaaactgatgtaattaaatattctgttatattaagagcgtgttcttattactgacattttgtaatcaagaaaagtgatatagaaaatatgtaggagactgttaaaattggtgattatggtaatatggtcatgtgaatcaatttttgatttataaagtactcacacaagttgtttcaaagatgatatttctgtgaacagagaggccatgggaagatttgaaaattattaaagaaaaattcctacagattttcaatgcagagaccataatcaaaaagtaaactttctttagtagtatgttcaatacatcatttaattttttaagttatcctgaagaaggaaaggtccttaattattatagtctaaacaaatttatagattactgtttgaagtaaataatacgagtgaatattttcaaatgtgataaaatagcacaagtggctggtgataaaatttgaaattatggttaacctcagctgtgatcttatgtatgtaaagtgaaatttaaatagataattataggttgattacaaaatccatagtgtcattttattttagtcattattgaattataccatttactctgttttcttatagtcttaattttattatattttgttgttactgtattatatttgaaaaccttcaaattagaatacattgtacagttaaagaaattgacttggtacttaaaagaaagatttcccattgcatacaggttattggagaaattttccttttgttgcatttgtggaagttagttttctggcccgtggcctttaattttcttaatcaacctaattacatcaggatagaggtagagtttctgtaaaagaagagacattaagagttcctgaaatttatatctggcatacggataggcttatattcaaaacatcttagtcatacgaccataaattaaaagtggagtcactaaatagtttgcagtacgtttctaatataagtgtaggtgggtatcaaaacaagacaaatgctgttcagggaaagaagttggcaagcttaaggttaaacaaaaataaaattacatgtgttttcgccttcctagctc

SEQ ID NO: 17750 - protein, 101 aa, Homo sapiens; identical to SEQ ID NO: 17726

SEQ ID NO: 17751 - DNA, 1677 bp, Homo sapiens
gtcaccgagtcgttggcgctgtcatggcgggtgtgctgaagaagaccactggccttgtgggattggctgtgtgcaatactcctcacgagaaattcaaataagaaaaattaaaaaaaaaaatttgcagtgcttcggacctcactttgaaaaatactgattcaggctgggtgggctcacgcctgtaatcccagcactttgggaggctgaggtgggcggatcacctgaagtcaggagtttgagaccatcctggccaacatggcaaaaccctgtctctactaaaaatagaaaaaatagccagaggctaagaatattgtacacaaagattcttgatgttcttgaggaaatccctaaaaatgcagcatatagaaagtatacagaacagattacaaatgagaagctggctatggttaaagcggaaccagatgttaaaaaattagaagaccaacttcaaggcggtcaattagaagaggtgattcttcaggctgaacatgaactaaatctggcaagaaaaatgagggaatggaaactatgggagccattagtggaagagcctcctgccgatcagtggaaatggccaatataattattaagtgactttggtgtgttcatgggaaactgatgtaattaaatattctgttatattaagagcgtgttcttattactgacattttgtaatcaagaaaagtgatatagaaaatatgtaggagactgttaaaattggtgattatggtaatatggtcatgtgaatcaatttttgatttataaagtactcacacaagttgtttcaaagatgatatttctgtgaacagagaggccatgggaagatttgaaaattattaaagaaaaattcctacagattttcaatgcagagaccataatcaaaaagtaaactttctttagtagtatgttcaatacatcatttaattttttaagttatcctgaagaaggaaaggtccttaattattatagtctaaacaaatttatagattactgtttgaagtaaataatacgagtgaatattttcaaatgtgataaaatagcacaagtggctggtgataaaatttgaaattatggttaacctcagctgtgatcttatgtatgtaaagtgaaatttaaatagataattataggttgattacaaaatccatagtgtcattttattttagtcattattgaattataccatttactctgttttcttatagtcttaattttattatattttgttgttactgtattatatttgaaaaccttcaaattagaatacattgtacagttaaagaaattgacttggtacttaaaagaaagatttcccattgcatacaggttattggagaaattttccttttgttgcatttgtggaagttagttttctggcccgtggcctttaattttcttaatcaacctaattacatcaggatagaggtagagtttctgtaaaagaagagacattaagagttcctgaaatttatatctggcatacggataggcttatattcaaaacatcttagtcatacgaccataaattaaaagtggagtcactaaatagtttgcagtacgtttctaatataagtgtaggtgggtatcaaaacaagacaaatgctgttcagggaaagaagttggcaagcttaaggttaaacaaaaataaaattacatgtgttttcgccttcctagctc

SEQ ID NO: 17752 - protein, 59 aa, Homo sapiens; identical to SEQ ID NO: 17728

SEQ ID NO: 17753 - DNA, 1270 bp, Homo sapiens
gtgcgtcaccgagtcgttggcgctgtcatggcgggtgtgctgaagaagaccactggccttgtgggattggctgtgtgcaatactcctcacgagaggctaagaatattgtacacaaagattcttgatgttcttgaggaaatccctaaaaatgcagcatatagaaagtatacagaacagattacaaatgagaagctggctatggttaaagcggaaccagatgttaaaaaattagaagaccaacttcaaggcggtcaattagaagaggtgattcttcaggctgaacatgaactaaatctggcaagaaaaatgagggaatggaaactatgggagccattagtggaagagcctcctgccgatcagtggaaatggccaatataattattaagtgactttggtgtgttcatgggaaactgatgtaattaaatattctgttatattaagagcgtgttcttattactgacattttgtaatcaagaaaataaactttctttagtagtatgttcaatacatcatttaattttttaagttatcctgaagaaggaaaggtccttaattattatagtctaaacaaatttatagattactgtttgaagtaaataatacgagtgaatattttcaaatgtgataaaatagcacaagtggctggtgataaaatttgaaattatggttaacctcagctgtgatcttatgtatgtaaagtgaaatttaaatagataattataggttgattacaaaatccatagtgtcattttattttagtcattattgaattataccatttactctgttttcttatagtcttaattttattatattttgttgttactgtattatatttgaaaaccttcaaattagaatacattgtacagttaaagaaattgacttggtacttaaaagaaagatttcccattgcatacaggttattggagaaattttccttttgttgcatttgtggaagttagttttctggcccgtggcctttaattttcttaatcaacctaattacatcaggatagaggtagagtttctgtaaaagaagagacattaagagttcctgaaatttatatctggcatacggataggcttatattcaaaacatcttagtcatacgaccataaattaaaagtggagtcactaaatagtttgcagtacgtttctaatataagtgtaggtgggtatcaaaacaagacaaatgctgttcagggaaagaagttggcaagcttaaggttaaacaaaaataaaattacatgtgttttcgccttcctagctc

SEQ ID NO: 17754 - protein, 116 aa, Homo sapiens; identical to SEQ ID NO: 2118

SEQ ID NO: 17755 - DNA, 1554 bp, Homo sapiens
tggagctaagctgtttccagggtgacagagtggcgacctcggtggtcgattgagcaggtctgagaattgttcccaaagggttgtgcgtcaccgagtcgttggcgctgtcatggcgggtgtgctgaagaagaccactggccttgtgggattggctgtgtgcaatactcctcacgagaggctaagaatattgtacacaaagattcttgatgttcttgaggaaatccctaaaaatgcagcatatagaaagtatacagaacagattacaaatgagaagctggctatggttaaagcggaaccagatgttaaaaaattagaagaccaacttcaaggcggtcaattagaagaggtgattcttcaggctgaacatgaactaaatctggcaagaaaaatgagggaatggaaactatgggagccattagtggaagagcctcctgccgatcagtggaaatggccaatataattattaagtgactttggtgtgttcatgggaaactgatgtaattaaatattctgttatattaagagcgtgttcttattactgacattttgtaatcaagaaaagtgatatagaaaatatgtaggagactgttaaaattggtgattatggtaatatggtcatgtgaatcaatttttgatttataaagtactcacacaagttgtttcaaagatgatatttctgtgaacagagaggccatgggaagatttgaaaattattaaagaaaaattcctacagattttcaatgcagagaccataatcaaaaagtaaactttctttagtagtatgttcaatacatcatttaattttttaagttatcctgaagaaggaaaggtccttaattattatagtctaaacaaatttatagattactgtttgaagtaaataatacgagtgaatattttcaaatgtgataaaatagcacaagtggctggtgataaaatttgaaattatggttaacctcagctgtgatcttatgtatgtaaagtgaaatttaaatagataattataggttgattacaaaatccatagtgtcattttattttagtcattattgaattataccatttactctgttttcttatagtcttaattttattatattttgttgttactgtattatatttgaaaaccttcaaattagaatacattgtacagttaaagaaattgacttggtacttaaaagaaagatttcccattgcatacaggttattggagaaattttccttttgttgcatttgtggaagttagttttctggcccgtggcctttaattttcttaatcaacctaattacatcaggatagaggtagagtttctgtaaaagaagagacattaagagttcctgaaatttatatctggcatacggataggcttatattcaaaacatcttagtcatacgaccataaattaaaagtggagtcactaaatagtttgcagtacgtttctaatataagtgtaggtgggtatcaaaacaagacaaatgctgttcagggaaagaagttggcaagcttaaggttaaacaaaaataaaattacatgtgttttcgccttcctagctc

SEQ ID NO: 17756 - protein, 116 aa, Homo sapiens; identical to SEQ ID NO: 2118

SEQ ID NO: 17757 - DNA, 1706 bp, Homo sapiens
agggagtgttgctactgatggaacaaaaccaaaccacttggaattaacgcacaatttaaagagatggggtttgaccttgttgtccaggctggtttcaaactcctgagttcgagcaatctacccacccttcaaagtgttgggatcacagatattttaccattacaatatagatggagattttcatctattaataaaagatgttctctattcacaaatggaaatggagcaacagtacacaatttctgccccagaattcatggctggtgcagatggaaatattggcatagttccagaggagttaaaggactcacccaggccgtacagctgaggctaagaatattgtacacaaagattcttgatgttcttgaggaaatccctaaaaatgcagcatatagaaagtatacagaacagattacaaatgagaagctggctatggttaaagcggaaccagatgttaaaaaattagaagaccaacttcaaggcggtcaattagaagaggtgattcttcaggctgaacatgaactaaatctggcaagaaaaatgagggaatggaaactatgggagccattagtggaagagcctcctgccgatcagtggaaatggccaatataattattaagtgactttggtgtgttcatgggaaactgatgtaattaaatattctgttatattaagagcgtgttcttattactgacattttgtaatcaagaaaagtgatatagaaaatatgtaggagactgttaaaattggtgattatggtaatatggtcatgtgaatcaatttttgatttataaagtactcacacaagttgtttcaaagatgatatttctgtgaacagagaggccatgggaagatttgaaaattattaaagaaaaattcctacagattttcaatgcagagaccataatcaaaaagtaaactttctttagtagtatgttcaatacatcatttaattttttaagttatcctgaagaaggaaaggtccttaattattatagtctaaacaaatttatagattactgtttgaagtaaataatacgagtgaatattttcaaatgtgataaaatagcacaagtggctggtgataaaatttgaaattatggttaacctcagctgtgatcttatgtatgtaaagtgaaatttaaatagataattataggttgattacaaaatccatagtgtcattttattttagtcattattgaattataccatttactctgttttcttatagtcttaattttattatattttgttgttactgtattatatttgaaaaccttcaaattagaatacattgtacagttaaagaaattgacttggtacttaaaagaaagatttcccattgcatacaggttattggagaaattttccttttgttgcatttgtggaagttagttttctggcccgtggcctttaattttcttaatcaacctaattacatcaggatagaggtagagtttctgtaaaagaagagacattaagagttcctgaaatttatatctggcatacggataggcttatattcaaaacatcttagtcatacgaccataaattaaaagtggagtcactaaatagtttgcagtacgtttctaatataagtgtaggtgggtatcaaaacaagacaaatgctgttcagggaaagaagttggcaagcttaaggttaaacaaaaataaaattacatgtgttttcgccttcctagctc

SEQ ID NO: 17758 - protein, 182 aa, Homo sapiens; identical to SEQ ID NO: 17734

SEQ ID NO: 17759 - DNA, 1681 bp, Homo sapiens
aattcagctgcagggagtgttgctactgatggaacaaaaccaaaccacttggaattaacgcacaatttaaagagatggggtttgaccttgttgtccaggctggtttcaaactcctgagttcgagcaatctacccacccttcaaagtgttgggatcacaggtgactcttagaatcatctagtcaaaatggaattgtgactatggaaatattggcatagttccagaggagttaaaggactcacccaggccgtacagctgaccactggccttgtgggattggctgtgtgcaatactcctcacgagaggctaagaatattgtacacaaagattcttgatgttcttgaggaaatccctaaaaatgcagcatatagaaagtatacagaacagattacaaatgagaagctggctatggttaaagcggaaccagatgttaaaaaattagaagaccaacttcaaggcggtcaattagaagaggtgattcttcaggctgaacatgaactaaatctggcaagaaaaatgagggaatggaaactatgggagccattagtggaagagcctcctgccgatcagtggaaatggccaatataattattaagtgactttggtgtgttcatgggaaactgatgtaattaaatattctgttatattaagagcgtgttcttattactgacattttgtaatcaagaaaagtgatatagaaaatatgtaggagactgttaaaattggtgattatggtaatatggtcatgtgaatcaatttttgatttataaagtactcacacaagttgtttcaaagatgatatttctgtgaacagagaggccatgggaagatttgaaaattattaaagaaaaattcctacagattttcaatgcagagaccataatcaaaaagtaaactttctttagtagtatgttcaatacatcatttaattttttaagttatcctgaagaaggaaaggtccttaattattatagtctaaacaaatttatagattactgtttgaagtaaataatacgagtgaatattttcaaatgtgataaaatagcacaagtggctggtgataaaatttgaaattatggttaacctcagctgtgatcttatgtatgtaaagtgaaatttaaatagataattataggttgattacaaaatccatagtgtcattttattttagtcattattgaattataccatttactctgttttcttatagtcttaattttattatattttgttgttactgtattatatttgaaaaccttcaaattagaatacattgtacagttaaagaaattgacttggtacttaaaagaaagatttcccattgcatacaggttattggagaaattttccttttgttgcatttgtggaagttagttttctggcccgtggcctttaattttcttaatcaacctaattacatcaggatagaggtagagtttctgtaaaagaagagacattaagagttcctgaaatttatatctggcatacggataggcttatattcaaaacatcttagtcatacgaccataaattaaaagtggagtcactaaatagtttgcagtacgtttctaatataagtgtaggtgggtatcaaaacaagacaaatgctgttcagggaaagaagttggcaagcttaaggttaaacaaaaataaaattacatgtgttttcgccttcctagctc

SEQ ID NO: 17760 - protein, 59 aa, Homo sapiens; identical to SEQ ID NO: 17728

SEQ ID NO: 17761 - DNA, 376 bp, Homo sapiens
agaaattcaaataagaaaaattaaaaaaaaaaatttgcagtgcttcggacctcactttgaaaaatactgattcaggctgggtgggctcacgcctgtaatcccagcactttgggaggctgaggtgggcggatcacctgaagtcaggagtttgagaccatcctggccaacatggcaaaaccctgtctctactaaaaatagaaaaaatagccagaggctaagaatattgtacacaaagattcttgatgttcttgaggaaatccctaaaaatgcagcatatagaaagtatacagaacagattacaaatgagaagctggctatggttaaagcggaaccagatgttaaaaaattagaagaccaacttcaaggcggtcaatta

SEQ ID NO: 17762 - protein, 35 aa, Homo sapiens
MFLRKSLKMQHIESIQNRLQMRSWLWLKRNQMLKN

SEQ ID NO: 17763 - DNA, 604 bp, Homo sapiens
ggcgctgtcatggcgggtgtgctgaagaagaccactggccttgtgggattggctgtgtgcaatactcctcacgagaaattcaaataagaaaaattaaaaaaaaaaatttgcagtgcttcggacctcactttgaaaaatactgattcaggctgggtgggctcacgcctgtaatcccagcactttgggaggctgaggtgggcggatcacctgaagtcaggagtttgagaccatcctggccaacatggcaaaaccctgtctctactaaaaatagaaaaaatagccagaggctaagaatattgtacacaaagattcttgatgttcttgaggaaatccctaaaaatgcagcatatagaaagtatacagaacagattacaaatgagaagctggctatggttaaagcggtaagtagctaagtcagttttgttgtcttgtgtaacatttaaccaaaaaagtttagttccttattttttatatattcgacacacttttcttctattctccttccttgaatgctcttttcccatcattcctcccttttattcagcaaactcttgtttattgagtgttttctatatgcaggcctctgttacatactggagtttga

SEQ ID NO: 17764 - protein, 30 aa, Homo sapiens
MLFSHHSSLLFSKLLFIECFLYAGLCYILE

SEQ ID NO: 17765 - DNA, 828 bp, Homo sapiens
cgctgtcatggcgggtgtgctgaagaagaccactggccttgtgggattggctgtgtgcaatactcctcacgaggtatgtacctttgttctttcttcgttcttgaattcccaaggaagactaaattcctgtcactttgcttattgcagggttaacgggatacagatgtttcaagcccttaattacaagccgcgtgagctcttgagacacgggcgctgtccacctacttcgttgatccgatgtcacatttttatttatttttgccatgacctctttattaagccagttttcttgttgactttttccttgacattttcatggcttcacttgtgcttgcttctgtcagcgccatctcaaatttatatctccgttttccatcttttctccttgccttaccgtttctgcttaggtgcgttggattacatatatttaggcttactaaaggtactgcccccttttccttctgttaggtcttttccatctgtattcacgaatgttttcatcaaaaaaacccacaaaatttttttattcttcttgtcccttctataatcacaccatttctttgcttcactttacagataactcaaaagagttatctctattttctccaatttctttcttattcacccttgaatgcactcagtcacccttggcgtttttcaagttcaccaattatctccatgctgccaaatccaatggtcagctcatatttctcaccttcattgacctaatagcagcgttttttgacacatttgacactttttccatcacgctcttttcaagttcaccagttatctccatgttgccaaatccaatggtcagcttatgtt

SEQ ID NO: 17766 - protein, 179 aa, Homo sapiens
MAGVLKKTTGLVGLAVCNTPHEVCTFVLSSFLNSQGRLNSCHFAYCRVNGIQMFQALNYKPRELLRHGRCPPTSLIRCHIFIYFCHDLFIKPVFLLTFSLTFSWLHLCLLLSAPSQIYISVFHLFSLPYRFCLGALDYIYLGLLKVLPPFPSVRSFPSVFTNVFIKKTHKIFLFFLSLL

SEQ ID NO: 17767 - DNA, 412 bp, Homo sapiens
gccctttttcacagcttgaaaatgattgttaaaaacaacaactgaaaatcaaacaactgaaaacatgagccaaatctattagcactgaactcctccaacagcactgatgtcacaggcccctggaagaatccacgttgttgacattactctggtcatttagttgccatgtagccaagcaaaggcaaatggggtttgaccttgttgtccaggctggtttcaaactcctgagttcgagcaatctacccacccttcaaagtgttgggatcacaggtgactcttagaatcatctagtcaaaatggaattgtgactgtaagtgcactaagaaaagatccctttgggaagaatgaacttattttgacaaatatgttcaatatttttacatatttaaaatattgactctcacccaggaaa

SEQ ID NO: 17768 - protein, 31 aa, Homo sapiens
MGFDLVVQAGFKLLSSSNLPTLQSVGITGDS

SEQ ID NO: 17769 - DNA, 2956 bp, Homo sapiens
aggaaggcaagtccctggataagaatgacaagatgatcattccaaaaggaaagcagtcaagacagtgcaggaggtgaggccatcttataggaagagcagttgtccagcctctggaagaaaaagctcagtggagatctgacagccttcctgggggatattaacagggctcctgtgttgcagaggaacactactttctcagtgtagctctgagaaagagaaccagaaaaaggatttctcttcagtagaaaaggcaaataccataaagaaggaatcgctgtaacttattgcttgaatggatactaatgatgaccctgatgaagaccatcttacaagttatgatattcagctaagtattcaagaatccattgaagccagcaagactgcactttgtcctgaaagatttgtacccctaagtgctcaaaacagaaaacttgtggaggccataaaacaaggtcacattcctgagctccaggagtatgtaaaatataaatatgcaatggatgaagctgatgaaaaaggatggtttccattgcatgaagctgttgttcaacccattcaacaaatacttgagattgttctggatgcatcctataagacactctgggaattcaagacctgtgatggagaaacacccttgactttggcagtcaaagctggtctggtggaaaatgtaagaactttattagaaaagggagtgtggcccaacacaaaaaatgataaaggagagaccccccttctgattgctgtgaaaaagggctcctatgacatggtgtcgactctgatcaaacataacactagcctagaccagccctgtgtcaagcgatggtcagcaatgcatgaagcagccaagcaaggccgaaaagatatcgtagctctgctgctgaaacatggaggcaatgtccacctgagagatggatttggagtcacaccactaggcgtcgctgccgagtatggtcactgtgacgtgttagaacatctaatccacaaaggtggtgatgtgcttgctttggcggatgatggggcgtcggtgctgtttgaggcagcaggaggtggcaatcccgactgcatttccctcctgctggaatatggaggaagcggaaatgtacctaaccgagcaggacatcttcctatacaccgagctgcctatgaggggcattatcttgcactgaaatatcttatcccagtaacatctaaaaatgcaattcggaaaagtgggctaacaccaattcactcagcagcagatggacaaaatgcacagtgtctagaactgctcattgaaaatggttttgatgtcaacactctacttgctgaccacatttcccagagctatgacgatgagaggaagactgcgctgtattttggcgtttctaataatgacgttcattgcacagaagtccttctggctgcaggtgcagacccaaacttagatcccctcaactgtctacttgttgcagtgagggccaataattatgaaattgtcaggctgcttctctcccatggagctaatgtcaattgttattttatgcatgtgaatgacactcgtttccccagtgtcattcaatatgctctaaacgacgaggtaatgctgaggctattgctgaataatggctatcaagtggagatgtgctttgactgcatgcatggtgacatctttggaaattcatttgtgtggtcagagatacaggaagaggtgctgccaggatggacatcttgtgtaataaaagataacccgttctgtgagtttattacagttccttggatgaagcacttggtaggcagagttactcgtgtactaatagattacatggattatgttcctctgtgtgctaaactgaagtctgcactagaagtacagagagaatggccagaaatccgccaaatactagagaatccttgttcattgaagcatttgtgtcggttaaaaattcgaaggcttatgggtctccagaaactctgccagccagcctcagtggagaagcttcctctaccaccagctattcaaagatacatattatttaaagagtatgatctctatggacaagagctaaaattgacataacttaatattttaaaatgtgatttaaaaaaaatgttgaaatgtgattccctcagataatttcttgtaaccattttacatccttaattgtaaagtgtatttaaattcattgacagttttataggttatcatgtgttcttatgggaacaccatgatttatgtctttaaagacatttgcattttttaaagatagtattttgaacttagatttgtatctttgtttgctacaagtcatcaaactctccctatcaagtggctcctacaatatccacaatcaagtctctatgtttaaaaaacagataaccactttctcaaacccacatctgccagttgctggccagattctcctgtctttcacggtcttgctgtgtaaaagagctcctcctgcctgtaagttcacagactgtgatctggcatctgaccctccactgcttttctcaaggtccctgacaatctctttgttggtaaattcagtgaacattcttcagtccctcttccaatcgattcctacagcatctaacattgttgcctgttccttgcttgaaatgatatctctttccttgtttctcgcaaaacctgttctcttgggtgtcctcccacctccctggacactctgtctctggcttctttctgcctagctcatctctagccaatcttacagttatatatcttaagccctcttctctttgttctttaagttatatatcctaagccctctttgctttgttctctgggatattttatccacatccatggtcttaatcattttgctagagactacaaaatttccatccaaagctcagctctttctctcatgttctcctgacctatgtagacaattggcctcatgaacatttgaacacaaagacacctcaaattcaacatgtccccagatgaact

SEQ ID NO: 17770 - protein, 588 aa, Homo sapiens; identical to SEQ ID NO: 2120

SEQ ID NO: 17771 - DNA, 1652 bp, Homo sapiens
aggataaatcctgatgattctctcagggacctctagtagattagctcaacactcgagaatcattgcagcttcaaggaatggatactaatgatgaccctgatgaagaccatcttacaagttatgatattcagctaagtattcaagaatccattgaagccagcaagactgcactttgtcctgaaagatttgtacccctaagtgctcaaaacagaaaacttgtggaggccataaaacaaggtcacattcctgagctccaggagtatgtaaaatataaatatgcaatggatgaagctgatgaaaaaggatggtttccattgcatgaagctgttgttcaacccattcaacaaatacttgagattgttctggatgcatcctataagacactctgggaattcaagacctgtgatggagaaacacccttgactttggcagtcaaagctggtctggtggaaaatgtaagaactttattagaaaagggagtgtggcccaacacaaaaaatgataaaggagagaccccccttctgattgctgtgaaaaagggctcctatgacatggtgtcgactctgatcaaacataacactagcctagaccagccctgtgtcaagcgatggtcagcaatgcatgaagcagccaagcaaggccgaaaatatggtcactgtgacgtgttagaacatctaatccacaaaggtggtgatgtgcttgctttggcggatgatggggcgtcggtgctgtttgaggcagcaggaggtggcaatcccgactgcatttccctcctgctggaatatggaggaagcggaaatgtacctaaccgagcaggacatcttcctatacaccgagctgcctatgaggggcattatcttgcactgaaatatcttatcccagtaacatctaaaaatgcaattcggaaaagtgggctaacaccaattcactcagcagcagatggacaaaatgcacagtgtctagaactgctcattgaaaatggttttgatgtcaacactctacttgctgaccacatttcccagagctatgacgatgagaggaagactgcgctgtattttggcgtttctaataatgacgttcattgcacagaagtccttctggctgcaggtgcagacccaaacttagatcccctcaactgtctacttgttgcagtgagggccaataattatgaaattgtcaggctgcttctctcccatggagctaatgtcaattgttattttatgcatgtgaatgacactcgtttccccagtgtcattcaatatgctctaaacgacgaggtaatgctgaggctattgctgaataatggctatcaagtggagatgtgctttgactgcatgcatggtgacatctttggaaattcattttgtgctaaactgaagtctgcactagaagtacagagagaatggccagaaatccgccaaatactagagaatccttgttcattgaagcatttgtgtcggttaaaaattcgaaggcttatgggtctccagaaactctgccagccagcctcagtggagaagcttcctctaccaccagctattcaaagatacatattatttaaagagtatgatctctatggacaagagctaaaattgacataacttaatattttaaaatgtgatttaaaaaaaatgttgaaatgtgattccctc

SEQ ID NO: 17772 - protein, 507 aa, Homo sapiens
MDTNDDPDEDHLTSYDIQLSIQESIEASKTALCPERFVPLSAQNRKLVEAIKQGHIPELQEYVKYKYAMDEADEKGWFPLHEAVVQPIQQILEIVLDASYKTLWEFKTCDGETPLTLAVKAGLVENVRTLLEKGVWPNTKNDKGETPLLIAVKKGSYDMVSTLIKHNTSLDQPCVKRWSAMHEAAKQGRKYGHCDVLEHLIHKGGDVLALADDGASVLFEAAGGGNPDCISLLLEYGGSGNVPNRAGHLPIHRAAYEGHYLALKYLIPVTSKNAIRKSGLTPIHSAADGQNAQCLELLIENGFDVNTLLADHISQSYDDERKTALYFGVSNNDVHCTEVLLAAGADPNLDPLNCLLVAVRANNYEIVRLLLSHGANVNCYFMHVNDTRFPSVIQYALNDEVMLRLLLNNGYQVEMCFDCMHGDIFGNSFCAKLKSALEVQREWPEIRQILENPCSLKHLCRLKIRRLMGLQKLCQPASVEKLPLPPAIQRYILFKEYDLYGQELKLT

SEQ ID NO: 17773 - DNA, 648 bp, Homo sapiens
gtggacattgcctccatgtttcagcagcagagctacgatatcttttcggccttgcttggctgcttcatgcattgctgaccatcgcttgacacagggctggtctaggctagtgttatgtttgatcagagtcgacaccatgtcataggagccctttttcacagcttgaaaatgattgttaaaaacaacattaagggattctgaatagcaaatctcaaagaagaccatagattcaagaacaaactgaggaagtgccatgaataatccattttcctataaaacctaagaagacttggcatgggttccacaacaaaggtgctgattaagctacagaagccccaagtatttagctggccacagaccatccaggtagacaataaatgtcctggcctccgttgccccaaggtgtggtggcattgtgacaaaatctgaactaatgggacatgagtggaagggccgtgtgcactgtcccggtcatctttttaaattgaagatgcttgcctagggcttcctctttagtccttcctgctgcctggaaaatggcgacgttgggagcaactttggaagcacactgtaatgttgatacagccaccctcacaaccctgggccattctgcaatgtgtgagagagaaatgacttctttctctttaa

SEQ ID NO: 17774 - protein, 44 aa, Homo sapiens
MGSTTKVLIKLQKPQVFSWPQTIQVDNKCPGLRCPKVWWHCDKI

SEQ ID NO: 17775 - DNA, 548 bp, Homo sapiens
ttcggccttgcttggctgcttcatgcattgctgaccatcgcttgacacagggctggtctaggctagtgttatgtttgatcagagtcgacaccatgtcataggagccctttttcacagcttgaaaatgattgttaaaaacaacagaagaagagacagatttggatctcactcgtagagtttatggcctagagaagaagcctatgctgccttctatttaaagagagactcaaagtctgggcctgtactgggaaacgtagaagaagatatgaggccacatggaacattctggggtaaccaggaggcagaacgcagaaaggatctaaagccaaggcaaggaaagcagctcccaatgtggtaatgggaggatgaagacgaactttgcctacttcatttgggagcaggcaagccatccctgcaggagatgcccgtttttctccctctccttgtctaaagtagaacctgttgacaaatgcctctctctgaattgcccaactgtcactggcagctctaattacagtgaattacctcatgctagctggtgttattgc

SEQ ID NO: 17776 - protein, 34 aa, Homo sapiens
MFDQSRHHVIGALFHSLKMIVKNNRRRDRFGSHS

SEQ ID NO: 17777 - DNA, 4215 bp, Homo sapiens
acagaatttacgcacccttggcttccttggagcctagcggctctccccgcgtccaagatggcggcagaagcagctggtgggaaatacagaagcacagtcagcaaaagcaaagacccctcggggctgctcatctctgtgatcaggactctgtctactagtgacgatgtcgaagacagggaaaatgaaaagggtcgccttgaagaagcctacgagaaatgtgaccgtgacctggatgaattgattgtacagcactacacagaattgacgacagccattcgcacataccagagcatcacagagcgcatcactaactcccgaaataaaataaagcaggtaaaagagaacctgctttcatgcaagatgctgctgcactgcaaacgggatgagcttcggaaactgtggattgaaggaattgagcataagcatgtcctgaacttgttggatgaaattgagaatatcaagcaagtgcctcaaaagctggaacagtgcatggccagcaagcactatctcagtgccactgacatgttggtgtcagcagttgagtctttggagggccccctgctccaggtggaaggactgagtgaccttcgactagagcttcacagcaagaagatgaaccttcacttggttctcatagatgaactacaccggcacctgtacatcaaatcgactagccgagttgtgcagcgtaacaaggaaaaagggaaaatcagctccctcgtgaaagatgcttctgttcctctgattgatgttacaaacctccctactcctcgaaaattccttgatacctctcactattctactgctggaagctcaagtgtgagggagataaatctgcaggacatcaaggaagatttagaattggatccagaggaaaacagcaccctgtttatgggtatcctcattaagggcttggcgaaactgaagaagatcccagaaacagttaaggcaatcatagagcgcttggagcaggagttgaagcaaattgtgaagaggtctacaacccaggtggcagacagtggctatcagcggggggagaacgttactgtggagaaccaaccaaggttgcttctagaactgctggagttactgtttgacaagtttaatgctgtagccgctgcacactctgtggtcctgggatacctgcaggacactgtagtgactccactgactcagcaggaagatatcaaactgtatgatatggcagatgtatgggtgaagatccaagatgttctacagatgctattaactgagtacttggatatgaaaaatactcgtacggcctctgaaccatcagctcaactaagctatgccagcactggacgagagtttgcagccttttttgccaagaagaaacctcaaaggccaaaaaattctcttttcaagttcgaatcgtcctcccatgccatcagtatgagcgcctatctgcgagaacagagaagggagctctatagtcggagtggagaactgcaagggggtcctgatgacaacttaattgaaggtggaggaacaaaatttgtctgcaaacctggagccagaaacattaccgtcatattccacccattactaagatttattcaggagattgagcatgctctgggtcttggcccagccaaacagtgtcctcttcgagagtttctcaccgtgtacatcaaaaacatctttctcaatcaagtcttggctgagatcaacaaggagattgaaggagtcactaaaacatctgaccctttgaagattctggccaacgcagacaccatgaaggtgctgggagtgcagcggcctctcctacagagcacaatcattgtggagaagacagttcaagacctcctgaacctgatgcatgacttgagtgcatattcagatcaattcctcaacatggtgtgcgtgaagctccaggagtacaaggacacctgcactgcagcttacaggggtattgtccagtcagaagaaaaacttgtcatcagtgcatcctgggcaaaagatgatgatatcagcagactcttgaaatctctaccaaactggatgaatatggctcaacccaaacagctgaggccaaaaagagaggaggaagaagatttcataagggcagcttttggcaaggagtctgaagttcttattgggaacctgggtgataaattaatccctccacaagacatccttcgtgacgtcagtgacctcaaagccttggccaacatgcatgaaagcctggaatggttggcaagtcgaacaaagtcagctttctccaatctttctacatcccagatgctttctcctgctcaagacagccacacgaacacggatctccccccagtgtcagagcagatcatgcagactctcagtgaacttgccaaatcgttccaggatatggctgaccgctgcttgcttgtcttacatctggaagtgagggttcactgtttccactatcttatccctcttgcaaaggaggggaactatgccattgtggctaatgtggaaagtatggattatgaccccctggtggtcaagctcaacaaagatatcagcgccattgaagaggccatgagcgccagccttcagcagcacaagttccagtatatcttcgaaggcctgggccacctgatctcctgcatcctcattaatggtgcccagtacttcaggcgcatcagtgagtctggcatcaagaaaatgtgtaggaacatttttgttcttcagcagaatttgaccaacatcaccatgtcgcgggaggcagacctggactttgcaaggcagtactacgagatgctttacaacacagctgacgagctcctgaacctggtggtggaccagggtgtgaagtacacggagctggagtacatccacgctctgaccctgctgcaccgcagccagactggggtgggggaactgaccacccagaacacgaggctgcagaggctcaaagagatcatctgcgagcaggctgccatcaagcaagccaccaaggacaagaagataactaccgtttagcagggcgtactgcggttggtgacgggggtcccctcagtcacactcacttttttccttggtatgttattgagtatattctgagcttagttttctctacagtgatactttagtggagaggaggtgtaaggattctttctctctggttttggcttttcatataaatgctaaaggaaggcgacagtacagagtgttttggttgaacaactactttaatgcagtcaaatctaacgggactagggtgggatagggaggaaggtggtatcaaattgttggactctgaaaaacaagtggatggattactaatatttgatttattactcaatatatatataattccagccttggaaagtaggaaagtaggctgctacctaacttttagtcccttccaaaaccatttagtagggttctattacataaacagtagggtttttcctctcctgaccttatccgtttacagttcaatgaaataagtgtatgtgcattgctgtctgtctctattgccaaaatcaaataaatggcttctcagctgctgtttacaacaaacttccctaaccaaaacagaacctctaatttagggctaggaatagaagtcttttgatcccagtccctgggacagttttgtatgctgtatcttgtacacaggttgtaggttggtttattgccattttgttttatttctgctgtataaaaaccaagagccagacaattagacaactatggaggaatgaaaggcaattcaaacatctgcttgattcccgccccgccacccctaatttctgagagaataatggttagagaacattgcatctcacttgaaacatcctttgggggtaaatgattcttaggtgctcacttggtctgagctcagctgaatgcagggaagatgggacagagtgacatttctcctctgtgcggcctccagctgagcctgtctctgaattgttccctcccccgcaatgtgggcacttaccatgttcctggcacactggacctcaccatgtcccccggtcaccagtcctcttgctgcccatggttcataggtcatagaaggcagcaatgcactgactgggccacatcttgaaaactcgtggaaagggaaaggggaggagatgggactttgaccacacacagtgatgcctcacaccctgaaggtgggggattttgtacctgtttgtacaactttggtcttgatgggaaaaatggagaattaaaaagtgttttgagaagcttaaa

SEQ ID NO: 17778 - protein, 974 aa, Homo sapiens [sequence omitted]

SEQ ID NO: 17779 - DNA, 3038 bp, Homo sapiens
atagagggcatctgtcggttgcatttgatttatttaaaacgttttcttacatggccaatttagtaacagcaagcaaaaccaaaatgagcaaaggagaggatcccaataatcccagatctataaagcggatttctcaagggggtagagataaccacctagctattgctaaatgtgatctcactcagttgaaaaagaaacaatcagaagtgagcaatgggagccgtgaaaccatctcaatgaagacttgttgccaacatggagatagaggatattggtctacagggtactattggagagggggtcctgatgacaacttaattgaaggtggaggaacaaaatttgtctgcaaacctggagccagaaacattaccgtcatattccacccattactaagatttattcaggagattgagcatgctctgggtcttggcccagccaaacagtgtcctcttcgagagtttctcaccgtgtacatcaaaaacatctttctcaatcaagtcttggctgagatcaacaaggagattgaaggagtcactaaaacatctgaccctttgaagattctggccaacgcagacaccatgaaggtgctgggagtgcagcggcctctcctacagagcacaatcattgtggagaagacagttcaagacctcctgaacctgatgcatgacttgagtgcatattcagatcaattcctcaacatggtgtgcgtgaagctccaggagtacaaggacacctgcactgcagcttacaggggtattgtccagtcagaagaaaaacttgtcatcagtgcatcctgggcaaaagatgatgatatcagcagactcttgaaatctctaccaaactggatgaatatggctcaacccaaacagctgaggccaaaaagagaggaggaagaagatttcataagggcagcttttggcaaggagtctgaagttcttattgggaacctgggtgataaattaatccctccacaagacatccttcgtgacgtcagtgacctcaaagccttggccaacatgcatgaaagcctggaatggttggcaagtcgaacaaagtcagctttctccaatctttctacatcccagatgctttctcctgctcaagacagccacacgaacacggatctccccccagtgtcagagcagatcatgcagactctcagtgaacttgccaaatcgttccaggatatggctgaccgctgcttgcttgtcttacatctggaagtgagggttcactgtttccactatcttatccctcttgcaaaggaggggaactatgccattgtggctaatgtggaaagtatggattatgaccccctggtggtcaagctcaacaaagatatcagcgccattgaagaggccatgagcgccagccttcagcagcacaagttccagtatatcttcgaaggcctgggccacctgatctcctgcatcctcattaatggtgcccagtacttcaggcgcatcagtgagtctggcatcaagaaaatgtgtaggaacatttttgttcttcagcagaatttgaccaacatcaccatgtcgcgggaggcagacctggactttgcaaggcagtactacgagatgctttacaacacagctgacgagctcctgaacctggtggtggaccagggtgtgaagtacacggagctggagtacatccacgctctgaccctgctgcaccgcagccagactggggtgggggaactgaccacccagaacacgaggctgcagaggctcaaagagatcatctgcgagcaggctgccatcaagcaagccaccaaggacaagaagataactaccgtttagcagggcgtactgcggttggtgacgggggtcccctcagtcacactcacttttttccttggtatgttattgagtatattctgagcttagttttctctacagtgatactttagtggagaggaggtgtaaggattctttctctctggttttggcttttcatataaatgctaaaggaaggcgacagtacagagtgttttggttgaacaactactttaatgcagtcaaatctaacgggactagggtgggatagggaggaaggtggtatcaaattgttggactctgaaaaacaagtggatggattactaatatttgatttattactcaatatatatataattccagccttggaaagtaggaaagtaggctgctacctaacttttagtcccttccaaaaccatttagtagggttctattacataaacagtagggtttttcctctcctgaccttatccgtttacagttcaatgaaataagtgtatgtgcattgctgtctgtctctattgccaaaatcaaataaatggcttctcagctgctgtttacaacaaacttccctaaccaaaacagaacctctaatttagggctaggaatagaagtcttttgatcccagtccctgggacagttttgtatgctgtatcttgtacacaggttgtaggttggtttattgccattttgttttatttctgctgtataaaaaccaagagccagacaattagacaactatggaggaatgaaaggcaattcaaacatctgcttgattcccgccccgccacccctaatttctgagagaataatggttagagaacattgcatctcacttgaaacatcctttgggggtaaatgattcttaggtgctcacttggtctgagctcagctgaatgcagggaagatgggacagagtgacatttctcctctgtgcggcctccagctgagcctgtctctgaattgttccctcccccgcaatgtgggcacttaccatgttcctggcacactggacctcaccatgtcccccggtcaccagtcctcttgctgcccatggttcataggtcatagaaggcagcaatgcactgactgggccacatcttgaaaactcgtggaaagggaaaggggaggagatgggactttgaccacacacagtgatgcctcacaccctgaaggtgggggattttgtacctgtttgtacaactttggtcttgatgggaaaaatggagaattaaaaagtgttttgagaagcttaaa

SEQ ID NO: 17780 - protein, 584 aa, Homo sapiens
MANLVTASKTKMSKGEDPNNPRSIKRISQGGRDNHLAIAKCDLTQLKKKQSEVSNGSRETISMKTCCQHGDRGYWSTGYYWRGGPDDNLIEGGGTKFVCKPGARNITVIFHPLLRFIQEIEHALGLGPAKQCPLREFLTVYIKNIFLNQVLAEINKEIEGVTKTSDPLKILANADTMKVLGVQRPLLQSTIIVEKTVQDLLNLMHDLSAYSDQFLNMVCVKLQEYKDTCTAAYRGIVQSEEKLVISASWAKDDDISRLLKSLPNWMNMAQPKQLRPKREEEEDFIRAAFGKESEVLIGNLGDKLIPPQDILRDVSDLKALANMHESLEWLASRTKSAFSNLSTSQMLSPAQDSHTNTDLPPVSEQIMQTLSELAKSFQDMADRCLLVLHLEVRVHCFHYLIPLAKEGNYAIVANVESMDYDPLVVKLNKDISAIEEAMSASLQQHKFQYIFEGLGHLISCILINGAQYFRRISESGIKKMCRNIFVLQQNLTNITMSREADLDFARQYYEMLYNTADELLNLVVDQGVKYTELEYIHALTLLHRSQTGVGELTTQNTRLQRLKEIICEQAAIKQATKDKKITTV

SEQ ID NO: 17781 - DNA, 1396 bp, Homo sapiens
aggattgagatgagatcgtcctggattaagacaaaccctaaatccaatgaaagtatccttacaagagccagaaaagaaaacataggagacacacgggagaacgccacgttacgatagagacagagattgcagttacgctgccagagccaaaaatccacgggagccaccagaagctgaaagagtcaaggaaggatcgtcctccagagctttggagggaatgtggctcctggcctccaaaactatgcaagagtacatttgtgttgttttaaggcactaagtttacggtaatttatcatggcagccctaggaaactaatcccctagctttaatggacaaaaatactgcacgctgcttctgctgctaataaatggccagctgacaaactccaggaaaaggagaaagcagttatagacagggtttcaccatgttggccaggctgctcttgaactgctgacctcaagtgatccatccgcctcggcctcccaaagtgatgggattacaggtgtgagccaccatgcccagccttcaacaataatttttgatgtactctctctgccagcaataactgatacgatggagtagaaagatcaaggacagagatggagacaccaaagaagaaataaattaaatggcatctccaaatcaatggtaaaccagggaaatgaactgaatcagttccgtctgtctcctcatgtttaaggaatgaataatttgtactctgggagatatataaagcatgagatggtatccacttcaatggactgtttccagaactccgtgttcagaatctgactcaggagaaatgaataatttctcttcaggccacgattatagaggacgtatctgtgctattcataaggtcggaccaaagatggttctgagcagacatgggtatccctttattcatttactcatcaaaagaagggcttgatcaacttcaaccacaagcttgagccactgtattccctaagataatttatgtaagttaaaacattggaatggaacaaaagcatgagattatcttaaaaattttgtatctcatgctcagatttgagaatttatgtatgcttgacactttatagtatcgttattggagaacagaagatgcctgcctacccacactgaagttatgactagacgtcaacactgtctgttacttgggtcatctaaactttgaaagcaatgaccaggggatctttgtgaaatgtttccctaaatgaattctttttgactattgttcctaagattgcttcaacttttgaaacaaaagaaagaaaatcctatcatcagaggactgaaaattcagtgcagaaatattacttaataatgtgatattacttaatactactttatgaggacaaaaaaaggaatgttattaaaacaaaactggaaaact

SEQ ID NO: 17782 - protein, 64 aa, Homo sapiens
MRWYPLQWTVSRTPCSESDSGEMNNFSSGHDYRGRICAIHKVGPKMVLSRHGYPFIHLLIKRRA

SEQ ID NO: 17783 - DNA, 3855 bp, Homo sapiens
gagaggcgttccgcggaggagaagaggaagaggaagttgggggagggtcctagcggggagtgaaccggaagtgtaaaggttcctgcctctcctcggccaggcggaacctctctgctgggcccggtggccgcaaaagaactttctttctcccgcccgaacggtcgccgcggccaactgcctcgcccgcctggcagcctaaccctccttctcttcttctcctctccggcttcgcgcggccctgcctccctctcgcccggcggcatccgcttgctgctgccaccgcctcctcatcttctgcccggccaaccggcctgccccgctgcagtgatgtgcgacaaggagttcatgtgggccctgaaaaacggagacttggatgaggtgaaagactatgtggccaagggagaagatgtcaaccggacactagaaggtggaaggaaacctcttcattatgcagcagattgtgggcagcttgaaatcctggaatttctgctgctgaaaggagcagatattaatgctccagataaacatcatattactcctcttctgtctgctgtctatgagggtcatgtttcctgtgtgaaattgcttctgtcaaagggtgctgataagactgtgaaaggcccagatggactgaccgcctttgaagccactgacaaccaggcaatcaaagctcttctccagtgatggatggatggactgataactccggaagaatgactctcctgtggcctcacactgctgcctgtctgtctgtcactctctatctgccagcttcttcagctaaatactttaagaggggtgaggggagagagaaattcataacaaatccgactaccagaaaaaaaaaattgttttggaggaggggcaaaaggaaccatgatcaggcttttactgggattcctgatcaagtaagcctcttccctttctaataaaatatacaccttatacccaagggagagcaaagacaaaatacaccagtaacatttgaccttttcagctccctagctaatttattagattgtgttgaaggtctgattctacaaaggccaactctacatatttggtagccctaactgtctgagcagtagtggctgctgtgatgtaaacttagggtgctgagataagcaattagctctagccttctgccttaagaatgcactctactggggatttcctggcatagttaagagcgctgcctataaggttggtgaccaaatctttcctcggtgactttaagctttatgtgaaagcttagttaaggtgaggaggggcacactcctaaattgctggatgactgaactttggattttctctcccctttcacatggatttcatgtctctttagataaaactgactagttttatttataaaatcttaagttttggaagtctaaaggagaaaccattccagtatgcatatttttttctcctctagattcatacatttatatagcattgaaacactttcaaactcctgctggtagtaaaaggggatttaaaaatagaatcatagccataagcctgttagtatcatatgaagagagaacagttatcttagtacctatggattttctttatttgctgtttgaatggattgaccttggttatgtgttgagaattaaggaacattctttgaaatgcctctctcagacccatcttggaggctgattacttactgcaccaaagctatcactggggtgagatttactgtttggacaaatttagccccatcccttcaaaaatacacttgtaaccaggtttcccagagttgttgataggcttctgctgaacatatgccaacccacctgcataatatatttttgttgcttttataaatcatgcattacataaagtgtgacaacttcaaaatgtattctctgttcttggaatacagtgccctaaaatggtgttcttatgacctgcagaaaatatttacacatatttccaaatatttatttcatgagcagtacagctaattaaaatatataagcttaaattttatatcttacatttaaaatattaagattcctttgacttgccatccatataagcttgctaaaaatattaagaccaagtcatgcaataattgaatgtacctcaaatttttaggggagggtgggttagggactgatactcagattgtggataataattgaattggtttttaaaggcaacatagcattctacagcagggttaatctattatcaagaacagtcaccctggttaataacaagttttactgatcagttgctggttggttggttggttggcatgtgggtgtgtgggtgtataggtgtgtgtgggtgtgtgtgtgtatttttccccatgagtcctttttttaatcctgtggctttttcacttacaactagcctaaccctgtaattttcctacatccaagaaaacaatcacaaagtagtggtttaaatactttgttgtatttggctaattttgctgtcttaatgcagcctattaagagttgggttaaaaatcagtaatcagtactttattacatcactgaactaaaatatggagacatcctcattgaaaatggagggcactctatcagtctataactatcaacgtagtgcaacagggtgttttgatacctttgttttcacctcttgacataatgctatttaaaggcttgaatttttccctttatataattttcacctttactttcaaagtgttttgttgtagttggctattgcagagagtgcattgtcctatcattcctaaacctggtctgctttctacattcatggtatggaaaccatgtgattctttgtacagtttatcctgatgttgcttgtaatgcagtagaggctatttcgccttcgcttttctttctcgacctttttgtaaaccctataattatgaagcgattgcttgagaaaataacatataaacatagaatagaatagactgaccaagatggttcacagtttctttttttaactaggttatttataatgtatttctgaaccacttggcagacaaattcacaacacttaatgttcatattttgagtaaaggaagctaaaaccatgtttgctttctggtactacatgcattagcgaaaggttaagtaagttttgttctccactgaagtaatacttaacatctcagaaaaaattttgcatgttctgtagttttgtattaaatcagtcatttcatatgcactatatcaagtacaaacaggtagtttacctgtttatagtagtgtactaacaaagtctcccttgcagcttcagactgttatctataggcttatcgttcaaatacagcacttgaatatcccaagtagttcttctacgcatagctcacctttctaaacccagttaagcatggaagagaggtagtaggtaggtgcagtgtgtggaagctgcaaacaagtaggccttttattcattgatatcttttcccaagtactggattttaaatctgtatgtatctgtttgatttttttttctaatatttcagttgagctgctgttttcttccatgcaatattgtatactcaattgtgtatagaagaagctggtgagagtgccctcctacataaataagcaattgcagtgttttgcatgcaaaatataaaaaatttaaattgtcctgattctattttgtaaatggagaaacaatcatatctttctaagcggtaatggaggaagactagtgctttgtgcattttgatatatttgagttcattttttccacaatgtcatacttttgacgcagttgggtttctcataagtatcctagttcatgtacatccgaatgctaaataatactgtgttttaagttttgtgttgcaagaacaaatggaataaacttgaattgtgctacagctaa

SEQ ID NO: 17784 - protein, 118 aa, Homo sapiens; identical to SEQ ID NO: 2126

SEQ ID NO: 17785 - DNA, 2227 bp, Homo sapiens
gagaggcgttccgcggaggagaagaggaagaggaagttgggggagggtcctagcggggagtgaaccggaagtgtaaaggttcctgcctctcctcggccaggcggaacctctctgctgggcccggtggccgcaaaagaactttctttctcccgcccgaacggtcgccgcggccaactgcctcgcccgcctggcagcctaaccctccttctcttcttctcctctccggcttcgcgcggccctgcctccctctcgcccggcggcatccgcttgctgctgccaccgcctcctcatcttctgcccggccaaccggcctgccccgctgcagtgatgtgcgacaaggagttcatgtgggccctgaaaaacggagacttggatgaggtgaaagactatgtggccaagggagaagatgtcaaccggacactagaaggtggaaggaaacctcttcattatgcagcagattgtgggcagcttgaaatcctggaatttctgctgctgaaaggagcagatattaatgctccagataaacatcatattactcctcttctgtctgctgtctatgagggtcatgtttcctgtgtgaaattgcttctgtcaaagggtgctgataagactgtgaaaggcccagatggactgaccgcctttgaagccactgacaaccaggcaatcaaagctcttctccagtgatggatggatggactgataactccggaagaatgactctcctgtggcctcacactgctgcctgtctgtctgtcactctctatctgccagcttcttcagctaaatactttaagaggggtgaggggagagagaaattcataacaaatccgactaccagaaaaaaaaaattgttttggaggaggggcaaaaggaaccatgatcaggcttttactgggattcctgatcaagtaagcctcttccctttctaataaaatatacaccttatacccaagggagagcaaagacaaaatacaccagtaacatttgaccttttcagctccctagctaatttattagattgtgttgaaggtctgattctacaaaggccaactctacatatttggtagccctaactgtctgagcagtagtggctgctgtgatgtaaacttagggtgctgagataagcaattagctctagccttctgccttaagaatgcactctactggggatttcctggcatagttaagagcgctgcctataaggttggtgaccaaatctttcctcggtgactttaagctttatgtgaaagcttagttaaggtgaggaggggcacactcctaaattgctggatgactgaactttggattttctctcccctttcacatggatttcatgtctctttagataaaactgactagttttatttataaaatcttaagttttggaagtctaaaggagaaaccattccagtatgcatatttttttctcctctagattcatacatttatatagcattgaaacactttcaaactcctgctggtagtaaaaggggatttaaaaatagaatcatagccataagcctgttagtatcatatgaagagagaacagttatcttagtacctatggattttctttatttgctgtttgaatggattgaccttggttatgtgttgagaattaaggaacattctttgaaatgcctctctcagacccatcttggaggctgattacttactgcaccaaagctatcactggggtgagatttactgtttggacaaatttagccccatcccttcaaaaatacacttgtaaccaggtttcccagagttgttgataggcttctgctgaacatatgccaacccacctgcataatatatttttgttgcttttataaatcatgcattacataaagtgtgacaacttcaaaatgtattctctgttcttggaatacagtgccctaaaatggtgttcttatgacctgcagaaaatatttacacataaataagcaattgcagtgttttgcatgcaaaatataaaaaatttaaattgtcctgattctattttgtaaatggagaaacaatcatatctttctaagcggtaatggaggaagactagtgctttgtgcattttgatatatttgagttcattttttccacaatgtcatacttttgacgcagttgggtttctcataagtatcctagttcatgtacatccgaatgctaaataatactgtgttttaagttttgtgttgcaagaacaaatggaataaacttgaattgtgctaca

SEQ ID NO: 17786 - protein, 118 aa, Homo sapiens; identical to SEQ ID NO: 2126

SEQ ID NO: 17787 - DNA, 838 bp, Homo sapiens
gagaggcgttccgcggaggagaagaggaagaggaagttgggggagggtcctagcggggagtgaaccggaagtgtaaaggttcctgcctctcctcggccaggcggaacctctctgctgggcccggtggccgcaaaagaactttctttctcccgcccgaacggtcgccgcggccaactgcctcgcccgcctggcagcctaaccctccttctcttcttctcctctccggcttcgcgcggccctgcctccctctcgcccggcggcatccgcttgctgctgccaccgcctcctcatcttctgcccggccaaccggcctgccccgctgcagtgatgtgcgacaaggagttcatgtgggccctgaaaaacggagacttggatgaggtgaaagactatgtggccaagggagaagatgtcaaccggacactagaaggtggaaggaaacctcttcattatgcagcagattgtgggcagcttgaaatcctggaatttctgctgctgaaaggagcagatattaatgctccagataaacatcatattactcctcttctgtctgctgtctatgagggtcatgtttcctgtgtgaaattgcttctgtcaaagggtgctgataagactgtgaaaggcccagatggactgaccgcctttgaagccactgacaaccaggcaatcaaagctcttctccagtgatggatggatggactgataactccggaagaatgactctcctgtggcctcacactgctgcctgtctgtctgtcactctctatctgccagcttcttcagctaaatactttaagaggggtgaggggagagagaaattcataacaaatccgactaccag

SEQ ID NO: 17788 - protein, 118 aa, Homo sapiens; identical to SEQ ID NO: 2126

SEQ ID NO: 17789 - DNA, 832 bp, Homo sapiens
aaacgactaattggttgcagaaagtgatgaatcagaggctgaagtgaagttacaaagttatactcctatgcaaaggaagacttggcctgtgaccagcctgattgactgcaggaggggaccagtcagagcaagaaggcagccatctgtagggcaggaagagagccctcaccagaacttgaccatgctggcaccctgatctcagacttctagcctccagaactgtgaggatgctgagatgtagagagactgatttgctcaagataacaaagagttttattgatttgggaacccatggaagggggtcagctgtgagatatcacatgatcagactgactgcctgaccagactgactgccatcctgttaaaggaatgaatcacagttcatctcgcagatttatggcatgcctacagaaaaagtaccttatgatgcaaacctgaaagtttaaataatctcctgaaagttccacaatcagttttcagctttcctccactgttttgggaaacgtcaccttcttatcttggaagagtaatctcaaaattgaagcatcttagatccaacaagaattaaaaggatgggaagtccttgcagccatccaatagagtcagaagactttggattttggagtctgtgagattatcttacagagcaagactgcagatcaagattttccaacgtggtgctgacttttttgagaacagttaatgagaactaggaaagtccttgcagaccatccagtccagcggctttcaaatggaaaatgtgaaaggacaacagaatcacatggattcttttctgaactgcttttttccagtgatgccatattctataaga

SEQ ID NO: 17790 - protein, 42 aa, Homo sapiens
MQRKTWPVTSLIDCRRGPVRARRQPSVGQEESPHQNLTMLAP

SEQ ID NO: 17791 - DNA, 771 bp, Homo sapiens
ctcattctgtcttgccgccacaatgtaagaattgtctctcaccctctgccatgtaagaattctctttcaccctctgccgtgatcgtgagaccttccccagccatgtgaaactggtctcactctgtcgcccaggctgcagtgcagtggtgtgatcatggctcaccgcagccttgacctcctaggctcaagcgatcctttcacctcagcttcctaagtagccaggactacagttttcagctttcctccactgttttgggaaacgtcaccttcttatcttggaagagtaatctcaaaattgaagcatcttagatccaacaagaattaaaaggatgggaagtccttgcagccatccaatagagtcagaagactttggattttggagtctgtgagattatcttacagagcaagactgcagatcaagattttccaacgtggtgctgacttttttgagaacagttaatgagaactaggaaagtccttgcagaccatccagtccagcggctttcaaatggaaaatgtgaaaggacaacagaatcacatggattcttttctgaactgcttttttccagtgatgccatattctataagacttcatgtgaaggtgtggaggacgggtaatgtctgaatcttccaggcaatgagagggatggtgtgagtctggaaattctttgtgatggtctgagactccccttactccagttaagaacactgacttaattcgatctggttttttttaacaaatggcctctgagacgtagagcagtgaggata

SEQ ID NO: 17792 - protein, 52 aa, Homo sapiens [sequence omitted]

SEQ ID NO: 17793 - DNA, 1077 bp, Homo sapiens
ctcattctgtcttgccgccacaatgtaagaattgtctctcaccctctgccatgtaagaattctctttcaccctctgccgtgatcgtgagaccttccccagccatgtgaaactttttcagctttcctccactgttttgggaaacgtcaccttcttatcttggaagagtaatctcaaaattgaagcatcttagatccaacaagaattaaaaggatgggaagtccttgcagccatccaatagagtcagaagactttggattttggagtctgtgagatgatgtactcacatcccaacaaattgaaaatgctgaccaatcccagcacagccaactcgaatttgctccttcatcaaagtgaccagcacctcatttcttcctctttagaatttatagagtcctatggctattgatatctaacatcctggcttcactcacatggatgagccccacctggaatgcctagaagacgtgggacagctggatctctctccacacggtttttcattgttgcctcaggttccaataaaagcaaaagctgcaaggtcttctgaggcaaagacttagaaataccacaatgttacttctgctgcattctgttgataaaagaatcccacaatgccagcttcatttaaaggggtaaagatatagattattcaccttcgatgggaggaactgcaaatgatgtaattagtgataatttttaatatactgtaatgtattgacttatctttaaaaaatgaaaaaataaaccaaaaactaaaagcaaaacaaaactataatagaaaacaattgcttctggaggaggaatgcaatggggaaaaggttatagaaacaaaagctacattttatttgaatatacctgttttaggtttgaccctggtaacatttgatattttacataattatatcattatttaaaattaaattttaaaacaccaatacccataacagaaaagtttgataaaagaggtgaaatataaatataaatatattaagtttgcattataatcacacagagatgaattgtgtcagttactcaaacacagatatttgactatacaacctttataagatatccta

SEQ ID NO: 17794 - protein, 44 aa, Homo sapiens
MMYSHPNKLKMLTNPSTANSNLLLHQSDQHLISSSLEFIESYGY

SEQ ID NO: 17795 - DNA, 1302 bp, Homo sapiens
ctcattctgtcttgccgccacaatgtaagaattgtctctcaccctctgccatgtaagaattctctttcaccctctgccgtgatcgtgagaccttccccagccatgtgaaactggtctcactctgtcgcccaggctgcagtgcagtggtgtgatcatggctcaccgcagccttgacctcctaggctcaagcgatcctttcacctcagcttcctaagtagccaggactacagttttcagctttcctccactgttttgggaaacgtcaccttcttatcttggaagagtaatctcaaaattgaagcatcttagatccaacaagaattaaaaggatgggaagtccttgcagccatccaatagagtcagaagactttggattttggagtctgtgagattatcttacagagcaagactgcagatcaagattttccaacgtggtgctgacttttttgagaacagttaatgagaactaggaaagtccttgcagaccatccagtccagcggctttcaaatggaaaatgtgaaaggacaacagaatcacatggattcttttctgaactgcttttttccagtgatgccatattctataagacttcatgtgaaggtgtggaggacgggatgtactcacatcccaacaaattgaaaatgctgaccaatcccagcacagccaactcgaatttgctccttcatcaaagtgaccagcacctcatttcttcctctttagaatttataggtttatttggccgcagtgatttagctattgccctttatgtactcctaattggtagctgtccagggggcatcagttcagaagcatcgtactggaacactactatgactgttcagaagcgttatacttttaagccatctgaactcacaaactatagagctaaacaaaatcacccaaaaagatccaggtattgtgatatggaagtggttgggattggcacttctgtgtctcctcctcaaagcataggtgctgatgctaggttgcaggaaaacagatcagggcacagactatttgctcattccggaggagtgaagcagctgacagatcagatgcagccagcagctctctgtcagcctgaagatgaaggggatacttgctggcaggataggggctccagcagctgtttcagctgctattcactccggagttcagggcatgtgtctcacattacctgtctttcaaagaagtcatcttcctacgtggaaagaagatccataaatcctaaagaacacaaaggtgaaagagagcagtacacattatacatgtgcttcattcttcaatctatgccagagtaa

SEQ ID NO: 17796 - protein, 280 aa, Homo sapiens
MRTRKVLADHPVQRLSNGKCERTTESHGFFSELLFSSDAIFYKTSCEGVEDGMYSHPNKLKMLTNPSTANSNLLLHQSDQHLISSSLEFIGLFGRSDLAIALYVLLIGSCPGGISSEASYWNTTMTVQKRYTFKPSELTNYRAKQNHPKRSRYCDMEVVGIGTSVSPPQSIGADARLQENRSGHRLFAHSGGVKQLTDQMQPAALCQPEDEGDTCWQDRGSSSCFSCYSLRSSGHVSHITCLSKKSSSYVERRSINPKEHKGEREQYTLYMCFILQSMPE

SEQ ID NO: 17797 - DNA, 1287 bp, Homo sapiens
tgccgccacaatgtaagaattgtctctcaccctctgccatgtaagaattctctttcaccctctgccgtgatcgtgagaccttccccagccatgtgaaactttttcagctttcctccactgttttgggaaacgtcaccttcttatcttggaagagtaatctcaaaattgaagcatcttagatccaacaagaattaaaaggatgggaagtccttgcagccatccaatagagtcagaagactttggattttggagtctgtgagattatcttacagagcaagactgcagatcaagattttccaacgtggtgctgacttttttgagaacagttaatgagaactaggaaagtccttgcagaccatccagtccagcggctttcaaatggaaaatgtgaaaggacaacagaatcacatggattcttttctgaactgcttttttccagtgatgccatattctataagacttcatgtgaaggtgtggaggacgggatgtactcacatcccaacaaattgaaaatgctgaccaatcccagcacagccaactcgaatttgctccttcatcaaagtgaccagcacctcatttcttcctctttagaatttatagagtcctatggctattgatatctaacatcctggcttcactcacatggatgagccccacctggaatgcctagaagacgtgggacagctggatctctctccacacggtttttcattgttgcctcaggttccaataaaagcaaaagctgcaaggtcttctgaggcaaagacttagaaataccacaatgttacttctgctgcattctgttgataaaagaatcccacaatgccagcttcatttaaaggggtaaagatatagattattcaccttcgatgggaggaactgcaaatgatgtaattagtgataatttttaatatactgtaatgtattgacttatctttaaaaaatgaaaaaataaaccaaaaactaaaagcaaaacaaaactataatagaaaacaattgcttctggaggaggaatgcaatggggaaaaggttatagaaacaaaagctacattttatttgaatatacctgttttaggtttgaccctggtaacatttgatattttacataattatatcattatttaaaattaaattttaaaacaccaatacccataacagaaaagtttgataaaagaggtgaaatataaatataaatatattaagtttgcattataatcacacagagatgaattgtgtcagttactcaaacacagatatttgactatacaacctttataagatatccta

SEQ ID NO: 17798 - protein, 95 aa, Homo sapiens
MRTRKVLADHPVQRLSNGKCERTTESHGFFSELLFSSDAIFYKTSCEGVEDGMYSHPNKLKMLTNPSTANSNLLLHQSDQHLISSSLEFIESYGY

SEQ ID NO: 17799 - DNA, 756 bp, Homo sapiens
cctctgccatgtaagaattctctttcaccctctgccgtgatcgtgagaccttccccagccatgtgaaactttttcagctttcctccactgttttgggaaacgtcaccttcttatcttggaagagtaatctcaaaattgaagcatcttagatccaacaagaattaaaaggatgggaagtccttgcagccatccaatagagtcagaagactttggattttggagtctgtgagattatcttacagagcaagactgcagatcaagattttccaacgtggtgctgacttttttgagaacagttaatgagaactaggaaagtccttgcagaccatccagtccagcggctttcaaatggaaaatgtgaaaggacaacagaatcacatggattcttttctgaactgcttttttccagtgatgccatattctataagacttcatgtgaaggtgtggaggacgggtaatgtctgaatcttccaggcaatgagagggatggtgtgagtctggaaattctttgtgatggtctgagactccccttactccagttaagaacactgacttaattcgatctggttttttttaacaaatggcctctgagacgtagagcagtgaggataaggactcttacccggttacagagtggagtaagggctagaactcaactcttaaaaatttcaaatgcaatgttctttctacaatattgtgcctacttcttcacttctgcttataggcaacttccttttcctttaattctctaatatt

SEQ ID NO: 17800 - protein, 52 aa, Homo sapiens [sequence omitted]

SEQ ID NO: 17801 - DNA, 399 bp, Homo sapiens
gatatatccaggggtgatcagagtggaaggggggcaacccttcggatttagaggagagaagaatcaactcagacattatcttacagagcaagactgcagatcaagattttccaacgtggtgctgacttttttgagaacagttaatgagaactaggaaagtccttgcagaccatccagtccagcggctttcaaatggaaaatgtgaaaggacaacagaatcacatggattcttttctgaactgcttttttccagtgatgccatattctataagacttcatgtgaaggtgtggaggacgggtaatgtctgaatcttccaggcaatgagagggatggtgtgagtctggaaattctttgtgatggtctgagactccccttactccagttaagaacactgactt

SEQ ID NO: 17802 - protein, 52 aa, Homo sapiens [sequence omitted]

SEQ ID NO: 17803 - DNA, 791 bp, Homo sapiens
gggttaacactgggaaataaaaacttcccacccacttcttgcaggaggctgtgtggttaaatcctgttacattatacttcagctcttaccatggccttgtcattgggttgaactggagctgtattttagattttgccaacaataacaagcgctgccaagtacttcagctgagatcacccaaataatactctactagcaaaagctttgcgtggcgttctaaccatcagaaactgagatggcaagaaagaagctgaaaaaatttactactttggagattgtgctcagtgttcttctgcttgtgttgtttatcatcagtattgttctaattgtgcttttagccaaagagtcactgaaatcaacagccccagatcctgggacaactggtaccccagatcctgggacaactggtaccccagatcctggaacaactggtaccacacatgctaggacaacgggtcccccagatcctggaacaactggtaccactcctgtttctgctgaatgtccagtggtaaatgaattggaacgaattaattgcatccctgaccagccgccaacaaaggccacatgtgaccaacgtggctgttgctggaatccccagggagctgtaagtgttccctggtgctactattccaagaatcatagctaccatgtagagggcaaccttgtcaacacaaatgcaggattcacagcccggttgaaaaatctgccttcttcaccagtgtttggaagcaatgttgacaatgttcttctcacagcagaatatcagacatctaatcgtttccacttta

SEQ ID NO: 17804 - protein, 184 aa, Homo sapiens
MARKKLKKFTTLEIVLSVLLLVLFIISIVLIVLLAKESLKSTAPDPGTTGTPDPGTTGTPDPGTTGTTHARTTGPPDPGTTGTTPVSAECPVVNELERINCIPDQPPTKATCDQRGCCWNPQGAVSVPWCYYSKNHSYHVEGNLVNTNAGFTARLKNLPSSPVFGSNVDNVLLTAEYQTSNRFH

SEQ ID NO: 17805 - DNA, 6484 bp, Homo sapiens
attgctaagccatccttcagacagagagggagcggctgcaagaggtaatgagagatggcaagaaagaagctgaaaaaatttactactttggagattgtgctcagtgttcttctgcttgtgttgtttatcatcagtattgttctaattgtgcttttagccaaagagtcactgaaatcaacagccccagatcctgggacaactggtaccccagatcctgggacaactggtaccccagatcctggaacaactggtaccacacatgctaggacaacgggtcccccagatcctggaacaactggtaccactcctgtttctgctgaatgtccagtggtaaatgaattggaacgaattaattgcatccctgaccagccgccaacaaaggccacatgtgaccaacgtggctgttgctggaatccccagggagctgtaagtgttccctggtgctactattccaagaatcatagctaccatgtagagggcaaccttgtcaacacaaatgcaggattcacagcccggttgaaaaatctgccttcttcaccagtgtttggaagcaatgttgacaatgttcttctcacagcagaatatcagacatctaatcgtttccactttaagttgactgaccaaaccaataacaggtttgaagtgccccacgaacacgtgcagtccttcagtggaaatgctgctgcttctttgacctaccaagttgaaatctccagacagccatttagcatcaaagtgaccagaagaagcaacaatcgtgttttgtttgactcgagcattgggcccctactgtttgctgaccagttcttgcagctctccactcgactgcctagcactaacgtgtatggcctgggagagcatgtgcaccagcagtatcggcatgatatgaattggaagacctggcccatatttaacagagacacaactcccaatggaaacggaactaatttgtatggtgcgcagacattcttcttgtgccttgaagatgctagtggattgtcctttggggtgtttctgatgaacagcaatgccatggaggttgtccttcagcctgcgccagccatcacttaccgcaccattgggggcattctcgacttctatgtgttcttgggaaacactccagagcaagttgttcaagaatatctagagctcattgggcggccagcccttccctcctactgggcgcttggatttcacctcagtcgttacgaatatggaaccttagacaacatgagggaagtcgtggagagaaatcgcgcagcacagctcccttatgatgttcagcatgctgatattgattatatggatgagagaagggacttcacttatgattcagtggattttaaaggcttccctgaatttgtcaacgagttacacaataatggacagaagcttgtcatcattgtggatccagccatctccaacaactcttcctcaagtaaaccctatggcccatatgacaggggttcagatatgaagatatgggtgaatagttcagatggagtgactccactcattggggaggtctggcctggacaaactgtgtttcctgattataccaatcccaactgtgctgtttggtggacaaaggaatttgagctttttcacaatcaagtagagtttgatggaatctggattgatatgaatgaagtctccaactttgttgatggttcggtctcaggatgttccacaaacaacctaaataatcccccattcactcccagaatcctggatgggtacctgttctgcaagactctctgtatggatgcagtgcagcactggggcaagcagtatgacattcacaatctgtatggctactccatggcggtcgccacagcagaagctgccaagactgtgttccctaataagagaagcttcattctgacccgttctacctttgcgggctctggcaagtttgcagcacattggttaggagacaacactgccacctgggatgacctgagatggtccatccctggcgtgcttgagttcaacctttttggcatcccaatggtgggtcctgacatatgtggctttgctttggacacccctgaggagctctgtaggcggtggatgcagttgggtgcattttatccgttttctagaaatcacaatggccaaggctacaaggaccaggatcctgcctcctttggagctgactccctgctgttgaattcctccaggcactaccttaacatccgctatactctattgccctacctatacaccctcttcttccgtgctcacagccgaggggacacggtggccaggccccttttgcatgagttctacgaggacaacagcacttgggatgtgcaccaacagttcttatgggggcccggcctcctcatcactccagttctggatgaaggtgcagagaaagtgatggcatatgtgcctgatgctgtctggtatgactacgagactgggagccaagtgagatggaggaagcaaaaagtcgagatggaacttcctggagacaaaattggacttcaccttcgaggaggctacatcttccccacacagcagccaaatacaaccactctggccagtcgaaagaaccctcttggtcttatcattgccctagatgagaacaaagaagcaaaaggagaacttttctgggataatggggaaacgaaggatactgtggccaataaagtgtatcttttatgtgagttttctgtcactcaaaaccgcttggaggtgaatatttcacaatcaacctacaaggaccccaataatttagcatttaatgagattaaaattcttgggacggaggaacctagcaatgttacagtgaaacacaatggtgtcccaagtcagacttctcctacagtcacttatgattctaacctgaaggttgccattatcacagatattgatcttctcctgggagaagcatacacagtggaatggagcataaagataagggatgaagaaaaaatagactgttaccctgatgagaatggtgcttctgccgaaaactgcactgcccgtggctgtatctgggaggcatccaattcttctggagtccctttttgctattttgtcaacgacctatactctgtcagtgatgttcagtataattcccatggggccacagctgacatctccttaaagtcttccgtttatgccaatgccttcccctccacacccgtgaacccccttcgcctggatgtcacttaccataagaatgaaatgctgcagttcaagatttatgatcccaacaagaatcggtatgaagttccagtccctctgaacatacccagcatgccatccagcacccctgagggtcaactctatgatgtgctcattaagaagaatccatttgggattgaaattcgccggaagagtacaggcactataatttgggactctcagctccttggctttaccttcagtgacatgtttatccgcatctccacccgccttccctccaagtacctctatggctttggggaaactgagcacaggtcctataggagagacttggagtggcacacttgggggatgttctcccgagaccagcccccagggtacaagaagaattcctatggtgtccacccctactacatggggctggaggaggacggcagtgcccatggagtgctcctgctgaacagcaatgccatggatgtgacgttccagcccctgcctgccttgacataccgcaccacagggggagttctggacttttatgtgttcttggggccgactccagagcttgtcacccagcagtacactgagttgattggccggcctgtgatggtaccttactggtctttggggttccagctgtgtcgctatggctaccagaatgactctgagatcgccagcttgtatgatgagatggtggctgcccagatcccttatgatgtgcagtactcagacatcgactacatggagcggcagctggacttcaccctcagccccaagtttgctgggtttccagctctgatcaatcgcatgaaggctgatgggatgcgggtcatcctcattctggatccagccatttctggcaatgagacacagccttatcctgccttcactcggggcgtggaggatgacgtcttcatcaaatacccaaatgatggagacattgtctggggaaaggtctggcctgattttcctgatgttgttgtgaatgggtctctagactgggacagccaagtggagctatatcgagcttatgtggccttcccagactttttccgtaattcaactgccaagtggtggaagagggaaatagaagaactatacaacaatccacagaatccagagaggagcttgaagtttgatggcatgtggattgatatgaatgaaccatcaagcttcgtgaatggggcagtttctccaggctgcagggacgcctctctgaaccaccctccctacatgccacatttggagtccagggacaggggcctgagcagcaagaccctttgtatggagagtcagcagatcctcccagacggctccctggtgcagcactacaacgtgcacaacctgtatgggtggtcccagaccagacccacatacgaagccgtgcaggaggtgacgggacagcgaggggtcgtcatcacccgctccacatttccctcttctggccgctgggcaggacattggctgggagacaacacggccgcatgggatcagctgaagaagtctatcattggcatgatggagttcagcctcttcggcatatcctatacgggagcagatatctgtgggttctttcaagatgctgaatatgagatgtgtgttcgctggatgcagctgggggccttttaccccttctcaagaaaccacaacaccattgggaccaggagacaagaccctgtgtcctgggatgttgcttttgtgaatatttccagaactgtcctgcagaccagatacaccctgttgccatatctgtataccttgatgcataaggcccacacggagggcgtcactgttgtgcggcctctgctccatgagtttgtgtcagaccaggtgacatgggacatagacagtcagttcctgctgggcccagccttcctggtcagccctgtcctggagcgtaatgccagaaatgtcactgcatatttccctagagcccgctggtatgattactacacgggtgtggatattaatgcaagaggagagtggaagaccttgccagcccctcttgaccacattaatcttcatgtccgtgggggctacatcctgccctggcaagagcctgcactgaacacccacttaagccgccagaaattcatgggcttcaaaattgccttggatgatgaaggaactgctgggggctggctcttctgggatgatgggcaaagcattgatacctatgggaaaggactctattacttggccagcttttctgccagccagaatacgatgcaaagccatataattttcaacaattacatcactggtacaaatcctttgaaactgggctacattgaaatctggggagtgggcagtgtccccgttaccagtgtcagcatctctgtgagtggcatggtcataacaccctccttcaacaatgaccccacgacacaggtattaagcatcgatgtgactgacagaaacatcagcctacataattttacttcattgacgtggataagcactctgtgaatttttacagcaagattctaactaactatgaatgactttgaaactacttatacttcatactcataaaaattattgtgtgttgctaatttgttcatacccactattggtgaaatatttctgttaattttgttatatgttttttgtgtgaaccctaaaggttaaaccttagccctgtgggataggcagttagggaggtgtggaaaatctatgcattaccttaatgtctctgtgtggttagtatggtagtgactgttcatcatatgacatttactgaagatgaactgggtccatgatgaagtgtgtgtatgtccacgtttgtaatcatagaatggaccccattcttttgttaaatacacaagagaaagctttctgtgacagttccaggtcttgaagctaatcagcatctcaagaaagtatccagaaagaacatctgctagttggttataggcggtgggaggaataatatacctaattggttataggtggggggagcatgataagcaaagaaaaggcaaacacaaggaaagatcagatgaaacagaagatgatagtaaaagtgatcctaagtaagaacataatgtaaaattgtcagcagcctcatggggaggaaaaaggaagagtcaactcacttgaagaagagggtcttgagaaatccttagcataaagggctactggtgagattgagatctgagcaggcaaagctcaaaagagagtttggaggttaaaaataatttatttttgcagtagtgtgctttgaaatgtgtaaatcttatttctaatgtatacaaccacatttcacataaaaatatgcaatttatatgccagataaaaataaaacaagtgaatttgcaagtga

SEQ ID NO: 17806 - protein, 1857 aa, Homo sapiens
MARKKLKKFTTLEIVLSVLLLVLFIISIVLIVLLAKESLKSTAPDPGTTGTPDPGTTGTPDPGTTGTTHARTTGPPDPGTTGTTPVSAECPVVNELERINCIPDQPPTKATCDQRGCCWNPQGAVSVPWCYYSKNHSYHVEGNLVNTNAGFTARLKNLPSSPVFGSNVDNVLLTAEYQTSNRFHFKLTDQTNNRFEVPHEHVQSFSGNAAASLTYQVEISRQPFSIKVTRRSNNRVLFDSSIGPLLFADQFLQLSTRLPSTNVYGLGEHVHQQYRHDMNWKTWPIFNRDTTPNGNGTNLYGAQTFFLCLEDASGLSFGVFLMNSNAMEVVLQPAPAITYRTIGGILDFYVFLGNTPEQVVQEYLELIGRPALPSYWALGFHLSRYEYGTLDNMREVVERNRAAQLPYDVQHADIDYMDERRDFTYDSVDFKGFPEFVNELHNNGQKLVIIVDPAISNNSSSSKPYGPYDRGSDMKIWVNSSDGVTPLIGEVWPGQTVFPDYTNPNCAVWWTKEFELFHNQVEFDGIWIDMNEVSNFVDGSVSGCSTNNLNNPPFTPRILDGYLFCKTLCMDAVQHWGKQYDIHNLYGYSMAVATAEAAKTVFPNKRSFILTRSTFAGSGKFAAHWLGDNTATWDDLRWSIPGVLEFNLFGIPMVGPDICGFALDTPEELCRRWMQLGAFYPFSRNHNGQGYKDQDPASFGADSLLLNSSRHYLNIRYTLLPYLYTLFFRAHSRGDTVARPLLHEFYEDNSTWDVHQQFLWGPGLLITPVLDEGAEKVMAYVPDAVWYDYETGSQVRWRKQKVEMELPGDKIGLHLRGGYIFPTQQPNTTTLASRKNPLGLIIALDENKEAKGELFWDNGETKDTVANKVYLLCEFSVTQNRLEVNISQSTYKDPNNLAFNEIKILGTEEPSNVTVKHNGVPSQTSPTVTYDSNLKVAIITDIDLLLGEAYTVEWSIKIRDEEKIDCYPDENGASAENCTARGCIWEASNSSGVPFCYFVNDLYSVSDVQYNSHGATADISLKSSVYANAFPSTPVNPLRLDVTYHKNEMLQFKIYDPNKNRYEVPVPLNIPSMPSSTPEGQLYDVLIKKNPFGIEIRRKSTGTIIWDSQLLGFTFSDMFIRISTRLPSKYLYGFGETEHRSYRRDLEWHTWGMFSRDQPPGYKKNSYGVHPYYMGLEEDGSAHGVLLLNSNAMDVTFQPLPALTYRTTGGVLDFYVFLGPTPELVTQQYTELIGRPVMVPYWSLGFQLCRYGYQNDSEIASLYDEMVAAQIPYDVQYSDIDYMERQLDFTLSPKFAGFPALINRMKADGMRVILILDPAISGNETQPYPAFTRGVEDDVFIKYPNDGDIVWGKVWPDFPDVVVNGSLDWDSQVELYRAYVAFPDFFRNSTAKWWKREIEELYNNPQNPERSLKFDGMWIDMNEPSSFVNGAVSPGCRDASLNHPPYMPHLESRDRGLSSKTLCMESQQILPDGSLVQHYNVHNLYGWSQTRPTYEAVQEVTGQRGVVITRSTFPSSGRWAGHWLGDNTAAWDQLKKSIIGMMEFSLFGISYTGADICGFFQDAEYEMCVRWMQLGAFYPFSRNHNTIGTRRQDPVSWDVAFVNISRTVLQTRYTLLPYLYTLMHKAHTEGVTVVRPLLHEFVSDQVTWDIDSQFLLGPAFLVSPVLERNARNVTAYFPRARWYDYYTGVDINARGEWKTLPAPLDHINLHVRGGYILPWQEPALNTHLSRQKFMGFKIALDDEGTAGGWLFWDDGQSIDTYGKGLYYLASFSASQNTMQSHIIFNNYITGTNPLKLGYIEIWGVGSVPVTSVSISVSGMVITPSFNNDPTTQVLSIDVTDRNISLHNFTSLTWISTL

SEQ ID NO: 17807 - DNA, 499 bp, Homo sapiens
gccaggaactgattaagaactctatttagagcccagaacagagttgtttatcctgaataataacagtgaaaatttgatttcattttactatggaaattcctaggtgctaattgtggactttgtatattctttcaggatgttcagcatgctgatattgattatatggatgagagaagggacttcacttatgattcagtggattttaaaggcttccctgaatttgtcaacgagttacacaataatggacagaagcttgtcatcattgtggatccagccatctccaacaactcttcctcaagtaaaccctatggcccatatgacaggggttcagatatgaagatatgggtgaatagttcagatggagtgactccactcattggggaggtctggcctggacaaactgtgtttcctgattataccaatcccaactgtgctgtttggtggacaaaggaatttgagctttttcacaatcaagtagagtttgatggaatctggattg

SEQ ID NO: 17808 - protein, 111 aa, Homo sapiens
MDERRDFTYDSVDFKGFPEFVNELHNNGQKLVIIVDPAISNNSSSSKPYGPYDRGSDMKIWVNSSDGVTPLIGEVWPGQTVFPDYTNPNCAVWWTKEFELFHNQVEFDGIW

SEQ ID NO: 17809 - DNA, 397 bp, Homo sapiens
cagcacttgggatgtgcaccaacagttcttatgggggcccggcctcctcatcactccagttctggatgaaggtgcagagaaagtgatggcatatgtgcctgatgctgtctggtatgactacgagactgtaagtagctttgacttttcttctactccttaagactgtagctgcagctgcatagacaagctacctttctggagagagaaacatccatctacatgctgaggagtagtttttagtgttttctgtaatttcatagcagaacctgggtaaagttaacctaaaccgttaacatcagtcatgatgaaatgtgaaaaaataccttcatatactttatttagcaataagataggctgacatagtatctcataaattaatattggaggaactgatgga

SEQ ID NO: 17810 - DNA, 4674 bp, Homo sapiens
tacgtatctatctatctacctatctcagtctatcatatctatgtatctaccgatcaatgtattaattcatccacccactctatctatccatccatcctctatctatctatctatctatctatctatctatctatctatctatctatctatccatccagccaccctattcatttatgtctgtctgtctgtctgtctgtctgtctatctatctatctatctatctatctatctatctatctatctatctatctatcattctatcctatctatgtaccatctatctatctatctatctatctatctatctatctatctatctatctaatctatctccacctctattcatccactcaccctatctatccaaatccctcttctgtctatcatttatctacctatttatatatcatctatctctatgtatgtatgtatgtatgtatgtatgtatgtatctatctatctatctatctatctatctatctatctatactgttcaagggagaagacctagcttcctgtcctctcgtcacctctcacagagaatcacttgaagcttagtggtccaagcagcccacatggacacaggaacctgcccagccagagaagttctgggtcatgggcttcctgacttttatcaagtagtcagtatcagaaccccacagttcatcagccagtaggggcaacactgccatcctgaggcaatttggaaatctgagggcagtgttggttatcacagggacaccagaggcattcagtgggcagtgggcagggatgcccatagctctgatttcagggaattctccacaaaatatctctcacctcaaacgccagttatacccctgatgagaaacacttcattagggagtcacagaatctgttagctcataagaaattcttggtagataggataattataactattggttggtacaaaggtaattgtagtttttgccattgaaagttattaaaagtaggccgggcatggtggctcatgcctgcaatcccagcactttgggaggctgatcacgaggtcaggagttcaagatcaacctgaccaccatggtgaaaccccatctttactaaaaatacaaaagttagccaggcgtggtggcacgcgcctgtaatcccacttaggaggctgaggtaggagaatcgcttgaacccgggaggcagaggttgcagtgagccaggattgagccactgcactccagcctgggtgacacagcgagactccgtctcagaagaaaaaaaaaggaaggaaagttattaaaagtaatgacaaaaacttcaattacctttgcaccaacctaatatttatattattaataaagacccactcgatgaagctggtgaggatgaagccactgatgtccaggtctggctttactgaatataaaacaaacagccaacagccccatgaaaagcagatttctgagtccaaagctccagcaatttaattcaataagtctgatgggatctaggaattgcattttgtagcatgcaatgtgccacaaaaagagtgctaggtgatcctgaggcccagtgtgtgggtggttatatcactgtttgaagactggagaaagtgaaggcagaagccacaaaggcaagacttgaatatgcacaggtgtaaggtagagccagcacgttggagaacggcagaacatttttatgaagttggaaggggtcatccgagcagtacttagggaagttcctacatcatggctggccaagttcaccacgtgtaccccatatgggatacaattctgactcagctgtggctgataatctctttattctaattctccatcccccacccatcccgtcgtttctaacccttcctgatctggagctctctgtttctggtgaaagattctctttgtcaggtttcctagcttctacctccatttcctaacaaaaggcatccctggcatgcccacttctgtcaagattctccgtgatgtgacccactgtcttctcacatccttgacagccagacccatgtaggctggtctgtttctgttttctcatgttccttttcttgccctttatgtagacatatgggttcctacctgccttttgtctattgtgtgtaagaactggagttccccagaccaagtcctcattctgttgcctccccgaacctcctcaccagcattctttagctctttaactcttacaatggtgtgattgtcataaaggaggctatttactgagacatacaaaggaccataatgttccgtaacaagcaacatttatttgctgcttcgaagtggtgtgaacccaccattaaacagtgagtatatattttgtgtcaagttctaagctaagcattgtgcaaaatataaatgtcactcagatgaatataaaacaagcttcttgctctcaaaagtctacaatgtagttaagaagttgtatctggctgggcatggtgtctcatgcctgttatcctatcactttgggaggctgaggtgtgtggatcactttaggtcaggaatttgagaccagcctgaacaacatgaggaaactacgtctctactagaaatacaaaaattagccaggtgtagtggtgtgtgcctgtaatcccagctactcaggaggctgaggcaaaagaatcgcgagaacctggaaggcagaggtttcatggtgctatgtcagctcagtgcaacctctgcctcccaggttcaagtgattctcctgcctcaacctgccgagtagctaggactacaggcacgtgccaccaggcccggccaatttaaatttttttttttatttttagtagaaacagcattccaccatgttagtcaggatggtcttgatctcctgacctcatgatccgcctgactcggcctcccaaagtgctgagatgacagacgtgagccaccgtgtccagcccgcaaatcttatggtacccacagaatttttttctgccccagacacaacctcagttgtttgtctctttaagagggaatggcgtaagcctatttctataagcaaatagtgaatttttttttttcccgaagtcctgggtaccaaagtgctttatgaaagccacttgttttggggtagacagatctctcctgtttgaaaaaggaaaagggatggaaggtttcctcaataggtgacctcctgggacatgaggcaagtgggcccaaggccatcacaattatttaacctctttcctaagtattttggtttctctgtcctggaaaatggtgccactgccacaccttgtttatgtttcattttagaatgccagaaatgtcactgcatatttccctagagcccgctggtatgattactacacgggtgtggatattaatgcaagaggagagtggaagaccttgccagcccctcttgaccacattaatcttcatgtccgtgggggctacatcctgccctggcaagagcctgcactgaacacccacttaagccgccagaaattcatgggcttcaaaattgccttggatgatgaaggaactgctgggggctggctcttctgggatgatgggcaaagcattgatacctatgggaaaggactctattacttggccagcttttctgccagccagaatacgatgcaaagccatataattttcaacaattacatcactggtacaaatcctttgaaactgggctacattgaaatctggggagtgggcagtgtccccgttaccagtgtcagcatctctgtgagtggcatggtcataacaccctccttcaacaatgaccccacgacacaggtattaagcatcgatgtgactgacagaaacatcagcctacataattttacttcattgacgtggataagcactctgtgaatttttacagcaagattctaactaactatgaatgactttgaaactacttatacttcatactcataaaaattattgtgtgttgctaatttgttcatacccactattggtgaaatatttctgttaattttgttatatgttttttgtgtgaaccctaaaggttaaaccttagccctgtgggataggcagttagggaggtgtggaaaatctatgcattaccttaatgtctctgtgtggttagtatggtagtgactgttcatcatatgacatttactgaagatgaactgggtccatgatgaagtgtgtgtatgtccacgtttgtaatcatagaatggaccccattcttttgttaaatacacaagagaaagctttctgtgacagttccaggtcttgaagctaatcagcatctcaagaaagtatccagaaagaacatctgctagttggttataggcggtgggaggaataatatacctaattggttataggtggggggagcatgataagcaaagaaaaggcaaacacaaggaaagatcagatgaaacagaagatgatagtaaaagtgatcctaagtaagaacataatgtaaaattgtcagcagcctcatggggaggaaaaaggaagagtcaactcacttgaagaagagggtcttgagaaatccttagcataaagggctactggtgagattgagatctgagcaggcaaagctcaaaagagagtttggaggttaaaaataatttatttttgcagtagtgtgctttgaaatgtgtaaatcttatttctaatgtatacaaccacatttcacataaaaatatgcaatttatatgccagataaaaataaaacaagtgaatttgcaagtga

SEQ ID NO: 17811 - protein, 124 aa, Homo sapiens [sequence omitted]

SEQ ID NO: 17812 - DNA, 1583 bp, Homo sapiens
agtgctccctatgaattgctgagggagagatacagcatagaaaaaaacaaggtgatgcgatggcgaggaagctcagtgtattggaagtccttctgatcatcttctgcttaattgtggtgaccatagatatcctcttgctgcttcttgtgttggaggaaacttcagatacttcatttactccagagtgcccagagattccccagtcggaaaggatagactgcacacctgaccaggaggtgaccgaggatatctgcagatggcaatataagtgctgctggtcgcctgtggcagatgccaatgtccctaggtgcttcttcccctggaactggggctatgaagccagcaatggccatacaaatacaagcacaggatttactgcccagttgaaaaggttgccatcaccatctctgtttggaaatgatgtcgccaccacccttttcacagctgaatatcagacatccaatcggtttcattttaagatcactgactttaataacatacgctatgaagtttcccatgaaaatattaacctggttgatgggattgctgatgcctccaatttgagctattacgtggaggttactgataaacctttcagcatcaaaataatgaggacaagcaacagaagagtcttgttggacacgagcatcgggcccctccagtttgcccagcagtacctgcaactgtctttccgactgcccagtgccaatgtgtatgggctgggagagcatgtgcaccagcagtaccgccacaatatgacctggaagacttggcccatcttcacccgggacgctacccccaccgagggcatgattaatctgtatggagctcatacattcttcttgtgccttgaagatgccaggggctcctcttttggagtatttctgatgaacagtaatgccatggaggttacccttcagccagctcctgcgatcacttatcgcacgattggaggcattcttgacttttacgtattcctaggaaacactccagaacaagtggttcaggaatacttggagcttgttggacggccattcttccctccctattggagtcttgggttccagcttagtcgcagggactatggtggcatcaataaattgaaagaagttgtaagccgaaatcgtttagctgagataccatatgatgtccagtactctgacatagactacatggatggaaagaaggatttcactgttgatgaagtcgcttactctggtctcccagattttgtcaaggagttacatgacaatggacagaaatatcttattattatgaatcctggcatctccaaaaactctaactacgagccctataataatggaagcctaaagagagtgtggatcttggggagcaatggctttgctgttggggagggatatccgggaccgacagtctttcccgattataccaatccagtatgcactgagtggtggacagatcaggtcgctaaatttcatgatcatctggagtttgatggagtgtggattgtaagttattattcctgactcaaatttcctttggaaacagataacgccaaattttcagatgagttttgaccttgatgtcaaataaatgtcaat

SEQ ID NO: 17813 - protein, 482 aa, Homo sapiens
MARKLSVLEVLLIIFCLIVVTIDILLLLLVLEETSDTSFTPECPEIPQSERIDCTPDQEVTEDICRWQYKCCWSPVADANVPRCFFPWNWGYEASNGHTNTSTGFTAQLKRLPSPSLFGNDVATTLFTAEYQTSNRFHFKITDFNNIRYEVSHENINLVDGIADASNLSYYVEVTDKPFSIKIMRTSNRRVLLDTSIGPLQFAQQYLQLSFRLPSANVYGLGEHVHQQYRHNMTWKTWPIFTRDATPTEGMINLYGAHTFFLCLEDARGSSFGVFLMNSNAMEVTLQPAPAITYRTIGGILDFYVFLGNTPEQVVQEYLELVGRPFFPPYWSLGFQLSRRDYGGINKLKEVVSRNRLAEIPYDVQYSDIDYMDGKKDFTVDEVAYSGLPDFVKELHDNGQKYLIIMNPGISKNSNYEPYNNGSLKRVWILGSNGFAVGEGYPGPTVFPDYTNPVCTEWWTDQVAKFHDHLEFDGVWIVSYYS

SEQ ID NO: 17814 - DNA, 227 bp, Homo sapiens
ggacgataaaattagctggctgtttgtccattcccaagattgtgatatctgtgaacatgaggttgtcagtgtccatataattattatttataatctttgcttgtagatggttagaggtaacagagaaatcatatagaatatacttcttttcagtcacagcatctttagatacaccgtcatcccagtacagctccccctttgcttctctcttatagtccaaggcgatg

SEQ ID NO: 17815 - protein, 44 aa, Homo sapiens
LLFIIFACRWLEVTEKSYRIYFFSVTASLDTPSSQYSSPFASLL

SEQ ID NO: 17816 - DNA, 403 bp, Homo sapiens
ctctgattctctctctgcaaagatcagcttcctccacctgaaagtgatctatcacacagcaaccatgctgcaggtcaagatctatgaccccactaataaaaggtatgaggttccagtaccactgaacacccctccccaaccagttggtgaccctgaaaaccgtctgtatgatgtcaggattcagaacaatccttttggaatccagattcaacgcaaaaactccagcactgtgatttgggattctcaactccctggcttcatcttcaatgacatgtttctctccatttctacgcgtctgccgtcccagtacatctatggctttggggaaactgagcacacgactttcagaagaaacatgaactggaacacatggggaatgtttgctcatgatgagccacctgcg

SEQ ID NO: 17817 - protein, 112 aa, Homo sapiens
MLQVKIYDPTNKRYEVPVPLNTPPQPVGDPENRLYDVRIQNNPFGIQIQRKNSSTVIWDSQLPGFIFNDMFLSISTRLPSQYIYGFGETEHTTFRRNMNWNTWGMFAHDEPP

SEQ ID NO: 17818 - DNA, 656 bp, Homo sapiens
gatttaattacagcagttacaattaattcaagtgaaatattaatctcagagactctatggaaataggtgtgcatttgttagagtatatctatttttcccatgctttaatggataatttgtttttggttagtcattaacaaaaataatcaatcaaagtttaaagaaatgaagtattgtttgatttcagagaaagaaaaatacatgttctacttactgttcttaagtagaacagaaaactctaataagtacagcagataacctaagatacaaatgagttccatattatgtctcattaagaaataataagaggcaggagagaggggcaaaggttaaaaaggagaaagaaatagcttcttgtaacgtttgcttctgtggacacagaagccttcaagccttttcacaatgttaagcataaaaggaattgtcatctcccatctcttgtcctgctgctgaatagaatgaagtgaaagtctggattttgcctgggttgggattctcaactccctggcttcatcttcaatgacatgtttctctccatttctacgcgtctgccgtcccagtacatctatggctttggggaaactgagcacacgactttcagaagaaacatgaactggaacacatggggaatgtttgctcatgatgagccacctgcg

SEQ ID NO: 17819 - protein, 43 aa, Homo sapiens
MFLSISTRLPSQYIYGFGETEHTTFRRNMNWNTWGMFAHDEPP

SEQ ID NO: 17820 - DNA, 264 bp, Homo sapiens
ggccctgctatcttaatcagccctgtgttggaaactagcacatttgagatctctgcttattttccgagagcccgttggtatgactatagcacgggaactagcagcacatcaacaggtcagaggaaaatcctgaaggctccccttgaccacatcaaccttcatgtcagaggaggctacatcctgccctggcaagagcctgctatgaacactcactccagtcgacaaaattttatgggattgattgttgctttggatgacaatggg

SEQ ID NO: 17821 - protein, 36 aa, Homo sapiens
PHQPSCQRRLHPALARACYEHSLQSTKFYGIDCCFG

SEQ ID NO: 17822 - DNA, 1129 bp, Homo sapiens
cgtctgtagagatatcatgaacttcaacttagctttggtactttcttccctgaagacagagggcagaactctgagttccagaaccattttcaactgtattggggaccaatcacttgactctattcttgtctctctgacagatgacgctacactctcctctgaataatggacaccatttctaaaactgaatcctgctactaaaataattcagatgatatatttttccaattctacaatcttgctttgttttatttagttgttttctctctctcttcccagttttccagagactggagctaaactgggctttcaacatcatcatgaagtttatcctcctctgggccctcttgaatctgactgttgctttggcctttaatccagattacacagtcagctccactcccccttacttggtctatttgaaatctgactacttgccctgcgctggagtcctgatccacccgctttgggtgatcacagctgcacactgcaatttaccaaagcttcgggtgatattgggggttacaatcccagcagactctaatgaaaagcatctgcaagtgattggctatgagaagatgattcatcatccacacttctcagtcacttctattgatcatgacatcatgctaatcaagctgaaaacagaggctgaactcaatgactatgtgaaattagccaacctgccctaccaaactatctctgaaaataccatgtgctctgtctctacctggagctacaatgtgtgtgatatctacaaagagcccgattcactgcaaactgtgaacatctctgtaatctccaagcctcagtgtcgcgatgcctataaaacctacaacatcacggaaaatatgctgtgtgtgggcattgtgccaggaaggaggcagccctgcaaggaagtttctgctgccccggcaatctgcaatgggatgcttcaaggaatcctgtcttttgcggatggatgtgttttgagagccgatgttggcatctatgccaaaattttttactatataccctggattgaaaatgtaatccaaaataactgagctgtggcagttgtggaccatatgacacagcttgtccccatcgttcacctttagaattaaatataaattaactcctcacattg

SEQ ID NO: 17823 - protein, 241 aa, Homo sapiens; identical to SEQ ID NO: 2130

SEQ ID NO: 17824 - DNA, 918 bp, Homo sapiens
aaggctggcaaaaaggagaccagacaggaggcgtctgtagagatatcatgaacttcaacttagctttgttttccagagactggagctaaactgggctttcaacatcatcatgaagtttatcctcctctgggccctcttgaatctgactgttgctttggcctttaatccagattacacagtcagctccactcccccttacttggtctatttgaaatctgactacttgccctgcgctggagtcctgatccacccgctttgggtgatcacagctgcacactgcaatttaccaaagcttcgggtgatattgggggttacaatcccagcagactctaatgaaaagcatctgcaagtgattggctatgagaagatgattcatcatccacacttctcagtcacttctattgatcatgacatcatgctaatcaagctgaaaacagaggctgaactcaatgactatgtgaaattagccaacctgccctaccaaactatctctgaaaataccatgtgctctgtctctacctggagctacaatgtgtgtgatatctacaaagagcccgattcactgcaaactgtgaacatctctgtaatctccaagcctcagtgtcgcgatgcctataaaacctacaacatcacggaaaatatgctgtgtgtgggcattgtgccaggaaggaggcagccctgcaaggaagtttctgctgccccggcaatctgcaatgggatgcttcaaggaatcctgtcttttgcggatggatgtgttttgagagccgatgttggcatctatgccaaaattttttactatataccctggattgaaaatgtaatccaaaataactgagctgtggcagttgtggaccatatgacacagcttgtccccatcgttcacctttagaattaaatataaattaactcctcacattg

SEQ ID NO: 17825 - protein, 241 aa, Homo sapiens; identical to SEQ ID NO: 2130

SEQ ID NO: 17826 - DNA, 2054 bp, Homo sapiens
aagatttgtaggataggaaaggaggcaccaggacctcggcttggtctgtgccactctctttcacccacatcagagacggctcccagcaatgccgtatatatttgggtcttgataaggactcatgtgaagactgctctcctctcatctgtcttctgcccataatctccacagctgttcttggcaaggacacttggactaaagattgggacagtttacagcttgatcaacttgtctgttcctggcgagatctgtctgccacgaagggttttctcatcgtcgctctcttgagtgcagctggagctgctctggctaaagactctaaagataatcaggagctgacatataattttactattccttacatggtctatcttcagtccttcccagaaccctgcgtggggtctctcattcaccttgactgggtattgacagctgcccactgccccttacctgttgaaattcgactgggagtttctcaacctagcatcacaaacaagaaacaacagatatgaaactattcatcgattgtgacctaccctgactttgatgcaaaatccttgaacgatgacctaatgatgatcaagctatcaacacctgcttcactcaacccccatgtggggactatagccatagccttggaacccattccatttaatgaatcctgctttattccaacctggacctggaatgaatataaaaaccgtatgtgttggatgctgtgttctttatgctgaggaggttggagctgggagaaaatgtagagggatgtccctaatggaaatcgctgctatgagacaatgttgtccaccatagagggattcctgccagggacccaaaccaccatcactggaggtcaaagataaaattcaaagagactgataaagggcagccactctgacaccaacaaatggagcagacagtaattttcatatctctagaatattgaagacaagagtccagagaactggattgaaatacaggtgggagaaataggagtcctcgtgcacaaagacagtatgaaggcagcctgcgggagggtgacacccattgatagttgctgaaagcccatcacacaatggaagaacagtgggggaaatgaacataaaatatatgtgatgcggtgaagcagcagaagatgcttcctacaccttccgcagagaacccagttatgtgcagagaaccctgggagagaagagaatggttgagggagtacctgtcctgtcaccagagctggttccctgcacagagtgctactcatacccactgcttcttcccagagttcccatttaggggtggagactttggtggttcgtagggaaattgattattatgacataatcagttgttatctccctggtctgacatgcctcacaagaaaaacagtggcagcccatgttgtaagcacacatccatctcccctgtgagctgaaattgggatgagcagaaagatccggtctcagcaggagtctgtctaataaagaacacctgtgaagaaaactactttctaataagtttgttggtccttgttggctgttactccattattctctccttaggtattgttgaggatgaggataccaccacttgatatctgaaatgaaatgacaaatgtaaatctattgcttattacagcaagtcagagcaatgctgaccaggcaccatcccactaagcagaatggagtgctgattagcataaggggtttgtgggaagcttggagttgagggattggaggactttcagaggtatgaatgggttccatcatctgttgaggcctggctacttcagggggattgctgttgattgattggtgctctgaggcgtgtttttcagaggacctctgatcctgatcagctggttttaagaagtgaaggctgacattgattatactgcaaaagttatgttcactcaagcaagttgtcctggatctattaatcaggtttaaatctctctctggtggctacagaacaatgcacgtgctctgtaaaagcaaataaaagtggaattttagaagtcagtctttggtaaaaaacagaaataaaaagcagaaactatt

SEQ ID NO: 17827 - protein, 49 aa, Homo sapiens
MVYLQSFPEPCVGSLIHLDWVLTAAHCPLPVEIRLGVSQPSITNKKQQI

SEQ ID NO: 17828 - DNA, 456 bp, Homo sapiens
tagtgggatggtgcctggtcagcattgctctgacttgctgtaataagcaatagatttacatttgtcatttcatttcagatatcaagtggtggtatcctcatcctcaacaatacctaaggagagaataatggagtaacagccaacaaggaccaacaaacttattagaaagtagttttcttcacaggtgttctttattagacagactcctgctgagaccggatctttctgctcatcccaatttcagctcacaggggagatggatgttgagaaactcccagtcgaatttcaacactttggaagaaagagggcagagagatgagaagaaagagagtcataagataatggattacaagaaatcctacgggccaccctctttaattattttaactttatttcttaacctgagaactgacatggccttcttttgtctataaaacaatagcagtaatttacaga

SEQ ID NO: 17829 - protein, 57 aa, Homo sapiens [sequence omitted]

SEQ ID NO: 17830 - DNA, 384 bp, Homo sapiens
gtggtgaaaaagggacacagattgtctccagagaccaggcctgctatagcaaatttctagttggaaaacaagaaagatcttggaggaaaggaatatacaggcgacactaaagccactgctcagggtgttgtcccagccagagatgaggcactgagtaccagccgctgcacaggatcttggcagagagatggtggccacttgagagttgatggtggcgactgagctcagcttaatcagcatgatgtcattatcaatggtggctgagttatacttggggtggcaaataatcttggctgcatttatgaattgttcattgccttcatagaccttaatgttgtattctccaagatgcacatggattcggctggattaaaagatataaga

SEQ ID NO: 17831 - protein, 38 aa, Homo sapiens [sequence omitted]

SEQ ID NO: 17832 - DNA, 448 bp, Homo sapiens
agaccttgcctgtggggccatgggagctcaaaatgcccctcctttcctccacaggaccagatgcctgagctaggaaaggcctcattcctgctgtgatcctgccatggatacctggctcgtatgctgggcaatttttagtctcttgaaagcaggactcacagaacctgaagtcacccagactcccagccatcaggtcacacagatgggacaggaagtgatcttgcgctgtgtccccatctctaatcacttatacttctattggtacagacaaatcttggggcagaaagtcgagtttctggtttccttttataataatgaaatctcagagaagtctgaaatattcgatgatcaattctcagttgaaaggcctgatggatcaaatttcactctgaagatccggtccacaaagctggaggactcagccatgtacttctgtgccagcagtgaa

SEQ ID NO: 17833 - protein, 114 aa, Homo sapiens
MDTWLVCWAIFSLLKAGLTEPEVTQTPSHQVTQMGQEVILRCVPISNHLYFYWYRQILGQKVEFLVSFYNNEISEKSEIFDDQFSVERPDGSNFTLKIRSTKLEDSAMYFCASS

SEQ ID NO: 17834 - DNA, 493 bp, Homo sapiens
caggaagaaacatcccctgggtctggggaaactatcaggagcagtgacatcacaagaaaaaccaccaaccagggccaaggagaccagagcccagcacctcgcccaaaggaccccagtcagaggccccatctcagacccgaggctagcatgggctgcaggctgctctgctgtgcggttctctgtctcctgggagcagttcccatagacactgaagttacccagacaccaaaacacctggtcatgggaatgacaaataagaagtctttgaaatgtgaacaacatatggggcacagggctatgtattggtacaagcagaaagctaagaagccaccggagctcatgtttgtctacagctatgagaaactctctataaatgaaagtgtgccaagtcgcttctcacctgaatgccccaacagctctctcttaaaccttcacctacacgccctgcagccagaagactcagccctgtatctctgcgccagcagccaagaca

SEQ ID NO: 17835 - protein, 114 aa, Homo sapiens
MGCRLLCCAVLCLLGAVPIDTEVTQTPKHLVMGMTNKKSLKCEQHMGHRAMYWYKQKAKKPPELMFVYSYEKLSINESVPSRFSPECPNSSLLNLHLHALQPEDSALYLCASSQ

SEQ ID NO: 17836 - DNA, 1225 bp, Homo sapiens
aggaggaccaagccctgagcacagacacagtgctgcctgcccctttgtgccatgggctccaggctgctctgttgggtgctgctttgtctcctgggagcaggcccagtaaaggctggagtcactcaaactccaagatatctgatcaaaacgagaggacagcaagtgacactgagctgctcccctatctctgggcataggagtgtatcctggtaccaacagaccccaggacagggccttcagttcctctttgaatacttcagtgagacacagagaaacaaaggaaacttccctggtcgattctcagggcgccagttctctaactctcgctctgagatgaatgtgagcaccttggagctgggggactcggccctttatctttgcgccagcagcttgctgtgctcctataattcacccctccactttgggaacgggaccaggctcactgtgacagaggacctgaacaaggtgttcccacccgaggtcgctgtgtttgagccatcagaagcagagatctcccacacccaaaaggccacactggtgtgcctggccacaggcttcttccccgaccacgtggagctgagctggtgggtgaatgggaaggaggtgcacagtggggtcagcacagacccgcagcccctcaaggagcagcccgccctcaatgactccagatactgcctgagcagccgcctgagggtctcggccaccttctggcagaacccccgcaaccacttccgctgtcaagtccagttctacgggctctcggagaatgacgagtggacccaggatagggccaaacccgtcacccagatcgtcagcgccgaggcctggggtagagcagactgtggctttacctcggtgtcctaccagcaaggggtcctgtctgccaccatcctctatgagatcctgctagggaaggccaccctgtatgctgtgctggtcagcgcccttgtgttgatggccatggtcaagagaaaggatttctgaaggcagccctggaagtggagttaggagcttctaacccgtcatggtttcaatacacattcttcttttgccagcgcttctgaagagctgctctcacctctctgcatcccaatagatatccccctatgtgcatgcacacctgcacactcacggctgaaatctccctaacccagggggaccttagcatgcctaagtgactaaaccaataaaaatgttctggtctggcctgactctgacttgtgaa

SEQ ID NO: 17837 - protein, 310 aa, Homo sapiens
MGSRLLCWVLLCLLGAGPVKAGVTQTPRYLIKTRGQQVTLSCSPISGHRSVSWYQQTPGQGLQFLFEYFSETQRNKGNFPGRFSGRQFSNSRSEMNVSTLELGDSALYLCASSLLCSYNSPLHFGNGTRLTVTEDLNKVFPPEVAVFEPSEAEISHTQKATLVCLATGFFPDHVELSWWVNGKEVHSGVSTDPQPLKEQPALNDSRYCLSSRLRVSATFWQNPRNHFRCQVQFYGLSENDEWTQDRAKPVTQIVSAEAWGRADCGFTSVSYQQGVLSATILYEILLGKATLYAVLVSALVLMAMVKRKDF

SEQ ID NO: 17838 - DNA, 401 bp, Homo sapiens
gttcccctatcaccgatgcacagacccagaagacccctccatcctgtagcacctgccatgagcatcgggctcctgtgctgtgtggccttttctctcctgtgggcaagtccagtgaatgctggtgtcactcagaccccaaaattccaggtcctgaagacaggacagagcatgacactgcagtgtgcccaggatatgaaccataactccatgtactggtatcgacaagacccaggcatgggactgaggctgatttattactcagcttctgagggtaccactgacaaaggagaagtccccaatggctacaatgtctccagattaaacaaacgggagttctcgctcaggctggagtcggctgctccctcccagacatctgtgtacttctgtgccagcagtgaagc

SEQ ID NO: 17839 - protein, 127 aa, Homo sapiens
MHRPRRPLHPVAPAMSIGLLCCVAFSLLWASPVNAGVTQTPKFQVLKTGQSMTLQCAQDMNHNSMYWYRQDPGMGLRLIYYSASEGTTDKGEVPNGYNVSRLNKREFSLRLESAAPSQTSVYFCASS

SEQ ID NO: 17840 - DNA, 1018 bp, Homo sapiens
gatatgaaccataactccatgtactggtatcgacaagacccaggcatgggactgaggctgatttattactcagcttctgagggtaccactgacaaaggagaagtccccaatggctacaatgtctccagattaaacaaacgggagttctcgctcaggctggagtcggctgctccctcccagacatctgtgtacttctgtgccagcatgcgaacaccggggagctgttttttggagaaggctctaggctgaccgtactggaggacctgaaaaacgtgttcccacccgaggtcgctgtgtttgagccatcagaagcagagatctcccacacccaaaaggccacactggtatgcctggccacaggcttctaccccgaccacgtggagctgagctggtgggtgaatgggaaggaggtgcacagtggggtcagcacagacccgcagcccctcaaggagcagcccgccctcaatgactccagatactgcctgagcagccgcctgagggtctcggccaccttctggcagaacccccgcaaccacttccgctgtcaagtccagttctacgggctctcggagaatgacgagtggacccaggatagggccaaacccgtcacccagatcgtcagcgccgaggcctggggtagagcagactgtggcttcacctccgagtcttaccagcaaggggtcctgtctgccaccatcctctatgagatcttgctagggaaggccaccttgtatgccgtgctggtcagtgccctcgtgctgatggccatggtcaagagaaaggattccagaggctagctccaaaaccatcccaggtcattcttcatcctcacccaggattctcctgtacctgctcccaatctgtgttcctaaaagtgattctcactctgcttctcatctcctacttacatgaatacttctctcttttttctgtttccctgaagattgagctcccaacccccaagtacgaaataggctaaaccaataaaaaatggtgtgttgggcctggttgcatttca

SEQ ID NO: 17841 - protein, 81 aa, Homo sapiens
MNHNSMYWYRQDPGMGLRLIYYSASEGTTDKGEVPNGYNVSRLNKREFSLRLESAAPSQTSVYFCASMRTPGSCFLEKALG

SEQ ID NO: 17842 - DNA, 507 bp, Homo sapiens
ccatgggcacaaggctcctctgctgggcagccatatgtctcctgggggcagatcacacaggtgctggagtctcccagtccctgagacacaaggtagcaaagaagggaaaggatgtagctctcagatatgatccaatttcaggtcataatgccctttattggtaccgacagagcctggggcagggcctggagtttccaatttacttccaaggcaaggatgcagcagacaaatcggggcttccccgtgatcggttctctgcacagaggtctgagggatccatctccactctgaagttccagcgcacacagcagggggacttggctgtgtatctctgtgccagcagctcagccacagcactactgctccagtgtcagcttggttccctaggaaatggggtttctagaacctgaatgctgacaaataagagttgtatatgtgtataccatgcaacctgcgtttaaaaatgtatgtacatagtgcaatgactaaatctagctagttaacata

SEQ ID NO: 17843 - protein, 135 aa, Homo sapiens
MGTRLLCWAAICLLGADHTGAGVSQSLRHKVAKKGKDVALRYDPISGHNALYWYRQSLGQGLEFPIYFQGKDAADKSGLPRDRFSAQRSEGSISTLKFQRTQQGDLAVYLCASSSATALLLQCQLGSLGNGVSRT

SEQ ID NO: 17844 - DNA, 494 bp, Homo sapiens
tgctctgctgtgcggttctctgtctcctgggagcggtccccatggaaacgggagttacgcagacaccaagacacctggtcatgggaatgacaaataagaagtctttgaaatgtgaacaacatctggggcataacgctatgtattggtacaagcaaagtgctaagaagccactggagctcatgtttgtctacaactttaaagaacagactgaaaacaacagtgtgccaagtcgcttctcacctgaatgccccaacagctctcacttattccttcacctacacaccctgcagccagaagactcggccctgtatctctgtgccagcagccaagacacagccttgcagagtcaccgctttcctgtgtagaaaccttaggggccctccaggaagctttgggggccaccaaagccttcgatgaacatttcctacaagagccccgacagaagattcagaacatcatagcacctttaatggcataaaatatctagcatatag

SEQ ID NO: 17845 - protein, 107 aa, Homo sapiens
METGVTQTPRHLVMGMTNKKSLKCEQHLGHNAMYWYKQSAKKPLELMFVYNFKEQTENNSVPSRFSPECPNSSHLFLHLHTLQPEDSALYLCASSQDTALQSHRFPV

SEQ ID NO: 17846 - DNA, 323 bp, Homo sapiens
gctgtggggccttttctctcctgtgggcaggtccagtgaatgctggtgtcactcagaccccaaaattccgggtcctgaagacaggacagagcatgacactgctgtgtgcccaggatatgaaccatgaatacatgtactggtatcgacaagacccaggcatggggctgaggctgattcattactcagttggtgagggtacaactgccaaaggagaggtccctgatggctacaatgtctccagattaaaaaaacagaatttcctgctggggttggagtcggctgctccctcccaaacatctgtgtacttctgtgccagcagttac

SEQ ID NO: 17847 - protein, 76 aa, Homo sapiens
MTLLCAQDMNHEYMYWYRQDPGMGLRLIHYSVGEGTTAKGEVPDGYNVSRLKKQNFLLGLESAAPSQTSVYFCASS

SEQ ID NO: 17848 - DNA, 416 bp, Homo sapiens
gaaaccacagcctagtcttctcaccactgcagaccagaatcctgccctgggccttgcctggtctgcctgactcggccatgggctgcaggctcctctgctatgtggccctctgcctcctgcaagcagatccactggacacagccgtttcccagactccaaaatacctggtcacacagatgggaaaaaaggagtctcttaaatgagaacaaaatctgggccataatgctatgtattggtataaacaggactctaagaaatttctgaagacaatgtttatctacagtaacaaggagccaattttaaatgaaacagttccaaatcgcttctcacctgactctccagacaaagctcatttaaatcttcacatcaattccctggagcttggtgactctgctgtgtatttctgtgccagcagc

SEQ ID NO: 17849 - protein, 54 aa, Homo sapiens [sequence omitted]

SEQ ID NO: 17850 - DNA, 916 bp, Homo sapiens
atcgcttctcacctgactctccagacaaagctcatttaaatcttcacatcaattccctggagcttggtgactctgctgtgtatttctgtgccagcagccaagacacatgctcctacgagcagtacttcgggccgggcaccaggctcacggtcacagaggacctgaaaaacgtgttcccacccgaggtcgctgtgtttgagccatcagaagcagagatctcccacacccaaaaggccacactggtatgcctggccacaggcttctaccccgaccacgtggagctgagctggtgggtgaatgggaaggaggtgcacagtggggtcagcacagacccgcagcccctcaaggagcagcccgccctcaatgactccagatactgcctgagcagccgcctgagggtctcggccaccttctggcagaacccccgcaaccacttccgctgtcaagtccagttctacgggctctcggagaatgacgagtggacccaggatagggccaaacccgtcacccagatcgtcagcgccgaggcctggggtagagcagactgtggcttcacctccgagtcttaccagcaaggggtcctgtctgccaccatcctctatgagatcttgctagggaaggccaccttgtatgccgtgctggtcagtgccctcgtgctgatggccatggtcaagagaaaggattccagaggctagctccaaaaccatcccaggtcattcttcatcctcacccaggattctcctgtacctgctcccaatctgtgttcctaaaagtgattctcactctgcttctcatctcctacttacatgaatacttctctcttttttctgtttccctgaagattgagctcccaacccccaagtacgaaataggctaaaccaataaaaaatggtgtgttgggcctggttgcatttca

SEQ ID NO: 17851 - protein, 47 aa, Homo sapiens [sequence omitted]

SEQ ID NO: 17852 - DNA, 683 bp, Homo sapiens
cccagtcagaggccccatctcagacccgaggctagcatgggctgcaggctgctctgctgtgcggttctctgtctcctgggagcggtccccatggaaacgggagttacgcagacaccaagacacctggtcatgggaatgacaaataagaagtctttgaaatgtgaacaacatctgggtcataacgctatgtattggtacaagcaaagtgctaagaagccactggagctcatgtttgtctacagtcttgaagaacgggttgaaaacaacagtgtgccaagtcgcttctcacctgaatgccccaacagctctcacttattccttcacctacacaccctgcagccagaagactcggccctgtatctctgcgccagcagccaagacacagccttgcagagtcaccgctttcctgtgcagaaaccttaggggccctccaggaagctgtgggggccaccaaagccttcggtgaacatttcctgcaagagccccgacagaagattcagaacatcatagcacctgctcattcatccatgtggcaacgttacatcctatgctcatatttagagtgtgggttttctttagcgtgtgactctgccctgttaactgatttgaaaaatgataaacacattcagatctagtctttttaaaatccctttttaaattgtaaaataaagcaagcatgctat

SEQ ID NO: 17853 - protein, 128 aa, Homo sapiens
MGCRLLCCAVLCLLGAVPMETGVTQTPRHLVMGMTNKKSLKCEQHLGHNAMYWYKQSAKKPLELMFVYSLEERVENNSVPSRFSPECPNSSHLFLHLHTLQPEDSALYLCASSQDTALQSHRFPVQKP

SEQ ID NO: 17854 - DNA, 1123 bp, Homo sapiens
tccccatggaaacgggagttacgcagacaccaagacacctggtcatgggaatgacaaataagaagtctttgaaatgtgaacaacatctgggtcataacgctatgtattggtacaagcaaagtgctaagaagccactggagctcatgtttgtctacagtcttgaagaacgggttgaaaacaacagtgtgccaagtcgcttctcacctgaatgccccaacagctctcacttattccttcacctacacaccctgcagccagaagactcggccctgtatctctgcgccagcagccaagacacagccttattcacccctccactttgggaacgggaccaggctcactgtgacagaggacctgaacaaggtgttcccacccgaggtcgctgtgtttgagccatcagaagcagagatctcccacacccaaaaggccacactggtgtgcctggccacaggcttcttccccgaccacgtggagctgagctggtgggtgaatgggaaggaggtgcacagtggggtcagcacagacccgcagcccctcaaggagcagcccgccctcaatgactccagatactgcctgagcagccgcctgagggtctcggccaccttctggcagaacccccgcaaccacttccgctgtcaagtccagttctacgggctctcggagaatgacgagtggacccaggatagggccaaacccgtcacccagatcgtcagcgccgaggcctggggtagagcagactgtggctttacctcggtgtcctaccagcaaggggtcctgtctgccaccatcctctatgagatcctgctagggaaggccaccctgtatgctgtgctggtcagcgcccttgtgttgatggccatggtcaagagaaaggatttctgaaggcagccctggaagtggagttaggagcttctaacccgtcatggtttcaatacacattcttcttttgccagcgcttctgaagagctgctctcacctctctgcatcccaatagatatccccctatgtgcatgcacacctgcacactcacggctgaaatctccctaacccagggggaccttagcatgcctaagtgactaaaccaataaaaatgttctggtctggcctgactctgacttgtgaa

SEQ ID NO: 17855 - protein, 128 aa, Homo sapiens
METGVTQTPRHLVMGMTNKKSLKCEQHLGHNAMYWYKQSAKKPLELMFVYSLEERVENNSVPSRFSPECPNSSHLFLHLHTLQPEDSALYLCASSQDTALFTPPLWERDQAHCDRGPEQGVPTRGRCV

SEQ ID NO: 17856 - DNA, 311 bp, Homo sapiens
cttttctctcctgtgggcaggtccagtgaatgctggtgtcactcagaccccaaaattccgggtcctgaagacaggacagagcatgacactgctgtgtgcccaggatatgaaccatgaatacatgtactggtatcgacaagacccaggcatggggctgaggctgattcattactcagttggtgagggtacaactgccaaaggagaggtccctgatggctacaatgtctccagattaaaaaaacagaatttcctgctggggttggagtcggctgctccctcccaaacatctgtgtacttctgtgccagcagtt

SEQ ID NO: 17857 - protein, 75 aa, Homo sapiens
MTLLCAQDMNHEYMYWYRQDPGMGLRLIHYSVGEGTTAKGEVPDGYNVSRLKKQNFLLGLESAAPSQTSVYFCAS

SEQ ID NO: 17858 - DNA, 1174 bp, Homo sapiens
atgggcaccaggctcctcttctgggtggccttctgtctcctgggggcagatcacacaggagctggagtctcccagtcccccagtaacaaggtcacagagaagggaaaggatgtagagctcaggtgtgatccaatttcaggtcatactgccctttactggtaccgacagagcctggggcagggcctggagtttttaatttacttccaaggcaacagtgcaccagacaaatcagggctgcccagtgatcgcttctctgcagagaggactgggggatccgtctccactctgacgatccagcgcacacagcaggaggactcggccgtgtatctctgtgccagcagcttatgctcctataattcacccctccactttgggaacgggaccaggctcactgtgacagaggacctgaacaaggtgttcccacccgaggtcgctgtgtttgagccatcagaagcagagatctcccacacccaaaaggccacactggtgtgcctggccacaggcttcttccccgaccacgtggagctgagctggtgggtgaatgggaaggaggtgcacagtggggtcagcacagacccgcagcccctcaaggagcagcccgccctcaatgactccagatactgcctgagcagccgcctgagggtctcggccaccttctggcagaacccccgcaaccacttccgctgtcaagtccagttctacgggctctcggagaatgacgagtggacccaggatagggccaaacccgtcacccagatcgtcagcgccgaggcctggggtagagcagactgtggctttacctcggtgtcctaccagcaaggggtcctgtctgccaccatcctctatgagatcctgctagggaaggccaccctgtatgctgtgctggtcagcgcccttgtgttgatggccatggtcaagagaaaggatttctgaaggcagccctggaagtggagttaggagcttctaacccgtcatggtttcaatacacattcttcttttgccagcgcttctgaagagctgctctcacctctctgcatcccaatagatatccccctatgtgcatgcacacctgcacactcacggctgaaatctccctaacccagggggaccttagcatgcctaagtgactaaaccaataaaaatgttctggtctggcctgactctgacttgtgaa

SEQ ID NO: 17859 - protein, 310 aa, Homo sapiens
MGTRLLFWVAFCLLGADHTGAGVSQSPSNKVTEKGKDVELRCDPISGHTALYWYRQSLGQGLEFLIYFQGNSAPDKSGLPSDRFSAERTGGSVSTLTIQRTQQEDSAVYLCASSLCSYNSPLHFGNGTRLTVTEDLNKVFPPEVAVFEPSEAEISHTQKATLVCLATGFFPDHVELSWWVNGKEVHSGVSTDPQPLKEQPALNDSRYCLSSRLRVSATFWQNPRNHFRCQVQFYGLSENDEWTQDRAKPVTQIVSAEAWGRADCGFTSVSYQQGVLSATILYEILLGKATLYAVLVSALVLMAMVKRKDF

SEQ ID NO: 17860 - DNA, 876 bp, Homo sapiens
tgggcaccaggctcctcttctgggtggccttctgtctcctgggggcagatcacacaggagctggagtctcccagtcccccagtaacaaggtcacagagaagggaaaggatgtagagctcaggtgtgatccaatttcaggtcatactgccctttactggtaccgacagagcctggggcagggcctggagtttttaatttacttccaaggcaacagtgcaccagacaaatcagggctgcccagtgatcgcttctctgcagagaggactgggggatccgtctccactctgacgatccagcgcacacagcaggaggactcggccgtgtatctctgtgccagcagcttagccacagcatggcacagtcgcctccttcctgctcataaacctcatccttctctctccttgcagctcctagacacccttaacagaggcttctctttgcttctccctccccatgggaaacaagtagatttggacctcagcttgtcctttgggtagaaagagaccacagatttacccttaagacacagtaactgtaaatgtgggtggtggaagcaatcgtggcccaccgggctattggagtcctcagagccagctcattgctctaaggcaagcactgggtgtcttagccttggccttcagggctgggacacacagtcttctttggggcctgggaggttgctgcccacatagagaagcttcgggcatggctgaggaacaggtgtcttcccctacatgtgttggggcatctgcaaggtctgaagcttcatccacaagaacattctttcttctgaagcctcttctgttacattggaagttttctgcaatacaagagcaaaccattcttcctgtttgatttaaaagtctttgtggcttt

SEQ ID NO: 17861 - protein, 49 aa, Homo sapiens
MAEEQVSSPTCVGASARSEASSTRTFFLLKPLLLHWKFSAIQEQTILPV

SEQ ID NO: 17862 - DNA, 354 bp, Homo sapiens
cttgtagcatctgccatgagaatcaggctcctgtgctgtgtggccttttctctcctgtgggcaggtccagtgattgctgggatcacccaggcaccaacatctcagatcctggcagcaggacggcgcatgacactgagatgtacccaggatatgagacataatgccatgtactggtatagacaagatctaggactggggctaaggctcatccattattcaaatactgcaggtaccactggcaaaggagaagtccctgatggttatagtgtctccagagcaaacacagatgatttccccctcacgttggcgtctgctgtaccctctcagacatctgtgtacttctgtgccagcagt

SEQ ID NO: 17863 - protein, 112 aa, Homo sapiens
MRIRLLCCVAFSLLWAGPVIAGITQAPTSQILAAGRRMTLRCTQDMRHNAMYWYRQDLGLGLRLIHYSNTAGTTGKGEVPDGYSVSRANTDDFPLTLASAVPSQTSVYFCAS

SEQ ID NO: 17864 - DNA, 1437 bp, Homo sapiens
ctcacagtgaccctgatctggtaaagctcccatcctgccctgactctgtcatgggcaccaggctcctctgctgggcagccctgtgcctcctgggggcagatcacacaggtgctggagtctcccagacccccagtaacaaggtcacagagaagggaaaatatgtagagctcagacctcgccgggcaacagccttcatgagaggaggtggatcctgcctgagaccagtcagaaggccctggaccagctggactcccaggctctattgatgctgggatcacccagatgccaagatatcacattgtacagaagaaagagatgatcctggaatgtgctcaggagagaagaaaaaagcagaaagcagctgggaagctttagcctgcttgagtgatctgggattctcaagtagcatacataacatcaccttggctttggttcctttagataccaagcatgtgttctgtggaggacaagaaaatccatttttttttgttataaagttataaacacacaagagaacaatccagttagggagaatgttaataaatacaacaaactctgccattagacctgaagataatcagctagtagaattatcaaagagattgtaagactcttactgagtacctgtttgaggtcctctgaggatagatgaaggaaggaacttaattcttaccatcactgtggcttggattagaatccatgagttccttaacttgtttttcttgtaaaatattataaaataatatagaacacacattttattttcctgtagcctgtagtcctctttagcacctaaagggagaagcgcatatcccggtgcaaaagggagctggttgcttgcttggcaaaaaaatgaattcaccaattggccaatctgctgaaagtcaaaatgaaaggctaatatatgagactgatgacagttcatggttcttggtataacttcaacagcgagtgaacatttttttctttgtctatagctttctttcagccatcgatcctcagttgtgtcttagcctcttatcagtccagctcactttgatactaaatttgattgttgtgtatctcagcaagaagcacgtctcacattctctgtattttatgtggtcatgagtgtgttcctgtcttattcttattttatgtggtgcatttttaaataggactgtacagaatacaagcatctatttgtatatgactctcatcttttatggggagaggtcagagtaggtgagcgtgcactttgattctctgctggaatctctttggattctatgtcccctgtcacatggtttattttcatatgcatatttctcatggttctcctgactcttttagcaatgctcattgcaggatattagaaattgtattacttctaatggcagaatgttagaaattgtgttgactcttaaggcaaaataaaatacccggactcacctttcc

SEQ ID NO: 17865 - protein, 71 aa, Homo sapiens
MGTRLLCWAALCLLGADHTGAGVSQTPSNKVTEKGKYVELRPRRATAFMRGGGSCLRPVRRPWTSWTPRLY

SEQ ID NO: 17866 - DNA, 432 bp, Homo sapiens
gccctgtgcctcctgggggcagatcacacaggtgctggagtctcccagacccccagtaacaaggtcacagagaagggaaaatatgtagagctcaggctctattgatgctgggatcacccagatgccaagatatcacattgtacagaagaaagagatgatcctggaatgtgctcaggagagaagaaaaaagcagaaagcagctgggaagctttagcctgcttgagtgatctgggattctcaagtagcatacataacatcaccttggctttggttcctttagataccaagcatgtgttctgtggaggacaagaaaatccatttttttttgttataaagttataaacacacaagagaacaatccagttagggagaataatgttagaaattgtgttgactcttaaggcaaaataaaatacccggactcacctttcc

SEQ ID NO: 17867 - protein, 58 aa, Homo sapiens
MCSGEKKKAESSWEALACLSDLGFSSSIHNITLALVPLDTKHVFCGGQENPFFFVIKL

SEQ ID NO: 17868 - DNA, 1036 bp, Homo sapiens
gagctcaggtgtgatccaatttcaggtcatactgccctttactggtaccgacaaagcctggggcagggcccagagtttctaatttacttccaaggcacgggtgcggcagatgactcagggctgcccaacgatcggttctttgcagtcaggcctgagggatccgtctctactctgaagatccagcgcacagagcggggggactcagccgtgtatctctgtgccagcatgaccaagagacccagtacttcgggccaggcacgcggctcctggtgctcgaggacctgaaaaacgtgttcccacccgaggtcgctgtgtttgagccatcagaagcagagatctcccacacccaaaaggccacactggtatgcctggccacaggcttctaccccgaccacgtggagctgagctggtgggtgaatgggaaggaggtgcacagtggggtcagcacagacccgcagcccctcaaggagcagcccgccctcaatgactccagatactgcctgagcagccgcctgagggtctcggccaccttctggcagaacccccgcaaccacttccgctgtcaagtccagttctacgggctctcggagaatgacgagtggacccaggatagggccaaacccgtcacccagatcgtcagcgccgaggcctggggtagagcagactgtggcttcacctccgagtcttaccagcaaggggtcctgtctgccaccatcctctatgagatcttgctagggaaggccaccttgtatgccgtgctggtcagtgccctcgtgctgatggccatggtcaagagaaaggattccagaggctagctccaaaaccatcccaggtcattcttcatcctcacccaggattctcctgtacctgctcccaatctgtgttcctaaaagtgattctcactctgcttctcatctcctacttacatgaatacttctctcttttttctgtttccctgaagattgagctcccaacccccaagtacgaaataggctaaaccaataaaaaatggtgtgttgggcctggttgcatttca

SEQ ID NO: 17869 - protein, 47 aa, Homo sapiens [sequence omitted]

SEQ ID NO: 17870 - DNA, 254 bp, Homo sapiens
ggtggatcctgcctgagaccagtcagaaggccctggaccagctggactcccaggctctattgatgctgggatcacccagatgccaagatatcacattgtacagaagaaagagatgatcctggaatgtgctcaggagagaagaaaaaagcagaaagcagctgggaagctttagcctgcttgagtgatctgggattctcaagtagcatacataacatcaccttggctttggttcctttagataccaagcatgtgtt

SEQ ID NO: 17871 - protein, 42 aa, Homo sapiens
MCSGEKKKAESSWEALACLSDLGFSSSIHNITLALVPLDTKH

SEQ ID NO: 17872 - DNA, 540 bp, Homo sapiens
gtacagtgggctggagtggcctgcaggggaaagtatgtcagtgtggtgacatcacaggtcaatgctcctatcaggaagaagggagcttaggaacttcagaatgcttactacagagacaccagccccaagctaggagatcctgccatgggcttcaggctcctctgctgtgtggccttttgtctcctgggagcaggcccagtggattctggagtcacacaaaccccaaagcacctgatcacagcaactggacagcgagtgacgctgagatgctcccctaggtctggagacctctctgtgtactggtaccaacagagcctggaccagggcctccagttcctcattcagtattataatggagaagagagagcaaaaggaaacattcttgaacgattctccgcacaacagttccctgacttgcactctgaactaaacctgagctctctggagctgggggactcagctttgtatttctgtgccagcagcgtagcacagcctacaatgagcagttcttcgggccagggacacggctcaccgtgctag

SEQ ID NO: 17873 - protein, 131 aa, Homo sapiens
MGFRLLCCVAFCLLGAGPVDSGVTQTPKHLITATGQRVTLRCSPRSGDLSVYWYQQSLDQGLQFLIQYYNGEERAKGNILERFSAQQFPDLHSELNLSSLELGDSALYFCASSVAQPTMSSSSGQGHGSPC

SEQ ID NO: 17874 - DNA, 2153 bp, Homo sapiens
agaatgcttactacagagacaccagccccaagctaggagatcctgccatgggcttcaggctcctctgctgtgtggccttttgtctcctgggagcaggcccagtggattctggagtcacacaaaccccaaagcacctgatcacagcaactggacagcgagtgacgctgagatgctcccctaggtctggagacctctctgtgtactggtaccaacagagcctggaccagggcctccagttcctcattcagtattataatggagaagagagagcaaaaggaaacattcttgaacgattctccgcacaacagttccctgacttgcactctgaactaaacctgagctctctggagctgggggactcagctttgtatttctgtgccagcagcgtagctctggggccaacgtcctgactttcggggccggcagcaggctgaccgtgctggaggacctgaaaaacgtgttcccacccgaggtcgctgtgtttgagccatcagaagcagagatctcccacacccaaaaggccacactggtatgcctggccacaggcttctaccccgaccacgtggagctgagctggtgggtgaatgggaaggaggtgcacagtggggtcagcacagacccgcagcccctcaaggagcagcccgccctcaatgactccagatactgcctgagcagccgcctgagggtctcggccaccttctggcagaacccccgcaaccacttccgctgtcaagtccagttctacgggctctcggagaatgacgagtggacccaggatagggccaaacccgtcacccagatcgtcagcgccgaggcctggggtagagcaggtgagtggggcctggggagatgcctggaggagattaggtgagaccagctaccagggaaaatggaaagatccaggtagcggacaagactagatccagaagaaagccagagtggacaaggtgggatgatcaaggttcacagggtcagcaaagcacggtgtgcacttcccccaccaagaagcatagaggctgaatggagcacctcaagctcattcttccttcagatcctgacaccttagagctaagctttcaagtctccctgaggaccagccatacagctcagcatctgagtggtgtgcatcccattctcttctggggtcctggtttcctaagatcatagtgaccacttcgctggcactggagcagcatgagggagacagaaccagggctatcaaaggaggctgactttgtactatctgatatgcatgtgtttgtggcctgtgagtctgtgatgtaaggctcaatgtccttacaaagcagcattctctcatccatttttcttcccctgttttctttcagactgtggcttcacctccggtaagtgagtctctcctttttctctctatctttcgccgtctctgctctcgaaccagggcatggagaatccacggacacaggggcgtgagggaggccagagccacctgtgcacaggtgcctacatgctctgttcttgtcaacagagtcttaccagcaaggggtcctgtctgccaccatcctctatgagatcttgctagggaaggccaccttgtatgccgtgctggtcagtgccctcgtgctgatggccatggtaaggaggagggtgggatagggcagatgatgggggcaggggatggaacatcacacatgggcataaaggaatctcagagccagagcacagcctaatatatcctatcacctcaatgaaaccataatgaagccagactggggagaaaatgcagggaatatcacagaatgcatcatgggaggatggagacaaccagcgagccctactcaaattaggcctcagagcccgcctcccctgccctactcctgctgtgccatagcccctgaaaccctgaaaatgttctctcttccacaggtcaagagaaaggattccagaggctagctccaaaaccatcccaggtcattcttcatcctcacccaggattctcctgtacctgctcccaatctgtgttcctaaaagtgattctcactctgcttctcatctcctacttacatgaatacttctctcttttttctgtttccctgaagattgagctcccaacccccaagtacgaaataggctaaaccaataaaaaatggtgtgttgggcctggttgcatttca

SEQ ID NO: 17875 - protein, 120 aa, Homo sapiens
MGFRLLCCVAFCLLGAGPVDSGVTQTPKHLITATGQRVTLRCSPRSGDLSVYWYQQSLDQGLQFLIQYYNGEERAKGNILERFSAQQFPDLHSELNLSSLELGDSALYFCASSVALGPTS

SEQ ID NO: 17876 - DNA, 2096 bp, Homo sapiens
ccccaagctaggagatcctgccatgggcttcaggctcctctgctgtgtggccttttgtctcctgggagcaggcccagtggattctggagtcacacaaaccccaaagcacctgatcacagcaactggacagcgagtgacgctgagatgctcccctaggtctggagacctctctgtgtactggtaccaacagagcctggaccagggcctccagttcctcattcagtattataatggagaagagagagcaaaaggaaacattcttgaacgattctccgcacaacagttccctgacttgcactctgaactaaacctgagctctctggagctgggggactcagctttgtatttctgtgccagcagcaattcacccctccactttgggaacgggaccaggctcactgtgacagaggacctgaacaaggtgttcccacccgaggtcgctgtgtttgagccatcagaagcagagatctcccacacccaaaaggccacactggtgtgcctggccacaggcttcttccccgaccacgtggagctgagctggtgggtgaatgggaaggaggtgcacagtggggtcagcacagacccgcagcccctcaaggagcagcccgccctcaatgactccagatactgcctgagcagccgcctgagggtctcggccaccttctggcagaacccccgcaaccacttccgctgtcaagtccagttctacgggctctcggagaatgacgagtggacccaggatagggccaaacccgtcacccagatcgtcagcgccgaggcctggggtagagcaggtgagtggggcctggggagatgcctggaggagattaggtgagaccagctaccagggaaaatggaaagatccaggtagcagacaagactagatccaaaaagaaaggaaccagcgcacaccatgaaggagaattgggcacctgtggttcattcttctcccagattctcagcccaacagagccaagcagctgggtcccctttctatgtggcctgtgtaactctcatctgggtggtgccccccatccccctcagtgctgccacatgccatggattgcaaggacaatgtggctgacatctgcatggcagaagaaaggaggtgctgggctgtcagaggaagctggtctgggcctgggagtctgtgccaactgcaaatctgactttacttttaattgcctatgaaaataaggtctctcatttattttcctctccctgctttctttcagactgtggctttacctcgggtaagtaagcccttccttttcctctccctctctcatggttcttgacctagaaccaaggcatgaagaactcacagacactggagggtggagggtgggagagaccagagctacctgtgcacaggtacccacctgtccttcctccgtgccaacagtgtcctaccagcaaggggtcctgtctgccaccatcctctatgagatcctgctagggaaggccaccctgtatgctgtgctggtcagcgcccttgtgttgatggccatggtaagcaggagggcaggatggggccagcaggctggaggtgacacactgacaccaagcacccagaagtatagagtccctgccaggattggagctgggcagtagggagggaagagatttcattcaggtgcctcagaagataacttgcacctctgtaggatcacagtggaagggtcatgctgggaaggagaagctggagtcaccagaaaacccaatggatgttgtgatgagccttactatttgtgtggtcaatgggccctactactttctctcaatcctcacaactcctggctcttaataacccccaaaactttctcttctgcaggtcaagagaaaggatttctgaaggcagccctggaagtggagttaggagcttctaacccgtcatggtttcaatacacattcttcttttgccagcgcttctgaagagctgctctcacctctctgcatcccaatagatatccccctatgtgcatgcacacctgcacactcacggctgaaatctccctaacccagggggaccttagcatgcctaagtgactaaaccaataaaaatgttctggtctggcctgactctgacttgtgaa

SEQ ID NO: 17877 - protein, 270 aa, Homo sapiens
MGFRLLCCVAFCLLGAGPVDSGVTQTPKHLITATGQRVTLRCSPRSGDLSVYWYQQSLDQGLQFLIQYYNGEERAKGNILERFSAQQFPDLHSELNLSSLELGDSALYFCASSNSPLHFGNGTRLTVTEDLNKVFPPEVAVFEPSEAEISHTQKATLVCLATGFFPDHVELSWWVNGKEVHSGVSTDPQPLKEQPALNDSRYCLSSRLRVSATFWQNPRNHFRCQVQFYGLSENDEWTQDRAKPVTQIVSAEAWGRAGEWGLGRCLEEIR

SEQ ID NO: 17878 - DNA, 1198 bp, Homo sapiens
ccccaagctaggagatcctgccatgggcttcaggctcctctgctgtgtggccttttgtctcctgggagcaggcccagtggattctggagtcacacaaaccccaaagcacctgatcacagcaactggacagcgagtgacgctgagatgctcccctaggtctggagacctctctgtgtactggtaccaacagagcctggaccagggcctccagttcctcattcagtattataatggagaagagagagcaaaaggaaacattcttgaacgattctccgcacaacagttccctgacttgcactctgaactaaacctgagctctctggagctgggggactcagctttgtatttctgtgccagcagcacccctgtcactgtgtgaacactgaagctttctttggacaaggcaccagactcacagttgtagaggacctgaacaaggtgttcccacccgaggtcgctgtgtttgagccatcagaagcagagatctcccacacccaaaaggccacactggtgtgcctggccacaggcttcttccccgaccacgtggagctgagctggtgggtgaatgggaaggaggtgcacagtggggtcagcacagacccgcagcccctcaaggagcagcccgccctcaatgactccagatactgcctgagcagccgcctgagggtctcggccaccttctggcagaacccccgcaaccacttccgctgtcaagtccagttctacgggctctcggagaatgacgagtggacccaggatagggccaaacccgtcacccagatcgtcagcgccgaggcctggggtagagcagactgtggctttacctcggtgtcctaccagcaaggggtcctgtctgccaccatcctctatgagatcctgctagggaaggccaccctgtatgctgtgctggtcagcgcccttgtgttgatggccatggtcaagagaaaggatttctgaaggcagccctggaagtggagttaggagcttctaacccgtcatggtttcaatacacattcttcttttgccagcgcttctgaagagctgctctcacctctctgcatcccaatagatatccccctatgtgcatgcacacctgcacactcacggctgaaatctccctaacccagggggaccttagcatgcctaagtgactaaaccaataaaaatgttctggtctggcctgactctgacttgtgaa

SEQ ID NO: 17879 - protein, 118 aa, Homo sapiens
MGFRLLCCVAFCLLGAGPVDSGVTQTPKHLITATGQRVTLRCSPRSGDLSVYWYQQSLDQGLQFLIQYYNGEERAKGNILERFSAQQFPDLHSELNLSSLELGDSALYFCASSTPVTV

SEQ ID NO: 17880 - DNA, 589 bp, Homo sapiens
atgggcttcaggctcctctgctgtgtggccttttgtctcctgggagcaggcccagtggattctggagtcacacaaaccccaaagcacctgatcacagcaactggacagcgagtgacgctgagatgctcccctaggtctggagacctctctgtgtactggtaccaacagagcctggaccagggcctccagttcctcattcagtattataatggagaagagagagcaaaaggaaacattcttgaacgattctccgcacaacagttccctgacttgcactctgaactaaacctgagctctctggagctgggggactcagctttgtatttctgtgccagcagcgtagcacagccctgcatgagcatcagccttctgtgcaataacattcctgccccactcaggaagtgacggtgaggggagggctgccagccagaggggctcaggccctggagagtggacaggcctttcccaggcactctctggtgcttctgtatgtgatctggtttactgctcactgaagctgtttcactcgaatagctccttgaccaactgtaacccagaatcataaagataaaggcattcttagaaatat

SEQ ID NO: 17881 - protein, 134 aa, Homo sapiens [sequence omitted]

SEQ ID NO: 17882 - DNA, 315 bp, Homo sapiens
gtggccctttgtctgctgtgggcaggacacagggatgctgaaatcacccagagcccaagacacaagatcacagagacaggaaggcaggtgaccttggcgtgtcaccagacttggaaccacaacaatatgttctggtatcgacaagacctgggacatgggctgaggctgatccattactcatatggtgttcaagacactaacaaaggagaagtctcagatggctacagtgtctctagatcaaacacagaggacctccccctcactctggagtctgctgcctcctcccagacatctgtatatttctgcgccagcagt

SEQ ID NO: 17883 - protein, 62 aa, Homo sapiens
MFWYRQDLGHGLRLIHYSYGVQDTNKGEVSDGYSVSRSNTEDLPLTLESAASSQTSVYFCAS

SEQ ID NO: 17884 - DNA, 353 bp, Homo sapiens
cctgccctgaccctgccatgagcaccaggcttctctgctggatggccctctgtctcctgggggcagaactctcagaagctgaagttgcccagtcccccagatataagattacagagaaaagccaggctgtggctttttggtgtgatcctatttctggccatgctaccctttactggtaccggcagatcctgggacagggcccggagcttctggttcaatttcaggatgagagtgtagtagatgattcacagttgcctaaggatcgattttctgcagagaggctcaaaggagtagactccactctcaagatccagcctgcagagcttggggactcggccatgtatctctgtgcc

SEQ ID NO: 17885 - protein, 111 aa, Homo sapiens
MSTRLLCWMALCLLGAELSEAEVAQSPRYKITEKSQAVAFWCDPISGHATLYWYRQILGQGPELLVQFQDESVVDDSQLPKDRFSAERLKGVDSTLKIQPAELGDSAMYLC

SEQ ID NO: 17886 - DNA, 1295 bp, Homo sapiens
cagtgaccctgattgggcaaagctcccatccttccctgaccctgccatgggcaccaggctcctctgctgggcggccctctgtctcctgggagcagaactcacagaagctggagttgcccagtctcccagatataagattatagagaaaaggcagagtgtggctttttggtgcaatcctatatctggccatgctaccctttactggtaccagcagatcctgggacagggcccaaagcttctgattcagtttcagaataacggtgtagtggatgattcacagttgcctaaggatcgattttctgcagagaggctcaaaggagtagactccactctcaagatccagcctgcaaagcttgaggactcggccgtgtatctctgtgccagcagccctgtcactgtgtgaacactgaagctttctttggacaaggcaccagactcacagttgtaggtaagacatttttcaggttcttttgcagatccgtcacagggaaaagtgggtccacagtgtcccttttagagtggctatattcttatgtgctaactatggctacaccttcggttcggggaccaggttaaccgttgtaggtaaggctgggggtctctaggaggggtgcgatgagggaggactctgtcctgggaaatgtcaaagagaacagagatcccagctcccggagccagactgagggagacgtcatgtcatgtcccgggattgagttcaggggaggctccctgtgagggcgaatccacccaggcttcccagaggctctgagcagtcacagctgagcccagggtgatggggcagaagagggaaggggagggggcctctcctcatagttccctgagatagcccagagaaagcccggtgggtaatgaatgagccacaacacctctccatctatctgcttcactgacagaggttctctgtagattcttcgtatattcctgtgctggattttataggaggccactctgtgtctctttttgtcacctgcctgagtcttgggcaagctctggaagggaacacagagtactggaagcagagctgctgtccctgtgagggaagagttcccatgaactcccaacctctgcctgaatcccagctgtgctcagcagagactggggggttttgaagtggccctgggaggctgtgctctggaaacaccatatattttggagagggaagttggctcactgttgtaggtgagtaagtcaaggctggacagctgggaacttgcaaaaaggggctggaatccagacggagcctttgtctctagtgcttaggtgaaagtgtattt

SEQ ID NO: 17887 - protein, 118 aa, Homo sapiens
MGTRLLCWAALCLLGAELTEAGVAQSPRYKIIEKRQSVAFWCNPISGHATLYWYQQILGQGPKLLIQFQNNGVVDDSQLPKDRFSAERLKGVDSTLKIQPAKLEDSAVYLCASSPVTV

SEQ ID NO: 17888 - DNA, 775 bp, Homo sapiens
cctagacagggattgggagacatgcaagttgcttggcttcctattaccttgtgttgaaaacacaataggctttgggatcaggagttcattccagttattttaatgttatttactagcagtgtgccctcgtgcacattatcaaactcctctgactcttggaatcctcatttttcaataataactcacaaagctgtcaagcctaagggttctaacagctcgaacagcacctggaacagaagcaatagccgccactcagaggttacttcttccttctccgccttctctggatcacctccctacctcatcctcaatctaacgctggaaatattggatatggggttcttcaatctcaaataaatcatctgtagagtcccctccagttccgaaattctctctatgtcttggagtgtgtggaatagccaggaaaccagcccaggagctttgactcccagccattctacaatgtactgaagatacagcagtaaacagagtggacatggtctccccactatggagcatatttgatgaagaccgatgttaccatacgctataaaaccagagatgccctgcccagtaaggaggaatctagagaagcagtctgtccacagccactttgccacactgtggtgactcctctgggaggacatttcccttcttcgccatgagtggggattgcagcaacttgttctggcccctgtgcatggctcagcactagcaggacaggaggtagcctcagcggagccctagagaacatcagaagaggcggcgaagcccc

SEQ ID NO: 17889 - protein, 84 aa, Homo sapiens
MLFTSSVPSCTLSNSSDSWNPHFSIITHKAVKPKGSNSSNSTWNRSNSRHSEVTSSFSAFSGSPPYLILNLTLEILDMGFFNLK

SEQ ID NO: 17890 - DNA, 552 bp, Homo sapiens
aaaatgattaaatatgaagtaaaaaagcaagctaaaaattacacatgtactttgcaggagtatagactgtagaagatatatttgccattccttatacgtttaacttttgtgtgatttgccactttatatattaaatttgaataggtctcaactatttttttttgtaaaccagaggaataatactgttttgaatttcctaatttaatcctgaagacaaacttacttttatacccccatccatggctcactggtcaatgttttgagctatttccatttgttctcactcaggctcctatataaccctggcattagttatctcttttcgtctttttaaagcctcttggaacaagtctcctgccttccactctggatgtgttggtgaggtttgtgttggagtttgtggagacttgtgaatactatatccctccccatccaggggttccaacactgagcatctttctctcactgacatctttcagcaaataaattcttcccatatattgtcccttttgcatccagcctgggtgacagagccagaccgtgtctcaaaaa

SEQ ID NO: 17891 - protein, 45 aa, Homo sapiens
ILYPSPSRGSNTEHLSLTDIFQQINSSHILSLLHPAWVTEPDRVS

SEQ ID NO: 17892 - DNA, 2578 bp, Homo sapiens
tcacagagtctgcccttttaggtaaagaggaacttggtgctgaaaccgcttccaggctcttctcagcccagggttgcccaagatcagttgtactgagtggccggcagggtaggcagccatgatgatcttgcacaaaatattccaggaactgtaagtgtcaaagatgttggacgtggaaagaaatagagcaattgcattgaaaatgtagaggatgagaaagtagctggtggctttgatggcccctatgtgagccttcatgctggggtccctggaccctgtggcattgcttcccatgtgtagggtgtgtctcttgagagagaggatcagcagggtggctgccaggatgaacatgatcagaggaacgaagatccccatgttatagaaaaataccaggttgaccatattggtctcagagaagtacttcttctccgtggagttggaggaggggataggaatggagctattcacatacacattgaagacatctctcgagagaggaaagctgaagcttaaggaaaccaacactgacagcctgagaagccaaggcatcagcactatgattttcctcttcatcaggaagaacaaaggatgattgaagtttgcaattctaagacaatagaagactttgagccaggcagcaaaccagagattggaatggttcagaaagacagtgatgactttgaagaggatatacactgagttttggttataaacaattcggaatagcagactgaaaatgttctccagcatcatccaaatctgtagcaagagcctggaaaagctcagcatcaacataatgcggtcaccagtggggagtgttttgcccctggcccactcagccccatagatggccgtgatgaagccactcccaaggatgccagtgatgcactctattccggagaccaccaaagtgaaggtgaccttgaacttggatatgtctttatctgtggcatctgtgttcaccgttgccattctctttgatcctgactttcaggtttctgcgccaagaatgggtaactgctctgcaatcttctgacccttgctcaatgttataatttctgccgccctcattaatggttatttccaatttttctccatttgtttatcacatgactacaagttagaggcttcacatgcaaataatgagaggatctggttactgggtctgtctcaatttttcataaagatacatttgtcttgggctttcagaagctcactggaaataatttgagacatgtttctagctcaacaccttcttaccttatttactttaagtccacatttacctgataagcaatgaatacaaggcctttttacttgtctcacaagatctctgttacctgctaaattatttgtaaaagctcatacagcttttaaaatctgttttccccacttcttttcttgtctctcttattttgggagagagttttattttgatagttaccatgtttgtgaataagaaattcccataagctcatatatgaacatcttttacttagaattgagtttcttccaaaaaggcctgctattataatgtcctcgaatagtatatagaaaagccaaaattggatgctattcgagttggagagaaggaagtctccatagtcccagtttttattgtttgtgtatgtgtcatcaatttcagcttactgagatcccacatgactatttgagctcagaatcaggtagaatgagcctggggagaattcagtgttctggacatggtgttgaagtttggaaatgtgataaggtactatgacttgaaatttaatttcctactttttaaccctggctgtgaaccagaatgaactctggcactttacaagaatatgtagatgcccaggactcgtccaaatctaggaaatcagaactggactagggctcaggcatgctatcttttaaaaaagccgaaaggtcttgttgctcatagtcaggattgagatccaaaatcttagctggaaaccaatgagccttgggtcagatttggcctgtagtcattttaccttgcattggttaatgctgtacagcattaatccaccagtgtgtaacttttctttttgaggggttctattggcaaacatttaaacttaggagattacttatatgcatgcacaaaaaatctatcttctcttgaaaaattagaagatttggcagtattgggtcttcatagtgaactggctgaagctgagtaatggctgcccattttaaacaaggtatatacttttcagtttgttgacaatactaattcctagtgtcttcttgacacagaagctgagtgccagttatcattttccagtgtgcttaccctgttatttttatttgattatttttctttttgagactgggtctcactctatcacccaggctggagtgcagtggtgtaatcatggctcactgcagccttgacctccatagctcaggtgatccccacacttcagccacctgagtagctgggactacagatgcatgccaacacacctggctaagttttgtattttttgtagagacagagtttcgccatgttggctaggctgatcttgaattcttgggctcaagcaatcctcccatctcagcctcc

SEQ ID NO: 17893 - protein, 62 aa, Homo sapiens
MAVMKPLPRMPVMHSIPETTKVKVTLNLDMSLSVASVFTVAILFDPDFQVSAPRMGNCSAIF

SEQ ID NO: 17894 - DNA, 1054 bp, Homo sapiens
gggcggtcccaggcaggcccagaagctgggcagcctctgccgggttccgggaaaaggagctcctgctgccactgctcttccggagcctgcagcatggggcccctgccgcgcaccgtggagctcttctatgacgtgctgtccccctactcctggctgggcttcgagatcctgtgccggtatcagaatatctggaacatcaacctgcagttgcggcccagcctcataacagggatcatgaaagacagtggaaacaagcctccaggtctgcttccccgcaaaggactatacatggcaaatgacttaaagctcctgagacaccatctccagattcccatccacttccccaaggatttcttgtctgtgatgcttgaaaaaggaagtttgtctgccatgcgtttcctcaccgccgtgaacttggagcatccagagatgctggagaaagcgtcccgggagctgtggatgcgcgtctggtcaaggaatgaagacatcaccgagccgcagagcatcctggcggctgcagagaaggctggtatgtctgcagaacaagcccagggacttctggaaaagatcgcaacgccaaaggtgaagaaccagctcaaggagaccactgaggcagcctgcagatacggagcctttgggctgcccatcaccgtggcccatgtggatggccaaacccacatgttatttggctctgaccggatggagctgctggcgcacctgctgggagagaagtggatgggccctatacctccagccgtgaatgccagactttaagattgcccggaggaagcaaactcttcgtataaaaaaagcaggccatctgcttaacccttggctccaccataaggcactgggactcggatttctctatctgatagaggtattttctgtggccctgggagctgtctgtctttcccctacccccaaggatgccaggaagacgtccaccattagccatgtggcaacctttacttctatgcctcacaagtgcctttcagagagccccaattctgctttcccacaaaataaacctaatgccatcaggcaaaacatt

SEQ ID NO: 17895 - protein, 226 aa, Homo sapiens; identical to SEQ ID NO: 2134

SEQ ID NO: 17896 - DNA, 4175 bp, Homo sapiens
gggcggtcccaggcaggcccagaagctgggcagcctctgccgggttccgggaaaaggagctcctgctgccactgctcttccggagcctgcagcatggggcccctgccgcgcaccgtggagctcttctatgacgtgctgtccccctactcctggctgggcttcgagatcctgtgccggtatcagaatatctggaacatcaacctgcagttgcggcccagcctcataacagggatcatgaaagacagtggaaacaagcctccaggtctgcttccccgcaaaggactatacatggcaaatgacttaaagctcctgagacaccatctccagattcccatccacttccccaaggatttcttgtctgtgatgcttgaaaaaggaagtttgtctgccatgcgtttcctcaccgccgtgaacttggagcatccagagatgctggagaaagcgtcccgggagctgtggatgcgcgtctggtcaaggaatgaagacatcaccgagccgcagagcatcctggcggctgcagagaaggctggtatgtctgcagaacaagcccagggacttctggaaaagatcgcaacgccaaaggtgaagaaccagctcaaggagaccactgaggcagcctgcagatacggagcctttgggctgcccatcaccgtggcccatgtggatggccaaacccacatgttatttggctctgaccggatggagctgctggcgcacctgctgggagagaagtggatgggccctatacctccagccgtgaatgccagactttaagattgcccggaggaagcaaactcttcgtataaaaaaagcaggccatctgcttaacccttggctccaccataaggcactgggactcggatttctctatctgatagaggtattttctgtggccctgggagctgtctgtctttcccctacccccaaggatgccaggaagacgtccaccattagccatgtggcaacctttacttctatgcctcacaagtgcctttcagagagccccaattctgctttcccacaaaataaacctaatgccatcaggcaaaacatttctgtgtctgtatctgccctggtatattctcattcctggggtcacatcctgcctactctaggggtaggtgaaggagagctgtttcagtatttccagccagaccagccatgcagcccaccttgagcagcttgtgcggtggaagaagtgagaatagtcccccgttctctcacacagaaactcccctggtctctctatcagcaacagaaaaccaagccagatggactttgcaactaatcaagtttgggatttactgtcttctgaccaaccacagtgactgagatggggctgggaccagaagcccagtgggagtgaacagccgagggaaccagagtctggctgagcttgtggccagatatttaaactgggtccagccacacctgcaaaaccagggcaaggcagtaccgggaaactggctggagttgctgcggtttggggaagttgcacaccctttcatagatacctcccttaaccctcagtgcagattctgagaaaactccaaggcttctctgcctaacctagtataacccctgttccctactacatacatataacttttccattcccccagtaattgacccaaagtccctgcctctagctgtgcccattgtgcaatgatcagaatcccttgtttcaatagtattttgacttctttaagaatactctgtatttggaagctgaaacctcacttggatccattgttgggaaccaagtacggagccttacatagcccggaggagtttcaggagcaatgccactttcccttccatccctccctctgggtctggctcttcccatagtccattttccccttttatctcccattaatttctgtcttcctctctcaccttttccatgtctctagcatcctccaggatttaaaatcatctttacccaacttatctgtgaagtaatggcaaaagaacatctccaaattaagtactccttttcttcaaaggagtttcatgggatgtacagctagtataaaataaaaatatgggaagatgtccaatcttaaaaaccataagggcaaattaagacaaaactaagctgcccagagcagggtgagtggaaccagttttatgaataaagatgcttgtctcagcactatatgtggatatcaaaaattgtgaacaacttgaacacctatcaggaggagaatactttaatcaattatggcacattcaggagataatgttttacagtcatcaaaaattgtatatgagggccagcacggtggctcacacctgtaatcccagcactttgggaggccaaggcaggcggatcacctgaggtcaggagttcgagaccagactggctaacatggtaaaaccctgtttctactaaaaatacaaaaaagtaaccgggtgtggtggcacgtgcctgtaatcccagctactcgggaggctgaggcaggagaatcgcttgaacccgggaggcagaggttgtggtgagctgagattgcactattgcactccagcttgggcaacaagagcgaaactctgtctcaaaaaaaaattgtatttctgaagaattgttaagaacattggaaattcttgagatataatattgattggaaaaagatgaaactatatggtatgatctcaatatgtcctgatgaataaaaacataatacagaggacattattctgagataaaatacatcaaaatctttccattttatttgtatacttttacaatttttgattttttaaaatgtattctgatacacaaaataataaaaatgaaaaataaaaaatttggccgggcgcagtggctcatgcctgtaatcccagcactttgggagactgaggcaggtggatcacttgaggtcagcagtttgagaccagcctgaccatcatggtgaaaccccatctctactaaaaatacaaaaattaagctgtgtgtgatggtgcacacctgcaatcccaggtactcaggaggcttatgcgggagaatcgcttgaacctgggaggcggaggttgcagtgagccgagatcgggtcactgcactccagcctgggcgacagagtgagattccatctcaaaaaaaaaaaattgtagattcacattgcagtacaactgtgcatcttgcccattgatttctaaatgtattaactacttaaattaatcctgaatcttttcccaggcttaagtgggataatgttttattgtagatgcatatttcctggctctacccagtctttctttgaagactttatcatcctattttctgaatccagtggctgactttaatcttctctggaggaactagataatttctagactaatgcttacactcatgatccagattgtaatttctgaactccttcttccaaatagaatcaaaacaagaaaggggaaagcctctcaaagcaactgtgcgttaataatgaaacactctttttttctaatccaaggagggtttcatactttttcttagtttcttgccctcttcccttctgatcaataattgtaataggaaatttgcaattgtgccaatactcagattcaatactgaactactttcttgcattgtaattcaaattccaaggttaacaactagctgtatgtttccaaaacaatcttattgtatatgtattttcttaggtgaagtttccagaaatgattttttttttttgcagagccaaacacacatggtaatttaaaaaaataatgcacgtatgtggtaaaaacagtaaaagcaaggtatcaagtaaaaagtgaagagtcctccctttctcattcccattcctactctctaattttttatatatccattttgtaagctataatacagagattccatatactcttcacatactttccccagtggtaacctcttgcataactataggacaataacacactataggacaaaaatcaagaaattgacattgatacaatccatcaaccttattcagagttcaccagtttaacacatgcttattgtgtgtctgtatttagttctatataattttatcacatgtatgctgatgaccaccaccacagccaagatacaaaacattttcagtgtaaagatttctcatgctacccttttatagccacagctacctccctccctccctgtacttccctaacccttggcagtcactaatctgatc

SEQ ID NO: 17897 - protein, 226 aa, Homo sapiens; identical to SEQ ID NO: 2134

SEQ ID NO: 17898 - DNA, 1931 bp, Homo sapiens
ggtcccaggcaggcccagaagctgggcagcctctgccgggttccgggaaaaggagctcctgctgccactgctcttccggagcctgcagcatggggcccctgccgcgcaccgtggagctcttctatgacgtgctgtccccctactcctggctgggcttcgagatcctgtgccggtatcagaatatctggaacatcaacctgcagttgcggcccagcctcataacagggatcatgaaagacagtggtaggaagggagggtcggggcaggggtgatctcagtggcccaagagagccgaccccagcgggtccttatattggcactggcagccagaaagctgccctctgccccgtctctactaaaaatacaaaattagccgggcgtggtagtgcatgcctgtataccacagctactcgggaggctgaggcgggagaatcgcttgaacccaggaggcggaggttgcggtgagctgagatcgcaccattgcactccagcctgggcaacaagagcgaaacaacaagagaaaaaaaaggaagctgccctctgcccaaaacccacgtcgaggtccccaaacctgggacccttaggtcttttctcacttagcgtgcccaaccttctcctggcaggaaacaagcctccaggtctgcttccccgcaaaggactatacatggcaaatgacttaaagctcctgagacaccatctccagattcccatccacttccccaaggatttcttgtctgtgatgcttgaaaaaggtgaagagagtgggatgtagacagggtatccagtgaaaaacacagaagtcggagattgagggattgataggatggaggggctgcgggagactaaagcaagtgaagcctgccttgggaaacctcaggatcagccttgagcgagctgaaggttgccgggcatgaaagggaagaagagcaggcaaataggtcatgggaaccttgggtgagaggctgagggcggaggagctctgggggatgtcagaagcaaggaagagctagtcctccaccaggaaagcagcaagaggagccctgcctctgggtgcctctgccccacaggaagtttgtctgccatgcgtttcctcaccgccgtgaacttggagcatccagagatgctggagaaagcgtcccgggagctgtggatgcgcgtctggtcaagggtgagtgtggggctctgggaatcctctgggaggaccttggatgactttctgaccttccccaggcacgttttcagggtcatgatcctgcccccgcccgggggatctactgtcctcccagtcacacccctctccccgcaccgccttcctgctgtcttctcttcttcccagaatgaagacatcaccgagccgcagagcatcctggcggtgagtgtcctggctccaccccaactgcactcatagagaatctgagaacagttggcgtttgggggtaaagaagacaataggtctcttattgcatggaaaaggttataattactggggaagaaaggatgtctgtgattcagggcacaaactactgaaaagttggaactaaggatcctcaaaaggatatctcaaggttgaaaggggaagtgcaaaagggacaatatatgggaagaatttatttgctgaaagatgtcagtgagagaaagatgctcagtgttggaacccctggatggggagggatatagtattcacaagtctccacaaactccaacacaaacctcaccaacacatccagagtggaaggcaggagacttgttccaagaggctttaaaaagacgaaaagagataactaatgccagggttatataggagcctgagtgagaacaaatggaaatagctcaaaacattgaccagtgagccatggatgggggtataaaagtaagtttgtcttcaggattaaattaggaaattcaaaacagtattattcctctggtttaca

SEQ ID NO: 17899 - protein, 60 aa, Homo sapiens
MGPLPRTVELFYDVLSPYSWLGFEILCRYQNIWNINLQLRPSLITGIMKDSGRKGGSGQG

SEQ ID NO: 17900 - DNA, 1010 bp, Homo sapiens
ccaggcaggcccagaagctgggcagcctctgccgggttccgggaaaaggagctcctgctgccactgctcttccggagcctgcagcatggggcccctgccgcgcaccgtggagctcttctatgacgtgctgtccccctactcctggctgggcttcgagatcctgtgccggtatcagaatatctggaacatcaacctgcagttgcggcccagcctcataacagggatcatgaaagacagtggaaacaagcctccaggtctgcttccccgcaaaggactatacatggcaaatgacttaaagctcctgagacaccatctccagattcccatccacttccccaaggatttcttgtctgtgatgcttgaaaaaggaagtttgtctgccatgcgtttcctcaccgccgtgaacttggagcatccagagatgctggagaaagcgtcccgggagctgtggatgcgcgtctggtcaagggctgcagagaaggctggtatgtctgcagaacaagcccagggacttctggaaaagatcgcaacgccaaaggtgaagaaccagctcaaggagaccactgaggcagcctgcagatacggagcctttgggctgcccatcaccgtggcccatgtggatggccaaacccacatgttatttggctctgaccggatggagctgctggcgcacctgctgggagagaagtggatgggccctatacctccagccgtgaatgccagactttaagattgcccggaggaagcaaactcttcgtataaaaaaagcaggccatctgcttaacccttggctccaccataaggcactgggactcggatttctctatctgatagaggtattttctgtggccctgggagctgtctgtctttcccctacccccaaggatgccaggaagacgtccaccattagccatgtggcaacctttacttctatgcctcacaagtgcctttcagagagccccaattctgctttcccacaaaataaacctaatgccatcaggcaaaacatt

SEQ ID NO: 17901 - protein, 214 aa, Homo sapiens
MGPLPRTVELFYDVLSPYSWLGFEILCRYQNIWNINLQLRPSLITGIMKDSGNKPPGLLPRKGLYMANDLKLLRHHLQIPIHFPKDFLSVMLEKGSLSAMRFLTAVNLEHPEMLEKASRELWMRVWSRAAEKAGMSAEQAQGLLEKIATPKVKNQLKETTEAACRYGAFGLPITVAHVDGQTHMLFGSDRMELLAHLLGEKWMGPIPPAVNARL

SEQ ID NO: 17902 - DNA, 4131 bp, Homo sapiens
ccaggcaggcccagaagctgggcagcctctgccgggttccgggaaaaggagctcctgctgccactgctcttccggagcctgcagcatggggcccctgccgcgcaccgtggagctcttctatgacgtgctgtccccctactcctggctgggcttcgagatcctgtgccggtatcagaatatctggaacatcaacctgcagttgcggcccagcctcataacagggatcatgaaagacagtggaaacaagcctccaggtctgcttccccgcaaaggactatacatggcaaatgacttaaagctcctgagacaccatctccagattcccatccacttccccaaggatttcttgtctgtgatgcttgaaaaaggaagtttgtctgccatgcgtttcctcaccgccgtgaacttggagcatccagagatgctggagaaagcgtcccgggagctgtggatgcgcgtctggtcaagggctgcagagaaggctggtatgtctgcagaacaagcccagggacttctggaaaagatcgcaacgccaaaggtgaagaaccagctcaaggagaccactgaggcagcctgcagatacggagcctttgggctgcccatcaccgtggcccatgtggatggccaaacccacatgttatttggctctgaccggatggagctgctggcgcacctgctgggagagaagtggatgggccctatacctccagccgtgaatgccagactttaagattgcccggaggaagcaaactcttcgtataaaaaaagcaggccatctgcttaacccttggctccaccataaggcactgggactcggatttctctatctgatagaggtattttctgtggccctgggagctgtctgtctttcccctacccccaaggatgccaggaagacgtccaccattagccatgtggcaacctttacttctatgcctcacaagtgcctttcagagagccccaattctgctttcccacaaaataaacctaatgccatcaggcaaaacatttctgtgtctgtatctgccctggtatattctcattcctggggtcacatcctgcctactctaggggtaggtgaaggagagctgtttcagtatttccagccagaccagccatgcagcccaccttgagcagcttgtgcggtggaagaagtgagaatagtcccccgttctctcacacagaaactcccctggtctctctatcagcaacagaaaaccaagccagatggactttgcaactaatcaagtttgggatttactgtcttctgaccaaccacagtgactgagatggggctgggaccagaagcccagtgggagtgaacagccgagggaaccagagtctggctgagcttgtggccagatatttaaactgggtccagccacacctgcaaaaccagggcaaggcagtaccgggaaactggctggagttgctgcggtttggggaagttgcacaccctttcatagatacctcccttaaccctcagtgcagattctgagaaaactccaaggcttctctgcctaacctagtataacccctgttccctactacatacatataacttttccattcccccagtaattgacccaaagtccctgcctctagctgtgcccattgtgcaatgatcagaatcccttgtttcaatagtattttgacttctttaagaatactctgtatttggaagctgaaacctcacttggatccattgttgggaaccaagtacggagccttacatagcccggaggagtttcaggagcaatgccactttcccttccatccctccctctgggtctggctcttcccatagtccattttccccttttatctcccattaatttctgtcttcctctctcaccttttccatgtctctagcatcctccaggatttaaaatcatctttacccaacttatctgtgaagtaatggcaaaagaacatctccaaattaagtactccttttcttcaaaggagtttcatgggatgtacagctagtataaaataaaaatatgggaagatgtccaatcttaaaaaccataagggcaaattaagacaaaactaagctgcccagagcagggtgagtggaaccagttttatgaataaagatgcttgtctcagcactatatgtggatatcaaaaattgtgaacaacttgaacacctatcaggaggagaatactttaatcaattatggcacattcaggagataatgttttacagtcatcaaaaattgtatatgagggccagcacggtggctcacacctgtaatcccagcactttgggaggccaaggcaggcggatcacctgaggtcaggagttcgagaccagactggctaacatggtaaaaccctgtttctactaaaaatacaaaaaagtaaccgggtgtggtggcacgtgcctgtaatcccagctactcgggaggctgaggcaggagaatcgcttgaacccgggaggcagaggttgtggtgagctgagattgcactattgcactccagcttgggcaacaagagcgaaactctgtctcaaaaaaaaattgtatttctgaagaattgttaagaacattggaaattcttgagatataatattgattggaaaaagatgaaactatatggtatgatctcaatatgtcctgatgaataaaaacataatacagaggacattattctgagataaaatacatcaaaatctttccattttatttgtatacttttacaatttttgattttttaaaatgtattctgatacacaaaataataaaaatgaaaaataaaaaatttggccgggcgcagtggctcatgcctgtaatcccagcactttgggagactgaggcaggtggatcacttgaggtcagcagtttgagaccagcctgaccatcatggtgaaaccccatctctactaaaaatacaaaaattaagctgtgtgtgatggtgcacacctgcaatcccaggtactcaggaggcttatgcgggagaatcgcttgaacctgggaggcggaggttgcagtgagccgagatcgggtcactgcactccagcctgggcgacagagtgagattccatctcaaaaaaaaaaaattgtagattcacattgcagtacaactgtgcatcttgcccattgatttctaaatgtattaactacttaaattaatcctgaatcttttcccaggcttaagtgggataatgttttattgtagatgcatatttcctggctctacccagtctttctttgaagactttatcatcctattttctgaatccagtggctgactttaatcttctctggaggaactagataatttctagactaatgcttacactcatgatccagattgtaatttctgaactccttcttccaaatagaatcaaaacaagaaaggggaaagcctctcaaagcaactgtgcgttaataatgaaacactctttttttctaatccaaggagggtttcatactttttcttagtttcttgccctcttcccttctgatcaataattgtaataggaaatttgcaattgtgccaatactcagattcaatactgaactactttcttgcattgtaattcaaattccaaggttaacaactagctgtatgtttccaaaacaatcttattgtatatgtattttcttaggtgaagtttccagaaatgattttttttttttgcagagccaaacacacatggtaatttaaaaaaataatgcacgtatgtggtaaaaacagtaaaagcaaggtatcaagtaaaaagtgaagagtcctccctttctcattcccattcctactctctaattttttatatatccattttgtaagctataatacagagattccatatactcttcacatactttccccagtggtaacctcttgcataactataggacaataacacactataggacaaaaatcaagaaattgacattgatacaatccatcaaccttattcagagttcaccagtttaacacatgcttattgtgtgtctgtatttagttctatataattttatcacatgtatgctgatgaccaccaccacagccaagatacaaaacattttcagtgtaaagatttctcatgctacccttttatagccacagctacctccctccctccctgtacttccctaacccttggcagtcactaatctgatc

SEQ ID NO: 17903 - protein, 214 aa, Homo sapiens; identical to SEQ ID NO: 17901

SEQ ID NO: 17904 - DNA, 4133 bp, Homo sapiens
caggcaggcccagaagctgggcagcctctgccgggttccgggaaaaggagctcctgctgccactgctcttccggagcctgcagcatggggcccctgccgcgcaccgtggagctcttctatgacgtgctgtccccctactcctggctgggcttcgagatcctgtgccggtatcagaatatctggaacatcaacctgcagttgcggcccagcctcataacagggatcatgaaagacagtggaaacaagcctccaggtctgcttccccgcaaaggactatacatggcaaatgacttaaagctcctgagacaccatctccagattcccatccacttccccaaggatttcttgtctgtgatgcttgaaaaaggtgaagagagtgggatgtagacagggtatccagtgaaaaacacagaagtcggagattgagggattgataggatggaggggctgcgggagactaaagcaagtgaagcctgccttgggaaacctcaggatcagccttgagcgagctgaaggttgccgggcatgaaagggaagaagagcaggcaaataggtcatgggaaccttgggtgagaggctgagggcggaggagctctgggggatgtcagaagcaaggaagagctagtcctccaccaggaaagcagcaagaggagccctgcctctgggtgcctctgccccacaggaagtttgtctgccatgcgtttcctcaccgccgtgaacttggagcatccagagatgctggagaaagcgtcccgggagctgtggatgcgcgtctggtcaaggaatgaagacatcaccgagccgcagagcatcctggcggctgcagagaaggctggtatgtctgcagaacaagcccagggacttctggaaaagatcgcaacgccaaaggtgaagaaccagctcaaggagaccactgaggcagcctgcagatacggagcctttgggctgcccatcaccgtggcccatgtggatggccaaacccacatgttatttggctctgaccggatggagctgctggcgcacctgctgggagagaagtggatgggccctatacctccagccgtgaatgccagactttaagattgcccggaggaagcaaactcttcgtataaaaaaagcaggccatctgcttaacccttggctccaccataaggcactgggactcggatttctctatctgatagagaaactcccctggtctctctatcagcaacagaaaaccaagccagatggactttgcaactaatcaagtttgggatttactgtcttctgaccaaccacagtgactgagatggggctgggaccagaagcccagtgggagtgaacagccgagggaaccagagtctggctgagcttgtggccagatatttaaactgggtccagccacacctgcaaaaccagggcaaggcagtaccgggaaactggctggagttgctgcggtttggggaagttgcacaccctttcatagatacctcccttaaccctcagtgcagattctgagaaaactccaaggcttctctgcctaacctagtataacccctgttccctactacatacatataacttttccattcccccagtaattgacccaaagtccctgcctctagctgtgcccattgtgcaatgatcagaatcccttgtttcaatagtattttgacttctttaagaatactctgtatttggaagctgaaacctcacttggatccattgttgggaaccaagtacggagccttacatagcccggaggagtttcaggagcaatgccactttcccttccatccctccctctgggtctggctcttcccatagtccattttccccttttatctcccattaatttctgtcttcctctctcaccttttccatgtctctagcatcctccaggatttaaaatcatctttacccaacttatctgtgaagtaatggcaaaagaacatctccaaattaagtactccttttcttcaaaggagtttcatgggatgtacagctagtataaaataaaaatatgggaagatgtccaatcttaaaaaccataagggcaaattaagacaaaactaagctgcccagagcagggtgagtggaaccagttttatgaataaagatgcttgtctcagcactatatgtggatatcaaaaattgtgaacaacttgaacacctatcaggaggagaatactttaatcaattatggcacattcaggagataatgttttacagtcatcaaaaattgtatatgagggccagcacggtggctcacacctgtaatcccagcactttgggaggccaaggcaggcggatcacctgaggtcaggagttcgagaccagactggctaacatggtaaaaccctgtttctactaaaaatacaaaaaagtaaccgggtgtggtggcacgtgcctgtaatcccagctactcgggaggctgaggcaggagaatcgcttgaacccgggaggcagaggttgtggtgagctgagattgcactattgcactccagcttgggcaacaagagcgaaactctgtctcaaaaaaaaattgtatttctgaagaattgttaagaacattggaaattcttgagatataatattgattggaaaaagatgaaactatatggtatgatctcaatatgtcctgatgaataaaaacataatacagaggacattattctgagataaaatacatcaaaatctttccattttatttgtatacttttacaatttttgattttttaaaatgtattctgatacacaaaataataaaaatgaaaaataaaaaatttggccgggcgcagtggctcatgcctgtaatcccagcactttgggagactgaggcaggtggatcacttgaggtcagcagtttgagaccagcctgaccatcatggtgaaaccccatctctactaaaaatacaaaaattaagctgtgtgtgatggtgcacacctgcaatcccaggtactcaggaggcttatgcgggagaatcgcttgaacctgggaggcggaggttgcagtgagccgagatcgggtcactgcactccagcctgggcgacagagtgagattccatctcaaaaaaaaaaaattgtagattcacattgcagtacaactgtgcatcttgcccattgatttctaaatgtattaactacttaaattaatcctgaatcttttcccaggcttaagtgggataatgttttattgtagatgcatatttcctggctctacccagtctttctttgaagactttatcatcctattttctgaatccagtggctgactttaatcttctctggaggaactagataatttctagactaatgcttacactcatgatccagattgtaatttctgaactccttcttccaaatagaatcaaaacaagaaaggggaaagcctctcaaagcaactgtgcgttaataatgaaacactctttttttctaatccaaggagggtttcatactttttcttagtttcttgccctcttcccttctgatcaataattgtaataggaaatttgcaattgtgccaatactcagattcaatactgaactactttcttgcattgtaattcaaattccaaggttaacaactagctgtatgtttccaaaacaatcttattgtatatgtattttcttaggtgaagtttccagaaatgattttttttttttgcagagccaaacacacatggtaatttaaaaaaataatgcacgtatgtggtaaaaacagtaaaagcaaggtatcaagtaaaaagtgaagagtcctccctttctcattcccattcctactctctaattttttatatatccattttgtaagctataatacagagattccatatactcttcacatactttccccagtggtaacctcttgcataactataggacaataacacactataggacaaaaatcaagaaattgacattgatacaatccatcaaccttattcagagttcaccagtttaacacatgcttattgtgtgtctgtatttagttctatataattttatcacatgtatgctgatgaccaccaccacagccaagatacaaaacattttcagtgtaaagatttctcatgctacccttttatagccacagctacctccctccctccctgtacttccctaacccttggcagtcactaatctgatc

SEQ ID NO: 17905 - protein, 127 aa, Homo sapiens [sequence omitted]

SEQ ID NO: 17906 - DNA, 1211 bp, Homo sapiens
ggcaggcccagaagctgggcagcctctgccgggttccgggaaaaggagctcctgctgccactgctcttccggagcctgcagcatggggcccctgccgcgcaccgtggagctcttctatgacgtgctgtccccctactcctggctgggcttcgagatcctgtgccggtatcagaatatctggaacatcaacctgcagttgcggcccagcctcataacagggatcatgaaagacagtggaaacaagcctccaggtctgcttccccgcaaaggactatacatggcaaatgacttaaagctcctgagacaccatctccagattcccatccacttccccaaggatttcttgtctgtgatgcttgaaaaaggaagtttgtctgccatgcgtttcctcaccgccgtgaacttggagcatccagagatgctggagaaagcgtcccgggagctgtggatgcgcgtctggtcaagggtgagtgtggggctctgggaatcctctgggaggaccttggatgactttctgaccttccccaggcacgttttcagggtcatgatcctgcccccgcccgggggatctactgtcctcccagtcacacccctctccccgcaccgccttcctgctgtcttctcttcttcccagaatgaagacatcaccgagccgcagagcatcctggcggctgcagagaaggctggtatgtctgcagaacaagcccagggacttctggaaaagatcgcaacgccaaaggtgaagaaccagctcaaggagaccactgaggcagcctgcagatacggagcctttgggctgcccatcaccgtggcccatgtggatggccaaacccacatgttatttggctctgaccggatggagctgctggcgcacctgctgggagagaagtggatgggccctatacctccagccgtgaatgccagactttaagattgcccggaggaagcaaactcttcgtataaaaaaagcaggccatctgcttaacccttggctccaccataaggcactgggactcggatttctctatctgatagaggtattttctgtggccctgggagctgtctgtctttcccctacccccaaggatgccaggaagacgtccaccattagccatgtggcaacctttacttctatgcctcacaagtgcctttcagagagccccaattctgctttcccacaaaataaacctaatgccatcaggcaaaacatt

SEQ ID NO: 17907 - protein, 282 aa, Homo sapiens
MGPLPRTVELFYDVLSPYSWLGFEILCRYQNIWNINLQLRPSLITGIMKDSGNKPPGLLPRKGLYMANDLKLLRHHLQIPIHFPKDFLSVMLEKGSLSAMRFLTAVNLEHPEMLEKASRELWMRVWSRVSVGLWESSGRTLDDFLTFPRHVFRVMILPPPGGSTVLPVTPLSPHRLPAVFSSSQNEDITEPQSILAAAEKAGMSAEQAQGLLEKIATPKVKNQLKETTEAACRYGAFGLPITVAHVDGQTHMLFGSDRMELLAHLLGEKWMGPIPPAVNARL

SEQ ID NO: 17908 - DNA, 4332 bp, Homo sapiens
ggcaggcccagaagctgggcagcctctgccgggttccgggaaaaggagctcctgctgccactgctcttccggagcctgcagcatggggcccctgccgcgcaccgtggagctcttctatgacgtgctgtccccctactcctggctgggcttcgagatcctgtgccggtatcagaatatctggaacatcaacctgcagttgcggcccagcctcataacagggatcatgaaagacagtggaaacaagcctccaggtctgcttccccgcaaaggactatacatggcaaatgacttaaagctcctgagacaccatctccagattcccatccacttccccaaggatttcttgtctgtgatgcttgaaaaaggaagtttgtctgccatgcgtttcctcaccgccgtgaacttggagcatccagagatgctggagaaagcgtcccgggagctgtggatgcgcgtctggtcaagggtgagtgtggggctctgggaatcctctgggaggaccttggatgactttctgaccttccccaggcacgttttcagggtcatgatcctgcccccgcccgggggatctactgtcctcccagtcacacccctctccccgcaccgccttcctgctgtcttctcttcttcccagaatgaagacatcaccgagccgcagagcatcctggcggctgcagagaaggctggtatgtctgcagaacaagcccagggacttctggaaaagatcgcaacgccaaaggtgaagaaccagctcaaggagaccactgaggcagcctgcagatacggagcctttgggctgcccatcaccgtggcccatgtggatggccaaacccacatgttatttggctctgaccggatggagctgctggcgcacctgctgggagagaagtggatgggccctatacctccagccgtgaatgccagactttaagattgcccggaggaagcaaactcttcgtataaaaaaagcaggccatctgcttaacccttggctccaccataaggcactgggactcggatttctctatctgatagaggtattttctgtggccctgggagctgtctgtctttcccctacccccaaggatgccaggaagacgtccaccattagccatgtggcaacctttacttctatgcctcacaagtgcctttcagagagccccaattctgctttcccacaaaataaacctaatgccatcaggcaaaacatttctgtgtctgtatctgccctggtatattctcattcctggggtcacatcctgcctactctaggggtaggtgaaggagagctgtttcagtatttccagccagaccagccatgcagcccaccttgagcagcttgtgcggtggaagaagtgagaatagtcccccgttctctcacacagaaactcccctggtctctctatcagcaacagaaaaccaagccagatggactttgcaactaatcaagtttgggatttactgtcttctgaccaaccacagtgactgagatggggctgggaccagaagcccagtgggagtgaacagccgagggaaccagagtctggctgagcttgtggccagatatttaaactgggtccagccacacctgcaaaaccagggcaaggcagtaccgggaaactggctggagttgctgcggtttggggaagttgcacaccctttcatagatacctcccttaaccctcagtgcagattctgagaaaactccaaggcttctctgcctaacctagtataacccctgttccctactacatacatataacttttccattcccccagtaattgacccaaagtccctgcctctagctgtgcccattgtgcaatgatcagaatcccttgtttcaatagtattttgacttctttaagaatactctgtatttggaagctgaaacctcacttggatccattgttgggaaccaagtacggagccttacatagcccggaggagtttcaggagcaatgccactttcccttccatccctccctctgggtctggctcttcccatagtccattttccccttttatctcccattaatttctgtcttcctctctcaccttttccatgtctctagcatcctccaggatttaaaatcatctttacccaacttatctgtgaagtaatggcaaaagaacatctccaaattaagtactccttttcttcaaaggagtttcatgggatgtacagctagtataaaataaaaatatgggaagatgtccaatcttaaaaaccataagggcaaattaagacaaaactaagctgcccagagcagggtgagtggaaccagttttatgaataaagatgcttgtctcagcactatatgtggatatcaaaaattgtgaacaacttgaacacctatcaggaggagaatactttaatcaattatggcacattcaggagataatgttttacagtcatcaaaaattgtatatgagggccagcacggtggctcacacctgtaatcccagcactttgggaggccaaggcaggcggatcacctgaggtcaggagttcgagaccagactggctaacatggtaaaaccctgtttctactaaaaatacaaaaaagtaaccgggtgtggtggcacgtgcctgtaatcccagctactcgggaggctgaggcaggagaatcgcttgaacccgggaggcagaggttgtggtgagctgagattgcactattgcactccagcttgggcaacaagagcgaaactctgtctcaaaaaaaaattgtatttctgaagaattgttaagaacattggaaattcttgagatataatattgattggaaaaagatgaaactatatggtatgatctcaatatgtcctgatgaataaaaacataatacagaggacattattctgagataaaatacatcaaaatctttccattttatttgtatacttttacaatttttgattttttaaaatgtattctgatacacaaaataataaaaatgaaaaataaaaaatttggccgggcgcagtggctcatgcctgtaatcccagcactttgggagactgaggcaggtggatcacttgaggtcagcagtttgagaccagcctgaccatcatggtgaaaccccatctctactaaaaatacaaaaattaagctgtgtgtgatggtgcacacctgcaatcccaggtactcaggaggcttatgcgggagaatcgcttgaacctgggaggcggaggttgcagtgagccgagatcgggtcactgcactccagcctgggcgacagagtgagattccatctcaaaaaaaaaaaattgtagattcacattgcagtacaactgtgcatcttgcccattgatttctaaatgtattaactacttaaattaatcctgaatcttttcccaggcttaagtgggataatgttttattgtagatgcatatttcctggctctacccagtctttctttgaagactttatcatcctattttctgaatccagtggctgactttaatcttctctggaggaactagataatttctagactaatgcttacactcatgatccagattgtaatttctgaactccttcttccaaatagaatcaaaacaagaaaggggaaagcctctcaaagcaactgtgcgttaataatgaaacactctttttttctaatccaaggagggtttcatactttttcttagtttcttgccctcttcccttctgatcaataattgtaataggaaatttgcaattgtgccaatactcagattcaatactgaactactttcttgcattgtaattcaaattccaaggttaacaactagctgtatgtttccaaaacaatcttattgtatatgtattttcttaggtgaagtttccagaaatgattttttttttttgcagagccaaacacacatggtaatttaaaaaaataatgcacgtatgtggtaaaaacagtaaaagcaaggtatcaagtaaaaagtgaagagtcctccctttctcattcccattcctactctctaattttttatatatccattttgtaagctataatacagagattccatatactcttcacatactttccccagtggtaacctcttgcataactataggacaataacacactataggacaaaaatcaagaaattgacattgatacaatccatcaaccttattcagagttcaccagtttaacacatgcttattgtgtgtctgtatttagttctatataattttatcacatgtatgctgatgaccaccaccacagccaagatacaaaacattttcagtgtaaagatttctcatgctacccttttatagccacagctacctccctccctccctgtacttccctaacccttggcagtcactaatctgatc

SEQ ID NO: 17909 - protein, 282 aa, Homo sapiens; identical to SEQ ID NO: 17907

SEQ ID NO: 17910 - DNA, 2038 bp, Homo sapiens
cccagaagctgggcagcctctgccgggttccgggaaaaggagctcctgctgccactgctcttccggagcctgcagcatggggcccctgccgcgcaccgtggagctcttctatgacgtgctgtccccctactcctggctgggcttcgaggtgacgctgggaggggtcgcctcggcagtgtctggggagtgagggcggagggaagagtgagcgcagggctccgggacagaggtctcgtgtaactcctggcgccgcccaaggggttaaggcaagcagggagagctccggggctgaaggtcactttgtgcttttaaacggaatagagtcgctggctccaacccgagcctttatatcccgactgcagtttcccacggtggtggaaagaggggcggctccaaacattcagggagaaatgcagaacacggccacctcttagcccaacgatggcagttttggggaaaactggccacaggagcgaagatcctggaatagatttctagtagtgaggagagttttgccaatttcaaaccaaacaatgtagggtgtccgcataacccctgctctgcacttagcgcctcccttccctttccctcggctctttcacttttccatcttgcacactggcaatcgttcttgacctctgcccgcagatcctgtgccggtatcagaatatctggaacatcaacctgcagttgcggcccagcctcataacagggatcatgaaagacagtggaaacaagcctccaggtctgcttccccgcaaaggactatacatggcaaatgacttaaagctcctgagacaccatctccagattcccatccacttccccaaggatttcttgtctgtgatgcttgaaaaaggtgaagagagtgggatgtagacagggtatccagtgaaaaacacagaagtcggagattgagggattgataggatggaggggctgcgggagactaaagcaagtgaagcctgccttgggaaacctcaggatcagccttgagcgagctgaaggttgccgggcatgaaagggaagaagagcaggcaaataggtcatgggaaccttgggtgagaggctgagggcggaggagctctgggggatgtcagaagcaaggaagagctagtcctccaccaggaaagcagcaagaggagccctgcctctgggtgcctctgccccacaggaagtttgtctgccatgcgtttcctcaccgccgtgaacttggagcatccagagatgctggagaaagcgtcccgggagctgtggatgcgcgtctggtcaagggtgagtgtggggctctgggaatcctctgggaggaccttggatgactttctgaccttccccaggcacgttttcagggtcatgatcctgcccccgcccgggggatctactgtcctcccagtcacacccctctccccgcaccgccttcctgctgtcttctcttcttcccagaatgaagacatcaccgagccgcagagcatcctggcggtgagtgtcctggctccaccccaactgcactcatagagaatctgagaacagttggcgtttgggggtaaagaagacaataggtctcttattgcatggaaaaggttataattactggggaagaaaggatgtctgtgattcagggcacaaactactgaaaagttggaactaaggatcctcaaaaggatatctcaaggttgaaaggggaagtgcaaaagggacaatatatgggaagaatttatttgctgaaagatgtcagtgagagaaagatgctcagtgttggaacccctggatggggagggatatagtattcacaagtctccacaaactccaacacaaacctcaccaacacatccagagtggaaggcaggagacttgttccaagaggctttaaaaagacgaaaagagataactaatgccagggttatataggagcctgagtgagaacaaatggaaatagctcaaaacattgaccagtgagccatggatgggggtataaaagtaagtttgtcttcaggattaaattaggaaattcaaaacagtattattcctctggtttaca

SEQ ID NO: 17911 - protein, 53 aa, Homo sapiens
MKDSGNKPPGLLPRKGLYMANDLKLLRHHLQIPIHFPKDFLSVMLEKGEESGM

SEQ ID NO: 17912 - DNA, 1163 bp, Homo sapiens
tgggcagcctctgccgggttccgggaaaaggagctcctgctgccactgctcttccggagcctgcagcatggggcccctgccgcgcaccgtggagctcttctatgacgtgctgtccccctactcctggctgggcttcgagatcctgtgccggtatcagaatatctggaacatcaacctgcagttgcggcccagcctcataacagggatcatgaaagacagtggaaacaagcctccaggtctgcttccccgcaaaggactatacatggcaaatgacttaaagctcctgagacaccatctccagattcccatccacttccccaaggatttcttgtctgtgatgcttgaaaaagagatgctggagaaagcgtcccgggagctgtggatgcgcgtctggtcaagggtgagtgtggggctctgggaatcctctgggaggaccttggatgactttctgaccttccccaggcacgttttcagggtcatgatcctgcccccgcccgggggatctactgtcctcccagtcacacccctctccccgcaccgccttcctgctgtcttctcttcttcccagaatgaagacatcaccgagccgcagagcatcctggcggtgagtgtcctggctccaccccaactgcactcatagagaatctgagaacagttggcgtttgggggtaaagaagacaataggtctcttattgcatggaaaaggttataattactggggaagaaaggatgtctgtgattcagggcacaaactactgaaaagttggaactaaggatcctcaaaaggatatctcaaggttgaaaggggaagtgcaaaagggacaatatatgggaagaatttatttgctgaaagatgtcagtgagagaaagatgctcagtgttggaacccctggatggggagggatatagtattcacaagtctccacaaactccaacacaaacctcaccaacacatccagagtggaaggcaggagacttgttccaagaggctttaaaaagacgaaaagagataactaatgccagggttatataggagcctgagtgagaacaaatggaaatagctcaaaacattgaccagtgagccatggatgggggtataaaagtaagtttgtcttcaggattaaattaggaaattcaaaacagtattattcctctggtttaca

SEQ ID NO: 17913 - protein, 190 aa, Homo sapiens
MGPLPRTVELFYDVLSPYSWLGFEILCRYQNIWNINLQLRPSLITGIMKDSGNKPPGLLPRKGLYMANDLKLLRHHLQIPIHFPKDFLSVMLEKEMLEKASRELWMRVWSRVSVGLWESSGRTLDDFLTFPRHVFRVMILPPPGGSTVLPVTPLSPHRLPAVFSSSQNEDITEPQSILAVSVLAPPQLHS

SEQ ID NO: 17914 - DNA, 932 bp, Homo sapiens
ttctagtagtgaggagagttttgccaatttcaaaccaaacaatatcctgtgccggtatcagaatatctggaacatcaacctgcagttgcggcccagcctcataacagggatcatgaaagacagtggaaacaagcctccaggtctgcttccccgcaaaggactatacatggcaaatgacttaaagctcctgagacaccatctccagattcccatccacttccccaaggatttcttgtctgtgatgcttgaaaaaggaagtttgtctgccatgcgtttcctcaccgccgtgaacttggagcatccagagatgctggagaaagcgtcccgggagctgtggatgcgcgtctggtcaaggaatgaagacatcaccgagccgcagagcatcctggcggctgcagagaaggctggtatgtctgcagaacaagcccagggacttctggaaaagatcgcaacgccaaaggtgaagaaccagctcaaggagaccactgaggcagcctgcagatacggagcctttgggctgcccatcaccgtggcccatgtggatggccaaacccacatgttatttggctctgaccggatggagctgctggcgcacctgctgggagagaagtggatgggccctatacctccagccgtgaatgccagactttaagattgcccggaggaagcaaactcttcgtataaaaaaagcaggccatctgcttaacccttggctccaccataaggcactgggactcggatttctctatctgatagaggtattttctgtggccctgggagctgtctgtctttcccctacccccaaggatgccaggaagacgtccaccattagccatgtggcaacctttacttctatgcctcacaagtgcctttcagagagccccaattctgctttcccacaaaataaacctaatgccatcaggcaaaacatt

SEQ ID NO: 17915 - protein, 179 aa, Homo sapiens [sequence omitted]

SEQ ID NO: 17916 - DNA, 4053 bp, Homo sapiens
ttctagtagtgaggagagttttgccaatttcaaaccaaacaatatcctgtgccggtatcagaatatctggaacatcaacctgcagttgcggcccagcctcataacagggatcatgaaagacagtggaaacaagcctccaggtctgcttccccgcaaaggactatacatggcaaatgacttaaagctcctgagacaccatctccagattcccatccacttccccaaggatttcttgtctgtgatgcttgaaaaaggaagtttgtctgccatgcgtttcctcaccgccgtgaacttggagcatccagagatgctggagaaagcgtcccgggagctgtggatgcgcgtctggtcaaggaatgaagacatcaccgagccgcagagcatcctggcggctgcagagaaggctggtatgtctgcagaacaagcccagggacttctggaaaagatcgcaacgccaaaggtgaagaaccagctcaaggagaccactgaggcagcctgcagatacggagcctttgggctgcccatcaccgtggcccatgtggatggccaaacccacatgttatttggctctgaccggatggagctgctggcgcacctgctgggagagaagtggatgggccctatacctccagccgtgaatgccagactttaagattgcccggaggaagcaaactcttcgtataaaaaaagcaggccatctgcttaacccttggctccaccataaggcactgggactcggatttctctatctgatagaggtattttctgtggccctgggagctgtctgtctttcccctacccccaaggatgccaggaagacgtccaccattagccatgtggcaacctttacttctatgcctcacaagtgcctttcagagagccccaattctgctttcccacaaaataaacctaatgccatcaggcaaaacatttctgtgtctgtatctgccctggtatattctcattcctggggtcacatcctgcctactctaggggtaggtgaaggagagctgtttcagtatttccagccagaccagccatgcagcccaccttgagcagcttgtgcggtggaagaagtgagaatagtcccccgttctctcacacagaaactcccctggtctctctatcagcaacagaaaaccaagccagatggactttgcaactaatcaagtttgggatttactgtcttctgaccaaccacagtgactgagatggggctgggaccagaagcccagtgggagtgaacagccgagggaaccagagtctggctgagcttgtggccagatatttaaactgggtccagccacacctgcaaaaccagggcaaggcagtaccgggaaactggctggagttgctgcggtttggggaagttgcacaccctttcatagatacctcccttaaccctcagtgcagattctgagaaaactccaaggcttctctgcctaacctagtataacccctgttccctactacatacatataacttttccattcccccagtaattgacccaaagtccctgcctctagctgtgcccattgtgcaatgatcagaatcccttgtttcaatagtattttgacttctttaagaatactctgtatttggaagctgaaacctcacttggatccattgttgggaaccaagtacggagccttacatagcccggaggagtttcaggagcaatgccactttcccttccatccctccctctgggtctggctcttcccatagtccattttccccttttatctcccattaatttctgtcttcctctctcaccttttccatgtctctagcatcctccaggatttaaaatcatctttacccaacttatctgtgaagtaatggcaaaagaacatctccaaattaagtactccttttcttcaaaggagtttcatgggatgtacagctagtataaaataaaaatatgggaagatgtccaatcttaaaaaccataagggcaaattaagacaaaactaagctgcccagagcagggtgagtggaaccagttttatgaataaagatgcttgtctcagcactatatgtggatatcaaaaattgtgaacaacttgaacacctatcaggaggagaatactttaatcaattatggcacattcaggagataatgttttacagtcatcaaaaattgtatatgagggccagcacggtggctcacacctgtaatcccagcactttgggaggccaaggcaggcggatcacctgaggtcaggagttcgagaccagactggctaacatggtaaaaccctgtttctactaaaaatacaaaaaagtaaccgggtgtggtggcacgtgcctgtaatcccagctactcgggaggctgaggcaggagaatcgcttgaacccgggaggcagaggttgtggtgagctgagattgcactattgcactccagcttgggcaacaagagcgaaactctgtctcaaaaaaaaattgtatttctgaagaattgttaagaacattggaaattcttgagatataatattgattggaaaaagatgaaactatatggtatgatctcaatatgtcctgatgaataaaaacataatacagaggacattattctgagataaaatacatcaaaatctttccattttatttgtatacttttacaatttttgattttttaaaatgtattctgatacacaaaataataaaaatgaaaaataaaaaatttggccgggcgcagtggctcatgcctgtaatcccagcactttgggagactgaggcaggtggatcacttgaggtcagcagtttgagaccagcctgaccatcatggtgaaaccccatctctactaaaaatacaaaaattaagctgtgtgtgatggtgcacacctgcaatcccaggtactcaggaggcttatgcgggagaatcgcttgaacctgggaggcggaggttgcagtgagccgagatcgggtcactgcactccagcctgggcgacagagtgagattccatctcaaaaaaaaaaaattgtagattcacattgcagtacaactgtgcatcttgcccattgatttctaaatgtattaactacttaaattaatcctgaatcttttcccaggcttaagtgggataatgttttattgtagatgcatatttcctggctctacccagtctttctttgaagactttatcatcctattttctgaatccagtggctgactttaatcttctctggaggaactagataatttctagactaatgcttacactcatgatccagattgtaatttctgaactccttcttccaaatagaatcaaaacaagaaaggggaaagcctctcaaagcaactgtgcgttaataatgaaacactctttttttctaatccaaggagggtttcatactttttcttagtttcttgccctcttcccttctgatcaataattgtaataggaaatttgcaattgtgccaatactcagattcaatactgaactactttcttgcattgtaattcaaattccaaggttaacaactagctgtatgtttccaaaacaatcttattgtatatgtattttcttaggtgaagtttccagaaatgattttttttttttgcagagccaaacacacatggtaatttaaaaaaataatgcacgtatgtggtaaaaacagtaaaagcaaggtatcaagtaaaaagtgaagagtcctccctttctcattcccattcctactctctaattttttatatatccattttgtaagctataatacagagattccatatactcttcacatactttccccagtggtaacctcttgcataactataggacaataacacactataggacaaaaatcaagaaattgacattgatacaatccatcaaccttattcagagttcaccagtttaacacatgcttattgtgtgtctgtatttagttctatataattttatcacatgtatgctgatgaccaccaccacagccaagatacaaaacattttcagtgtaaagatttctcatgctacccttttatagccacagctacctccctccctccctgtacttccctaacccttggcagtcactaatctgatc

SEQ ID NO: 17917 - protein, 179 aa, Homo sapiens [sequence omitted]

SEQ ID NO: 17918 - DNA, 834 bp, Homo sapiens
caaaggtgaagaaccagctcaaggagaccactgaggcagcctgcagatacggagtgagcagctctttatgtgtgttcccagcacccatcctgaagatggagacttgagaatctctaagtttgagtccttatgctcctgtacaaaagccccctttccaagtgttctcctcagtgctcttaaacaaccctcatcttcttccttcttttccttgggctcagggaaaggaagggaaggagatgcacagtgagagaaaagagagcatcttagaaacaggaaggcacctggggccacagagcctcttagacctctttgcttctgtgaactcagaaaagtactgactcaaaggtttcaacccctgcctaatacctgctcctttgccttcctccttgcattgtaactgctttctccaggcctttgggctgcccatcaccgtggcccatgtggatggccaaacccacatgttatttggctctgaccggatggagctgctggcgcacctgctgggagagaagtggatgggccctatacctccagccgtgaatgccagactttaagattgcccggaggaagcaaactcttcgtataaaaaaagcaggccatctgcttaacccttggctccaccataaggcactgggactcggatttctctatctgatagaggtattttctgtggccctgggagctgtctgtctttcccctacccccaaggatgccaggaagacgtccaccattagccatgtggcaacctttacttctatgcctcacaagtgcctttcagagagccccaattctgctttcccacaaaataaacctaatgccatcaggcaaaacatt

SEQ ID NO: 17919 - protein, 33 aa, Homo sapiens
MWMAKPTCYLALTGWSCWRTCWERSGWALYLQP

SEQ ID NO: 17920 - DNA, 3955 bp, Homo sapiens
caaaggtgaagaaccagctcaaggagaccactgaggcagcctgcagatacggagtgagcagctctttatgtgtgttcccagcacccatcctgaagatggagacttgagaatctctaagtttgagtccttatgctcctgtacaaaagccccctttccaagtgttctcctcagtgctcttaaacaaccctcatcttcttccttcttttccttgggctcagggaaaggaagggaaggagatgcacagtgagagaaaagagagcatcttagaaacaggaaggcacctggggccacagagcctcttagacctctttgcttctgtgaactcagaaaagtactgactcaaaggtttcaacccctgcctaatacctgctcctttgccttcctccttgcattgtaactgctttctccaggcctttgggctgcccatcaccgtggcccatgtggatggccaaacccacatgttatttggctctgaccggatggagctgctggcgcacctgctgggagagaagtggatgggccctatacctccagccgtgaatgccagactttaagattgcccggaggaagcaaactcttcgtataaaaaaagcaggccatctgcttaacccttggctccaccataaggcactgggactcggatttctctatctgatagaggtattttctgtggccctgggagctgtctgtctttcccctacccccaaggatgccaggaagacgtccaccattagccatgtggcaacctttacttctatgcctcacaagtgcctttcagagagccccaattctgctttcccacaaaataaacctaatgccatcaggcaaaacatttctgtgtctgtatctgccctggtatattctcattcctggggtcacatcctgcctactctaggggtaggtgaaggagagctgtttcagtatttccagccagaccagccatgcagcccaccttgagcagcttgtgcggtggaagaagtgagaatagtcccccgttctctcacacagaaactcccctggtctctctatcagcaacagaaaaccaagccagatggactttgcaactaatcaagtttgggatttactgtcttctgaccaaccacagtgactgagatggggctgggaccagaagcccagtgggagtgaacagccgagggaaccagagtctggctgagcttgtggccagatatttaaactgggtccagccacacctgcaaaaccagggcaaggcagtaccgggaaactggctggagttgctgcggtttggggaagttgcacaccctttcatagatacctcccttaaccctcagtgcagattctgagaaaactccaaggcttctctgcctaacctagtataacccctgttccctactacatacatataacttttccattcccccagtaattgacccaaagtccctgcctctagctgtgcccattgtgcaatgatcagaatcccttgtttcaatagtattttgacttctttaagaatactctgtatttggaagctgaaacctcacttggatccattgttgggaaccaagtacggagccttacatagcccggaggagtttcaggagcaatgccactttcccttccatccctccctctgggtctggctcttcccatagtccattttccccttttatctcccattaatttctgtcttcctctctcaccttttccatgtctctagcatcctccaggatttaaaatcatctttacccaacttatctgtgaagtaatggcaaaagaacatctccaaattaagtactccttttcttcaaaggagtttcatgggatgtacagctagtataaaataaaaatatgggaagatgtccaatcttaaaaaccataagggcaaattaagacaaaactaagctgcccagagcagggtgagtggaaccagttttatgaataaagatgcttgtctcagcactatatgtggatatcaaaaattgtgaacaacttgaacacctatcaggaggagaatactttaatcaattatggcacattcaggagataatgttttacagtcatcaaaaattgtatatgagggccagcacggtggctcacacctgtaatcccagcactttgggaggccaaggcaggcggatcacctgaggtcaggagttcgagaccagactggctaacatggtaaaaccctgtttctactaaaaatacaaaaaagtaaccgggtgtggtggcacgtgcctgtaatcccagctactcgggaggctgaggcaggagaatcgcttgaacccgggaggcagaggttgtggtgagctgagattgcactattgcactccagcttgggcaacaagagcgaaactctgtctcaaaaaaaaattgtatttctgaagaattgttaagaacattggaaattcttgagatataatattgattggaaaaagatgaaactatatggtatgatctcaatatgtcctgatgaataaaaacataatacagaggacattattctgagataaaatacatcaaaatctttccattttatttgtatacttttacaatttttgattttttaaaatgtattctgatacacaaaataataaaaatgaaaaataaaaaatttggccgggcgcagtggctcatgcctgtaatcccagcactttgggagactgaggcaggtggatcacttgaggtcagcagtttgagaccagcctgaccatcatggtgaaaccccatctctactaaaaatacaaaaattaagctgtgtgtgatggtgcacacctgcaatcccaggtactcaggaggcttatgcgggagaatcgcttgaacctgggaggcggaggttgcagtgagccgagatcgggtcactgcactccagcctgggcgacagagtgagattccatctcaaaaaaaaaaaattgtagattcacattgcagtacaactgtgcatcttgcccattgatttctaaatgtattaactacttaaattaatcctgaatcttttcccaggcttaagtgggataatgttttattgtagatgcatatttcctggctctacccagtctttctttgaagactttatcatcctattttctgaatccagtggctgactttaatcttctctggaggaactagataatttctagactaatgcttacactcatgatccagattgtaatttctgaactccttcttccaaatagaatcaaaacaagaaaggggaaagcctctcaaagcaactgtgcgttaataatgaaacactctttttttctaatccaaggagggtttcatactttttcttagtttcttgccctcttcccttctgatcaataattgtaataggaaatttgcaattgtgccaatactcagattcaatactgaactactttcttgcattgtaattcaaattccaaggttaacaactagctgtatgtttccaaaacaatcttattgtatatgtattttcttaggtgaagtttccagaaatgattttttttttttgcagagccaaacacacatggtaatttaaaaaaataatgcacgtatgtggtaaaaacagtaaaagcaaggtatcaagtaaaaagtgaagagtcctccctttctcattcccattcctactctctaattttttatatatccattttgtaagctataatacagagattccatatactcttcacatactttccccagtggtaacctcttgcataactataggacaataacacactataggacaaaaatcaagaaattgacattgatacaatccatcaaccttattcagagttcaccagtttaacacatgcttattgtgtgtctgtatttagttctatataattttatcacatgtatgctgatgaccaccaccacagccaagatacaaaacattttcagtgtaaagatttctcatgctacccttttatagccacagctacctccctccctccctgtacttccctaacccttggcagtcactaatctgatc

SEQ ID NO: 17921 - protein, 33 aa, Homo sapiens; identical to SEQ ID NO: 17919

SEQ ID NO: 17922 - DNA, 1232 bp, Homo sapiens
atgaaagtgataatcaggcagcccaaatgattgttaataaggatcaaatgagatcgtgtatgtgggtccaatcaattgattctacacaaaggagcctggggaggggccatggtgccaatgcacttactggggagactggagaagccgcttctcctcctgtgctgcgcctccttcctactggggctggctttgctgggcataaagacggacatcacccccgttgcttatttctttctcacattgggtggcttcttcttgtttgcctatctcctggtccggtttctggaatgggggcttcggtcccagctccaatcaatgcagactgagagcccagggccctcaggcaatgcacgggacaatgaagcctttgaagtgccagtctatgaagaggccgtggtgggactagaatcccagtgccgcccccaagagttggaccaaccacccccctacagcactgttgtgatacccccagcacctgaggaggaacaacctagccatccagaggggtccaggagagccaaactggaacagaggcgaatggcctcagaggggtccatggcccaggaaggaagccctggaagagctccaatcaaccttcggcttcggggaccacgggctgtgtccactgctcctgatctgcagagcttggcggcagtccccacattagagcctctgactccaccccctgcctatgatgtctgctttggtcaccctgatgatgatagtgttttttatgaggacaactgggcacccccttaaatgactctcccaagatttctcttctctccacaccagacctcgttcatttgactaacattttccagcgcctactatgtgtcagaaacaagtgtttctgcctggacatcataaatggggacttggaccctgaggagagtcaggccacggtaagcccttcccagctgagatatgggtggcataatttgagtcttctggcaacatttggtgacctaccccatatccaatatttccagcgttagattgaggatgaggtagggaggtgatccagagaaggcggagaaggaagaagtaacctctgagtggcggctattgcttctgttccaggtgctgttcgagctgttagaacccttaggcttgacagctttgtgagttattattgaaaaatgaggattccaagagtcagaggagtttgataatgtgcacgagggcacactgctagtaaataacattaaaataactggaatgaactcctg

SEQ ID NO: 17923 - protein, 216 aa, Homo sapiens; identical to SEQ ID NO: 2136

SEQ ID NO: 17924 - DNA, 1979 bp, Homo sapiens
atgaaagtgataatcaggcagcccaaatgattgttaataaggatcaaatgagatcgtgtatgtgggtccaatcaattgattctacacaaaggagcctggggaggggccatggtgccaatgcacttactggggagactggagaagccgcttctcctcctgtgctgcgcctccttcctactggggctggctttgctgggcataaagacggacatcacccccgttgcttatttctttctcacattgggtggcttcttcttgtttgcctatctcctggtccggtttctggaatgggggcttcggtcccagctccaatcaatgcagactgagagcccagggccctcaggcaatgcacgggacaatgaagcctttgaagtgccagtctatgaagaggccgtggtgggactagaatcccagtgccgcccccaagagttggaccaaccacccccctacagcactgttgtgatacccccagcacctgaggaggaacaacctagccatccagaggggtccaggagagccaaactggaacagaggcgaatggcctcagaggggtccatggcccaggaaggaagccctggaagagctccaatcaaccttcggcttcggggaccacgggctgtgtccactgctcctgatctgcagagcttggcggcagtccccacattagagcctctgactccaccccctgcctatgatgtctgctttggtcaccctgatgatgatagtgttttttatgaggacaactgggcacccccttaaatgactctcccaagatttctcttctctccacaccagacctcgttcatttgactaacattttccagcgcctactatgtgtcagaaacaagtgtttctgcctggacatcataaatggggacttggaccctgaggagagtcaggccacggtaagcccttcccagctgagatatgggtggcataatttgagtcttctggcaacatttggtgacctaccccatatccaatatttccagcgttagattgaggatgaggtagggaggtgatccagagaaggcggagaaggaagaagtaacctctgagtggcggctattgcttctgttccaggtgctgttcgagctgttagaacccttaggcttgacagctttgtgagttattattgaaaaatgaggattccaagagtcagaggagtttgataatgtgcacgagggcacactgctagtaaataacattaaaataactggaatgaactcctgatcccaaagcctattgtgttttcaacacaaggtaataggaagccaagcaacttgcatgtctcccaatccctgtctagggacagctgctggtgcaggatggaagacttcctataaacagaatgggcgaccaattgtgtctacagagggggtgggctgagcatgggcacgcatgtccccagcctcctggacgagcaaagtcagtcaaagcgctggtgatccctgctccgcgtgcgtagcagtgtctgtgcctctcctgcccaggggctagagagcagtctccagtgcagggtccccatcctatctgaaaacagtggagtcagtgaccccaggtggagggacttccagttttaacaatgggttggtatgaaggccagaaggagtgaaacatgtgaactttctggcgaggagactccctcttgaatcatccatatgtagccccggggtcacttgcgaagagtctctaacagcttctgcctcactcctaagctctgaccgctaggctttcaccccagccgccggtcctgattcctgagatcccaatattgagcaccaggtttcctggaattgtgtgctgcggctgtgatgtaggtttcggtcgctggaagctgctaaaccatagctgacgccccctcctaagccagccttccttccccgcgcgggcatctgtccagggccttgtcgcgctctcagtctccttcgcagcctggccccaaccgttcaacttcaataaagcaaaactccagccac

SEQ ID NO: 17925 - protein, 216 aa, Homo sapiens; identical to SEQ ID NO: 2136

SEQ ID NO: 17926 - DNA, 1025 bp, Homo sapiens
actttctacagtctgtggagacaggtgagcgacgaacttctgagacagttgtgtccctgtggctttggtgcgcctgtgtgcactttctccctccacctggagcatgggctaacaccggaggaaaggaaaagacagagtcagacaggggacaatgaagcctttgaagtgccagtctatgaagaggccgtggtgggactagaatcccagtgccgcccccaagagttggaccaaccacccccctacagcactgttgtgatacccccagcacctgaggaggaacaacctagccatccagaggggtccaggagagccaaactggaacagaggcgaatggcctcagaggggtccatggcccaggaaggaagccctggaagagctccaatcaaccttcggcttcggggaccacgggctgtgtccactgctcctgatctgcagagcttggcggcagtccccacattagagcctctgactccaccccctgcctatgatgtctgctttggtcaccctgatgatgatagtgttttttatgaggacaactgggcacccccttaaatgactctcccaagatttctcttctctccacaccagacctcgttcatttgactaacattttccagcgcctactatgtgtcagaaacaagtgtttctgcctggacatcataaatggggacttggaccctgaggagagtcaggccacggtaagcccttcccagctgagatatgggtggcataatttgagtcttctggcaacatttggtgacctaccccatatccaatatttccagcgttagattgaggatgaggtagggaggtgatccagagaaggcggagaaggaagaagtaacctctgagtggcggctattgcttctgttccaggtgctgttcgagctgttagaacccttaggcttgacagctttgtgagttattattgaaaaatgaggattccaagagtcagaggagtttgataatgtgcacgagggcacactgctagtaaataacattaaaataactggaatgaactcctg

SEQ ID NO: 17927 - protein, 73 aa, Homo sapiens
MASEGSMAQEGSPGRAPINLRLRGPRAVSTAPDLQSLAAVPTLEPLTPPPAYDVCFGHPDDDSVFYEDNWAPP

SEQ ID NO: 17928 - DNA, 1772 bp, Homo sapiens
actttctacagtctgtggagacaggtgagcgacgaacttctgagacagttgtgtccctgtggctttggtgcgcctgtgtgcactttctccctccacctggagcatgggctaacaccggaggaaaggaaaagacagagtcagacaggggacaatgaagcctttgaagtgccagtctatgaagaggccgtggtgggactagaatcccagtgccgcccccaagagttggaccaaccacccccctacagcactgttgtgatacccccagcacctgaggaggaacaacctagccatccagaggggtccaggagagccaaactggaacagaggcgaatggcctcagaggggtccatggcccaggaaggaagccctggaagagctccaatcaaccttcggcttcggggaccacgggctgtgtccactgctcctgatctgcagagcttggcggcagtccccacattagagcctctgactccaccccctgcctatgatgtctgctttggtcaccctgatgatgatagtgttttttatgaggacaactgggcacccccttaaatgactctcccaagatttctcttctctccacaccagacctcgttcatttgactaacattttccagcgcctactatgtgtcagaaacaagtgtttctgcctggacatcataaatggggacttggaccctgaggagagtcaggccacggtaagcccttcccagctgagatatgggtggcataatttgagtcttctggcaacatttggtgacctaccccatatccaatatttccagcgttagattgaggatgaggtagggaggtgatccagagaaggcggagaaggaagaagtaacctctgagtggcggctattgcttctgttccaggtgctgttcgagctgttagaacccttaggcttgacagctttgtgagttattattgaaaaatgaggattccaagagtcagaggagtttgataatgtgcacgagggcacactgctagtaaataacattaaaataactggaatgaactcctgatcccaaagcctattgtgttttcaacacaaggtaataggaagccaagcaacttgcatgtctcccaatccctgtctagggacagctgctggtgcaggatggaagacttcctataaacagaatgggcgaccaattgtgtctacagagggggtgggctgagcatgggcacgcatgtccccagcctcctggacgagcaaagtcagtcaaagcgctggtgatccctgctccgcgtgcgtagcagtgtctgtgcctctcctgcccaggggctagagagcagtctccagtgcagggtccccatcctatctgaaaacagtggagtcagtgaccccaggtggagggacttccagttttaacaatgggttggtatgaaggccagaaggagtgaaacatgtgaactttctggcgaggagactccctcttgaatcatccatatgtagccccggggtcacttgcgaagagtctctaacagcttctgcctcactcctaagctctgaccgctaggctttcaccccagccgccggtcctgattcctgagatcccaatattgagcaccaggtttcctggaattgtgtgctgcggctgtgatgtaggtttcggtcgctggaagctgctaaaccatagctgacgccccctcctaagccagccttccttccccgcgcgggcatctgtccagggccttgtcgcgctctcagtctccttcgcagcctggccccaaccgttcaacttcaataaagcaaaactccagccac

SEQ ID NO: 17929 - protein, 73 aa, Homo sapiens; identical to SEQ ID NO: 17927

SEQ ID NO: 17930 - DNA, 1629 bp, Homo sapiens
acagtctgtggagacaggtgagcgacgaacttctgagacaggtgtgggtgcgagggtcgggagggtcatgggattgggaccgaggtgtgaggagggaatctgcaattccttgctacacagagcgctggcaacttctgacaggctgtttctggggtatgggctgcctcgggttgttgctgttacaaggaaagaaaagagttcccctgcccaccgcctcccagccactgggctacctcctggcaggaaatttgcaaactgagtttaacaagttaggatcagcagagggtagaggagggccctggcagatgtggggtctagaagaggacaggagttatcagggcctccggccattgtgctgggcctttgcctgtacaattgtttctcaagcagttgtgtccctgtggctttggtgcgcctgtgtgcactttctccctccacctggagcatgggctaacaccggaggaaaggaaaagacagagtcagacagggagcctggggaggggccatggtgccaatgcacttactggggagactggagaagccgcttctcctcctgtgctgcgcctccttcctactggggctggctttgctgggcataaagacggacatcacccccgttgcttatttctttctcacattgggtggcttcttcttgtttgcctatctcctggtccggtttctggaatgggggcttcggtcccagctccaatcaatgcagactgagagcccagggccctcaggcaatgcacgggacaatgaagcctttgaagtgccagtctatgaagaggccgtggtgggactagaatcccagtgccgcccccaagagttggaccaaccacccccctacagcactgttgtgatacccccagcacctgaggaggaacaacctagccatccagaggggtccaggagagccaaactggaacagaggcgaatggcctcagaggggtccatggcccaggaaggaagccctggaagagctccaatcaaccttcggcttcggggaccacgggctgtgtccactgctcctgatctgcagagcttggcggcagtccccacattagagcctctgactccaccccctgcctatgatgtctgctttggtcaccctgatgatgatagtgttttttatgaggacaactgggcacccccttaaatgactctcccaagatttctcttctctccacaccagacctcgttcatttgactaacattttccagcgcctactatgtgtcagaaacaagtgtttctgcctggacatcataaatggggacttggaccctgaggagagtcaggccacggtaagcccttcccagctgagatatgggtggcataatttgagtcttctggcaacatttggtgacctaccccatatccaatatttccagcgttagattgaggatgaggtagggaggtgatccagagaaggcggagaaggaagaagtaacctctgagtggcggctattgcttctgttccaggtgctgttcgagctgttagaacccttaggcttgacagctttgtgagttattattgaaaaatgaggattccaagagtcagaggagtttgataatgtgcacgagggcacactgctagtaaataacattaaaataactggaatgaactcctg

SEQ ID NO: 17931 - protein, 216 aa, Homo sapiens; identical to SEQ ID NO: 2136

SEQ ID NO: 17932 - DNA, 2376 bp, Homo sapiens
acagtctgtggagacaggtgagcgacgaacttctgagacaggtgtgggtgcgagggtcgggagggtcatgggattgggaccgaggtgtgaggagggaatctgcaattccttgctacacagagcgctggcaacttctgacaggctgtttctggggtatgggctgcctcgggttgttgctgttacaaggaaagaaaagagttcccctgcccaccgcctcccagccactgggctacctcctggcaggaaatttgcaaactgagtttaacaagttaggatcagcagagggtagaggagggccctggcagatgtggggtctagaagaggacaggagttatcagggcctccggccattgtgctgggcctttgcctgtacaattgtttctcaagcagttgtgtccctgtggctttggtgcgcctgtgtgcactttctccctccacctggagcatgggctaacaccggaggaaaggaaaagacagagtcagacagggagcctggggaggggccatggtgccaatgcacttactggggagactggagaagccgcttctcctcctgtgctgcgcctccttcctactggggctggctttgctgggcataaagacggacatcacccccgttgcttatttctttctcacattgggtggcttcttcttgtttgcctatctcctggtccggtttctggaatgggggcttcggtcccagctccaatcaatgcagactgagagcccagggccctcaggcaatgcacgggacaatgaagcctttgaagtgccagtctatgaagaggccgtggtgggactagaatcccagtgccgcccccaagagttggaccaaccacccccctacagcactgttgtgatacccccagcacctgaggaggaacaacctagccatccagaggggtccaggagagccaaactggaacagaggcgaatggcctcagaggggtccatggcccaggaaggaagccctggaagagctccaatcaaccttcggcttcggggaccacgggctgtgtccactgctcctgatctgcagagcttggcggcagtccccacattagagcctctgactccaccccctgcctatgatgtctgctttggtcaccctgatgatgatagtgttttttatgaggacaactgggcacccccttaaatgactctcccaagatttctcttctctccacaccagacctcgttcatttgactaacattttccagcgcctactatgtgtcagaaacaagtgtttctgcctggacatcataaatggggacttggaccctgaggagagtcaggccacggtaagcccttcccagctgagatatgggtggcataatttgagtcttctggcaacatttggtgacctaccccatatccaatatttccagcgttagattgaggatgaggtagggaggtgatccagagaaggcggagaaggaagaagtaacctctgagtggcggctattgcttctgttccaggtgctgttcgagctgttagaacccttaggcttgacagctttgtgagttattattgaaaaatgaggattccaagagtcagaggagtttgataatgtgcacgagggcacactgctagtaaataacattaaaataactggaatgaactcctgatcccaaagcctattgtgttttcaacacaaggtaataggaagccaagcaacttgcatgtctcccaatccctgtctagggacagctgctggtgcaggatggaagacttcctataaacagaatgggcgaccaattgtgtctacagagggggtgggctgagcatgggcacgcatgtccccagcctcctggacgagcaaagtcagtcaaagcgctggtgatccctgctccgcgtgcgtagcagtgtctgtgcctctcctgcccaggggctagagagcagtctccagtgcagggtccccatcctatctgaaaacagtggagtcagtgaccccaggtggagggacttccagttttaacaatgggttggtatgaaggccagaaggagtgaaacatgtgaactttctggcgaggagactccctcttgaatcatccatatgtagccccggggtcacttgcgaagagtctctaacagcttctgcctcactcctaagctctgaccgctaggctttcaccccagccgccggtcctgattcctgagatcccaatattgagcaccaggtttcctggaattgtgtgctgcggctgtgatgtaggtttcggtcgctggaagctgctaaaccatagctgacgccccctcctaagccagccttccttccccgcgcgggcatctgtccagggccttgtcgcgctctcagtctccttcgcagcctggccccaaccgttcaacttcaataaagcaaaactccagccac

SEQ ID NO: 17933 - protein, 216 aa, Homo sapiens; identical to SEQ ID NO: 2136

SEQ ID NO: 17934 - DNA, 1356 bp, Homo sapiens
agacaggtgagcgacgaacttctgagacaggtgtgggtgcgagggtcgggagggtcatgggattgggaccgaggtgtgaggagggaatctgcaattccttgctacacagagcgctggcaacttctgacaggctgtttctggggtatgggctgcctcgggttgttgctgttacaaggaaagaaaagagttcccctgcccaccgcctcccagccactgggctacctcctggcaggaaatttgcaaactgagtttaacaagttaggatcagcagagggtagaggagggccctggcagatgtggggtctagaagaggacaggagttatcagggcctccggccattgtgctgggcctttgcctgtacaattgtttctcaagcagttgtgtccctgtggctttggtgcgcctgtgtgcactttctccctccacctggagcatgggctaacaccggaggaaaggaaaagacagagtcagacaggggacaatgaagcctttgaagtgccagtctatgaagaggccgtggtgggactagaatcccagtgccgcccccaagagttggaccaaccacccccctacagcactgttgtgatacccccagcacctgaggaggaacaacctagccatccagaggggtccaggagagccaaactggaacagaggcgaatggcctcagaggggtccatggcccaggaaggaagccctggaagagctccaatcaaccttcggcttcggggaccacgggctgtgtccactgctcctgatctgcagagcttggcggcagtccccacattagagcctctgactccaccccctgcctatgatgtctgctttggtcaccctgatgatgatagtgttttttatgaggacaactgggcacccccttaaatgactctcccaagatttctcttctctccacaccagacctcgttcatttgactaacattttccagcgcctactatgtgtcagaaacaagtgtttctgcctggacatcataaatggggacttggaccctgaggagagtcaggccacggtaagcccttcccagctgagatatgggtggcataatttgagtcttctggcaacatttggtgacctaccccatatccaatatttccagcgttagattgaggatgaggtagggaggtgatccagagaaggcggagaaggaagaagtaacctctgagtggcggctattgcttctgttccaggtgctgttcgagctgttagaacccttaggcttgacagctttgtgagttattattgaaaaatgaggattccaagagtcagaggagtttgataatgtgcacgagggcacactgctagtaaataacattaaaataactggaatgaactcctg

SEQ ID NO: 17935 - protein, 113 aa, Homo sapiens
MGCLGLLLLQGKKRVPLPTASQPLGYLLAGNLQTEFNKLGSAEGRGGPWQMWGLEEDRSYQGLRPLCWAFACTIVSQAVVSLWLWCACVHFLPPPGAWANTGGKEKTESDRGQ

SEQ ID NO: 17936 - DNA, 2103 bp, Homo sapiens
agacaggtgagcgacgaacttctgagacaggtgtgggtgcgagggtcgggagggtcatgggattgggaccgaggtgtgaggagggaatctgcaattccttgctacacagagcgctggcaacttctgacaggctgtttctggggtatgggctgcctcgggttgttgctgttacaaggaaagaaaagagttcccctgcccaccgcctcccagccactgggctacctcctggcaggaaatttgcaaactgagtttaacaagttaggatcagcagagggtagaggagggccctggcagatgtggggtctagaagaggacaggagttatcagggcctccggccattgtgctgggcctttgcctgtacaattgtttctcaagcagttgtgtccctgtggctttggtgcgcctgtgtgcactttctccctccacctggagcatgggctaacaccggaggaaaggaaaagacagagtcagacaggggacaatgaagcctttgaagtgccagtctatgaagaggccgtggtgggactagaatcccagtgccgcccccaagagttggaccaaccacccccctacagcactgttgtgatacccccagcacctgaggaggaacaacctagccatccagaggggtccaggagagccaaactggaacagaggcgaatggcctcagaggggtccatggcccaggaaggaagccctggaagagctccaatcaaccttcggcttcggggaccacgggctgtgtccactgctcctgatctgcagagcttggcggcagtccccacattagagcctctgactccaccccctgcctatgatgtctgctttggtcaccctgatgatgatagtgttttttatgaggacaactgggcacccccttaaatgactctcccaagatttctcttctctccacaccagacctcgttcatttgactaacattttccagcgcctactatgtgtcagaaacaagtgtttctgcctggacatcataaatggggacttggaccctgaggagagtcaggccacggtaagcccttcccagctgagatatgggtggcataatttgagtcttctggcaacatttggtgacctaccccatatccaatatttccagcgttagattgaggatgaggtagggaggtgatccagagaaggcggagaaggaagaagtaacctctgagtggcggctattgcttctgttccaggtgctgttcgagctgttagaacccttaggcttgacagctttgtgagttattattgaaaaatgaggattccaagagtcagaggagtttgataatgtgcacgagggcacactgctagtaaataacattaaaataactggaatgaactcctgatcccaaagcctattgtgttttcaacacaaggtaataggaagccaagcaacttgcatgtctcccaatccctgtctagggacagctgctggtgcaggatggaagacttcctataaacagaatgggcgaccaattgtgtctacagagggggtgggctgagcatgggcacgcatgtccccagcctcctggacgagcaaagtcagtcaaagcgctggtgatccctgctccgcgtgcgtagcagtgtctgtgcctctcctgcccaggggctagagagcagtctccagtgcagggtccccatcctatctgaaaacagtggagtcagtgaccccaggtggagggacttccagttttaacaatgggttggtatgaaggccagaaggagtgaaacatgtgaactttctggcgaggagactccctcttgaatcatccatatgtagccccggggtcacttgcgaagagtctctaacagcttctgcctcactcctaagctctgaccgctaggctttcaccccagccgccggtcctgattcctgagatcccaatattgagcaccaggtttcctggaattgtgtgctgcggctgtgatgtaggtttcggtcgctggaagctgctaaaccatagctgacgccccctcctaagccagccttccttccccgcgcgggcatctgtccagggccttgtcgcgctctcagtctccttcgcagcctggccccaaccgttcaacttcaataaagcaaaactccagccac

SEQ ID NO: 17937 - protein, 113 aa, Homo sapiens; identical to SEQ ID NO: 17935

SEQ ID NO: 17938 - DNA, 1266 bp, Homo sapiens
caggtgagcgacgaacttctgagacagttgtgtccctgtggctttggtgcgcctgtgtgcactttctccctccacctggagcatgggctaacaccggaggaaaggaaaagacagagtcagacagggagcctggggaggggccatggtgccaatgcacttactggggagactggagaagccgcttctcctcctgtgctgcgcctccttcctactggggctggctttgctgggcataaagacggacatcacccccgttgcttatttctttctcacattgggtggcttcttcttgtttgcctatctcctggtccggtttctggaatgggggcttcggtcccagctccaatcaatgcagactgagagcccagggccctcaggcaatgcacgggacaatgaagcctttgaagtgccagtctatgaagaggccgtggtgggactagaatcccagtgccgcccccaagagttggaccaaccacccccctacagcactgttgtgatacccccagcacctgaggaggaacaacctagccatccagaggggtccaggagagccaaactggaacagaggcgaatggcctcagaggggtccatggcccaggaaggaagccctggaagagctccaatcaaccttcggcttcggggaccacgggctgtgtccactgctcctgatctgcagagcttggcggcagtccccacattagagcctctgactccaccccctgcctatgatgtctgctttggtcaccctgatgatgatagtgttttttatgaggacaactgggcacccccttaaatgactctcccaagatttctcttctctccacaccagacctcgttcatttgactaacattttccagcgcctactatgtgtcagaaacaagtgtttctgcctggacatcataaatggggacttggaccctgaggagagtcaggccacggtaagcccttcccagctgagatatgggtggcataatttgagtcttctggcaacatttggtgacctaccccatatccaatatttccagcgttagattgaggatgaggtagggaggtgatccagagaaggcggagaaggaagaagtaacctctgagtggcggctattgcttctgttccaggtgctgttcgagctgttagaacccttaggcttgacagctttgtgagttattattgaaaaatgaggattccaagagtcagaggagtttgataatgtgcacgagggcacactgctagtaaataacattaaaataactggaatgaactcctg

SEQ ID NO: 17939 - protein, 216 aa, Homo sapiens; identical to SEQ ID NO: 2136

SEQ ID NO: 17940 - DNA, 2013 bp, Homo sapiens
caggtgagcgacgaacttctgagacagttgtgtccctgtggctttggtgcgcctgtgtgcactttctccctccacctggagcatgggctaacaccggaggaaaggaaaagacagagtcagacagggagcctggggaggggccatggtgccaatgcacttactggggagactggagaagccgcttctcctcctgtgctgcgcctccttcctactggggctggctttgctgggcataaagacggacatcacccccgttgcttatttctttctcacattgggtggcttcttcttgtttgcctatctcctggtccggtttctggaatgggggcttcggtcccagctccaatcaatgcagactgagagcccagggccctcaggcaatgcacgggacaatgaagcctttgaagtgccagtctatgaagaggccgtggtgggactagaatcccagtgccgcccccaagagttggaccaaccacccccctacagcactgttgtgatacccccagcacctgaggaggaacaacctagccatccagaggggtccaggagagccaaactggaacagaggcgaatggcctcagaggggtccatggcccaggaaggaagccctggaagagctccaatcaaccttcggcttcggggaccacgggctgtgtccactgctcctgatctgcagagcttggcggcagtccccacattagagcctctgactccaccccctgcctatgatgtctgctttggtcaccctgatgatgatagtgttttttatgaggacaactgggcacccccttaaatgactctcccaagatttctcttctctccacaccagacctcgttcatttgactaacattttccagcgcctactatgtgtcagaaacaagtgtttctgcctggacatcataaatggggacttggaccctgaggagagtcaggccacggtaagcccttcccagctgagatatgggtggcataatttgagtcttctggcaacatttggtgacctaccccatatccaatatttccagcgttagattgaggatgaggtagggaggtgatccagagaaggcggagaaggaagaagtaacctctgagtggcggctattgcttctgttccaggtgctgttcgagctgttagaacccttaggcttgacagctttgtgagttattattgaaaaatgaggattccaagagtcagaggagtttgataatgtgcacgagggcacactgctagtaaataacattaaaataactggaatgaactcctgatcccaaagcctattgtgttttcaacacaaggtaataggaagccaagcaacttgcatgtctcccaatccctgtctagggacagctgctggtgcaggatggaagacttcctataaacagaatgggcgaccaattgtgtctacagagggggtgggctgagcatgggcacgcatgtccccagcctcctggacgagcaaagtcagtcaaagcgctggtgatccctgctccgcgtgcgtagcagtgtctgtgcctctcctgcccaggggctagagagcagtctccagtgcagggtccccatcctatctgaaaacagtggagtcagtgaccccaggtggagggacttccagttttaacaatgggttggtatgaaggccagaaggagtgaaacatgtgaactttctggcgaggagactccctcttgaatcatccatatgtagccccggggtcacttgcgaagagtctctaacagcttctgcctcactcctaagctctgaccgctaggctttcaccccagccgccggtcctgattcctgagatcccaatattgagcaccaggtttcctggaattgtgtgctgcggctgtgatgtaggtttcggtcgctggaagctgctaaaccatagctgacgccccctcctaagccagccttccttccccgcgcgggcatctgtccagggccttgtcgcgctctcagtctccttcgcagcctggccccaaccgttcaacttcaataaagcaaaactccagccac

SEQ ID NO: 17941 - protein, 216 aa, Homo sapiens; identical to SEQ ID NO: 2136

SEQ ID NO: 17942 - DNA, 905 bp, Homo sapiens
aggtgagcgacgaacttctgagacagggacaatgaagcctttgaagtgccagtctatgaagaggccgtggtgggactagaatcccagtgccgcccccaagagttggaccaaccacccccctacagcactgttgtgatacccccagcacctgaggaggaacaacctagccatccagaggggtccaggagagccaaactggaacagaggcgaatggcctcagaggggtccatggcccaggaaggaagccctggaagagctccaatcaaccttcggcttcggggaccacgggctgtgtccactgctcctgatctgcagagcttggcggcagtccccacattagagcctctgactccaccccctgcctatgatgtctgctttggtcaccctgatgatgatagtgttttttatgaggacaactgggcacccccttaaatgactctcccaagatttctcttctctccacaccagacctcgttcatttgactaacattttccagcgcctactatgtgtcagaaacaagtgtttctgcctggacatcataaatggggacttggaccctgaggagagtcaggccacggtaagcccttcccagctgagatatgggtggcataatttgagtcttctggcaacatttggtgacctaccccatatccaatatttccagcgttagattgaggatgaggtagggaggtgatccagagaaggcggagaaggaagaagtaacctctgagtggcggctattgcttctgttccaggtgctgttcgagctgttagaacccttaggcttgacagctttgtgagttattattgaaaaatgaggattccaagagtcagaggagtttgataatgtgcacgagggcacactgctagtaaataacattaaaataactggaatgaactcctg

SEQ ID NO: 17943 - protein, 73 aa, Homo sapiens; identical to SEQ ID NO: 17927

SEQ ID NO: 17944 - DNA, 1652 bp, Homo sapiens
aggtgagcgacgaacttctgagacagggacaatgaagcctttgaagtgccagtctatgaagaggccgtggtgggactagaatcccagtgccgcccccaagagttggaccaaccacccccctacagcactgttgtgatacccccagcacctgaggaggaacaacctagccatccagaggggtccaggagagccaaactggaacagaggcgaatggcctcagaggggtccatggcccaggaaggaagccctggaagagctccaatcaaccttcggcttcggggaccacgggctgtgtccactgctcctgatctgcagagcttggcggcagtccccacattagagcctctgactccaccccctgcctatgatgtctgctttggtcaccctgatgatgatagtgttttttatgaggacaactgggcacccccttaaatgactctcccaagatttctcttctctccacaccagacctcgttcatttgactaacattttccagcgcctactatgtgtcagaaacaagtgtttctgcctggacatcataaatggggacttggaccctgaggagagtcaggccacggtaagcccttcccagctgagatatgggtggcataatttgagtcttctggcaacatttggtgacctaccccatatccaatatttccagcgttagattgaggatgaggtagggaggtgatccagagaaggcggagaaggaagaagtaacctctgagtggcggctattgcttctgttccaggtgctgttcgagctgttagaacccttaggcttgacagctttgtgagttattattgaaaaatgaggattccaagagtcagaggagtttgataatgtgcacgagggcacactgctagtaaataacattaaaataactggaatgaactcctgatcccaaagcctattgtgttttcaacacaaggtaataggaagccaagcaacttgcatgtctcccaatccctgtctagggacagctgctggtgcaggatggaagacttcctataaacagaatgggcgaccaattgtgtctacagagggggtgggctgagcatgggcacgcatgtccccagcctcctggacgagcaaagtcagtcaaagcgctggtgatccctgctccgcgtgcgtagcagtgtctgtgcctctcctgcccaggggctagagagcagtctccagtgcagggtccccatcctatctgaaaacagtggagtcagtgaccccaggtggagggacttccagttttaacaatgggttggtatgaaggccagaaggagtgaaacatgtgaactttctggcgaggagactccctcttgaatcatccatatgtagccccggggtcacttgcgaagagtctctaacagcttctgcctcactcctaagctctgaccgctaggctttcaccccagccgccggtcctgattcctgagatcccaatattgagcaccaggtttcctggaattgtgtgctgcggctgtgatgtaggtttcggtcgctggaagctgctaaaccatagctgacgccccctcctaagccagccttccttccccgcgcgggcatctgtccagggccttgtcgcgctctcagtctccttcgcagcctggccccaaccgttcaacttcaataaagcaaaactccagccac

SEQ ID NO: 17945 - protein, 73 aa, Homo sapiens; identical to SEQ ID NO: 17927

SEQ ID NO: 17946 - DNA, 1532 bp, Homo sapiens
gcagggcctgccccatcacctgaattccagagatgccagtgtgcactgaagccccaggcagggcgtgcccaggaccggatcctggatggtggtaagggacaaagctggaagggagactacagggaaggagaaaggaaagaaggcagagccatgacacagtcaacttacagaatggctgggagtcaaagctcctgggctggtttcctggctattccacacactccaagacatagagagaatttcggaactggaggggactctacagatgatttatttgagattgaagaacctagaaaccaaacaaagaaatatcatatggttactttggtatctgacacagccatgacaccaattgctagtgtagacacaatagctgtgtgtctttttgcaggagcctggggaggggccatggtgccaatgcacttactggggagactggagaagccgcttctcctcctgtgctgcgcctccttcctactggggctggctttgctgggcataaagacggacatcacccccgttgcttatttctttctcacattgggtggcttcttcttgtttgcctatctcctggtccggtttctggaatgggggcttcggtcccagctccaatcaatgcagactgagagcccagggccctcaggcaatgcacgggacaatgaagcctttgaagtgccagtctatgaagaggccgtggtgggactagaatcccagtgccgcccccaagagttggaccaaccacccccctacagcactgttgtgatacccccagcacctgaggaggaacaacctagccatccagaggggtccaggagagccaaactggaacagaggcgaatggcctcagaggggtccatggcccaggaaggaagccctggaagagctccaatcaaccttcggcttcggggaccacgggctgtgtccactgctcctgatctgcagagcttggcggcagtccccacattagagcctctgactccaccccctgcctatgatgtctgctttggtcaccctgatgatgatagtgttttttatgaggacaactgggcacccccttaaatgactctcccaagatttctcttctctccacaccagacctcgttcatttgactaacattttccagcgcctactatgtgtcagaaacaagtgtttctgcctggacatcataaatggggacttggaccctgaggagagtcaggccacggtaagcccttcccagctgagatatgggtggcataatttgagtcttctggcaacatttggtgacctaccccatatccaatatttccagcgttagattgaggatgaggtagggaggtgatccagagaaggcggagaaggaagaagtaacctctgagtggcggctattgcttctgttccaggtgctgttcgagctgttagaacccttaggcttgacagctttgtgagttattattgaaaaatgaggattccaagagtcagaggagtttgataatgtgcacgagggcacactgctagtaaataacattaaaataactggaatgaactcctg

SEQ ID NO: 17947 - protein, 302 aa, Homo sapiens
MTQSTYRMAGSQSSWAGFLAIPHTPRHRENFGTGGDSTDDLFEIEEPRNQTKKYHMVTLVSDTAMTPIASVDTIAVCLFAGAWGGAMVPMHLLGRLEKPLLLLCCASFLLGLALLGIKTDITPVAYFFLTLGGFFLFAYLLVRFLEWGLRSQLQSMQTESPGPSGNARDNEAFEVPVYEEAVVGLESQCRPQELDQPPPYSTVVIPPAPEEEQPSHPEGSRRAKLEQRRMASEGSMAQEGSPGRAPINLRLRGPRAVSTAPDLQSLAAVPTLEPLTPPPAYDVCFGHPDDDSVFYEDNWAPP

SEQ ID NO: 17948 - DNA, 2279 bp, Homo sapiens
gcagggcctgccccatcacctgaattccagagatgccagtgtgcactgaagccccaggcagggcgtgcccaggaccggatcctggatggtggtaagggacaaagctggaagggagactacagggaaggagaaaggaaagaaggcagagccatgacacagtcaacttacagaatggctgggagtcaaagctcctgggctggtttcctggctattccacacactccaagacatagagagaatttcggaactggaggggactctacagatgatttatttgagattgaagaacctagaaaccaaacaaagaaatatcatatggttactttggtatctgacacagccatgacaccaattgctagtgtagacacaatagctgtgtgtctttttgcaggagcctggggaggggccatggtgccaatgcacttactggggagactggagaagccgcttctcctcctgtgctgcgcctccttcctactggggctggctttgctgggcataaagacggacatcacccccgttgcttatttctttctcacattgggtggcttcttcttgtttgcctatctcctggtccggtttctggaatgggggcttcggtcccagctccaatcaatgcagactgagagcccagggccctcaggcaatgcacgggacaatgaagcctttgaagtgccagtctatgaagaggccgtggtgggactagaatcccagtgccgcccccaagagttggaccaaccacccccctacagcactgttgtgatacccccagcacctgaggaggaacaacctagccatccagaggggtccaggagagccaaactggaacagaggcgaatggcctcagaggggtccatggcccaggaaggaagccctggaagagctccaatcaaccttcggcttcggggaccacgggctgtgtccactgctcctgatctgcagagcttggcggcagtccccacattagagcctctgactccaccccctgcctatgatgtctgctttggtcaccctgatgatgatagtgttttttatgaggacaactgggcacccccttaaatgactctcccaagatttctcttctctccacaccagacctcgttcatttgactaacattttccagcgcctactatgtgtcagaaacaagtgtttctgcctggacatcataaatggggacttggaccctgaggagagtcaggccacggtaagcccttcccagctgagatatgggtggcataatttgagtcttctggcaacatttggtgacctaccccatatccaatatttccagcgttagattgaggatgaggtagggaggtgatccagagaaggcggagaaggaagaagtaacctctgagtggcggctattgcttctgttccaggtgctgttcgagctgttagaacccttaggcttgacagctttgtgagttattattgaaaaatgaggattccaagagtcagaggagtttgataatgtgcacgagggcacactgctagtaaataacattaaaataactggaatgaactcctgatcccaaagcctattgtgttttcaacacaaggtaataggaagccaagcaacttgcatgtctcccaatccctgtctagggacagctgctggtgcaggatggaagacttcctataaacagaatgggcgaccaattgtgtctacagagggggtgggctgagcatgggcacgcatgtccccagcctcctggacgagcaaagtcagtcaaagcgctggtgatccctgctccgcgtgcgtagcagtgtctgtgcctctcctgcccaggggctagagagcagtctccagtgcagggtccccatcctatctgaaaacagtggagtcagtgaccccaggtggagggacttccagttttaacaatgggttggtatgaaggccagaaggagtgaaacatgtgaactttctggcgaggagactccctcttgaatcatccatatgtagccccggggtcacttgcgaagagtctctaacagcttctgcctcactcctaagctctgaccgctaggctttcaccccagccgccggtcctgattcctgagatcccaatattgagcaccaggtttcctggaattgtgtgctgcggctgtgatgtaggtttcggtcgctggaagctgctaaaccatagctgacgccccctcctaagccagccttccttccccgcgcgggcatctgtccagggccttgtcgcgctctcagtctccttcgcagcctggccccaaccgttcaacttcaataaagcaaaactccagccac

SEQ ID NO: 17949 - protein, 302 aa, Homo sapiens; identical to SEQ ID NO: 17947

SEQ ID NO: 17950 - DNA, 752 bp, Homo sapiens
cagggacaatgaagcctttgaagtgccagtctatgaagaggccgtggtgggactagaatcccagtgccgcccccaagagttggaccaaccacccccctacagcactgttgtgatacccccagcacctgaggaggaacaacctagccatccagaggggtccaggagagccaaactggaacagaggcgaatggcctcagaggggtccatggcccaggaaggaagccctggaagagctccaatcaaccttcggcttcggggaccacgggctgtgtccactgctcctgatctgcagagcttggcggcagtccccacattagagcctctgactccaccccctgcctatgatgtctgctttggtcaccctgatgatgatagtgttttttatgaggacaactgggcacccccttaaatgactctcccaagatttctcttctctccacaccagacctcgttcatttgactaacattttccagcgcctactatgtgtcagaaacaagtgtttctgcctggacatcataaatggggacttggaccctgaggagagtcaggccacggtaagcccttcccagctgagatatgggtggcataatttgagtcttttctgttccaggtgctgttcgagctgttagaacccttaggcttgacagctttgtgagttattattgaaaaatgaggattccaagagtcagaggagtttgataatgtgcacgagggcacactgctagtaaataacattaaaataactggaatg

SEQ ID NO: 17951 - protein, 73 aa, Homo sapiens; identical to SEQ ID NO: 17927

SEQ ID NO: 17952 - DNA, 1103 bp, Homo sapiens
cagacctcgttcatttgactaacattttccagcgcctactatgtgtcagaaacaagtgtttctgcctggacatcataaatggggacttggaccctgaggagagtcaggccacggtaagcccttcccagctgagatatgggtggcataatttgagtcttctggcaacatttggtgacctaccccatatccaatatttccagcgttagattgaggatgaggtagggaggtgatccagagaaggcggagaaggaagaagtaacctctgagtggcggctattgcttctgttccaggtgctgttcgagctgttagaacccttaggcttgacagctttgtgagttattattgaaaaatgaggattccaagagtcagaggagtttgataatgtgcacgagggcacactgctagtaaataacattaaaataactggaatgaactcctgatcccaaagcctattgtgttttcaacacaaggtaataggaagccaagcaacttgcatgtctcccaatccctgtctagggacagctgctggtgcaggatggaagacttcctataaacagaatgggcgaccaattgtgtctacagagggggtgggctgagcatgggcacgcatgtccccagcctcctggacgagcaaagtcagtcaaagcgctggtgatccctgctccgcgtgcgtagcagtgtctgtgcctctcctgcccaggggctagagagcagtctccagtgcagggtccccatcctatctgaaaacagtggagtcagtgaccccaggtggagggacttccagttttaacaatgggttggtatgaaggccagaaggagtgaaacatgtgaactttctggcgaggagactccctcttgaatcatccatatgtagccccggggtcacttgcgaagagtctctaacagcttctgcctcactcctaagctctgaccgctaggctttcaccccagccgccggtcctgattcctgagatcccaatattgagcaccaggtttcctggaattgtgtgctgcggctgtgatgtaggtttcggtcgctggaagctgctaaaccatagctgacgccccaaccgttcaacttcaataaagcaaaactccagcc

SEQ ID NO: 17953 - protein, 38 aa, Homo sapiens
MGDQLCLQRGWAEHGHACPQPPGRAKSVKALVIPAPRA

SEQ ID NO: 17954 - DNA, 4131 bp, Homo sapiens
gggtggcctggtgtgtgggcgcggcagggcgcaggcgcaggcgcagtgtgcgtccgcgtctgaggggagggatgtgggggaagcgacggcccccggtttgtttgggctgtgggcggtgcgcagcggagagcccgggaaaagcgggaaatggcggcgccgagcgcggggtcttggtccaccttccagcacaaggagctgatggccgctgacaggggacgcaggatattgggagtgtgtggcatgcatcctcatcatcaggaaactctaaaaaagaaccgagtggtgctagccaaacagctgttgttgagcgaattgttagaacatcttctggagaaggacatcatcaccttggaaatgagggagctcatccaggccaaagtgggcagtttcagccagaatgtggaactcctcaacttgctgcctaagaggggtccccaagcttttgatgccttctgtgaagcactgagggagaccaagcaaggccacctggaggatatgttgctcaccaccctttctgggcttcagcatgtactcccaccgttgagctgtgactacgacttgagtctcccttttccggtgtgtgagtcctgtcccctttacaagaagctccgcctgtcgacagatactgtggaacactccctagacaataaagatggtcctgtctgccttcaggtgaagccttgcactcctgaattttatcaaacacacttccagctggcatataggttgcagtctcggcctcgtggcctagcactggtgttgagcaatgtgcacttcactggagagaaagaactggaatttcgctctggaggggatgtggaccacagtactctagtcaccctcttcaagcttttgggctatgacgtccatgttctatgtgaccagactgcacaggaaatgcaagagaaactgcagaattttgcacagttacctgcacaccgagtcacggactcctgcatcgtggcactcctctcgcatggtgtggagggcgccatctatggtgtggatgggaaactgctccagctccaagaggtttttcagctctttgacaacgccaactgcccaagcctacagaacaaaccaaaaatgttcttcatccaggcctgccgtggagatgagactgatcgtggggttgaccaacaagatggaaagaaccacgcaggatcccctgggtgcgaggagagtgatgccggtaaagaaaagttgccgaagatgagactgcccacgcgctcagacatgatatgcggctatgcctgcctcaaagggactgccgccatgcggaacaccaaacgaggttcctggtacatcgaggctcttgctcaagtgttttctgagcgggcttgtgatatgcacgtggccgacatgctggttaaggtgaacgcacttatcaaggatcgggaaggttatgctcctggcacagaattccaccggtgcaaggagatgtctgaatactgcagcactctgtgccgccacctctacctgttcccaggacaccctcccacatgatgtcacctccccatcatccacgccaagtggaagccactggaccacaggaggtgtgatagagcctttgatcttcaggatgcacggtttctgttctgccccctcagggatgtgggaatctcccagacttgtttcctgtgcccatcatctctgcctttgagtgtgggactccaggccagctccttttctgtgaagccctttgcctgtagagccagccttggttggacctattgccaggaatgtttcagctgcagttgaagagcctgacaagtgaagttgtaaacacagtgtggttatggggagagggcatataaattccccatatttgtgttcagttccagcttttgtagatggcactttagtgattgcttttattacattagttaagatgtctgagagaccatctcctatcttttatttcattcatatcctccgccctttttgtcctagagtgagagtttggaaggtgtccaaatttaatgtagacattatcttttggctctgaagaagcaaacatgactagagacgcaccttgctgcagtgtccagaagcggcctgtgcgttcccttcagtactgcagcgccacccagtggaaggacactcttggctcgtttgggctcaaggcaccgcagcctgtcagccaacattgccttgcatttgtaccttattgatctttgcccatggaagtctcaaagatctttcgttggttgtttctctgagctttgttactgaaatgagcctcgtggggagcatcagagaaggccaggaagaatggtgtgtttccctagactctgtaaccacctctctgtctttttccttcctgagaaacgtccatctctctcccttactattcccactttcattcaatcaacctgcacttcatatctagatttctagaaaagcttcctagcttatctccctgcttcatatctctcccttctttaccttcatttcatcctgttggctgctgccaccaaatctgtctagaatcctgctttacaggatcatgtaaatgctcaaagatgtaatgtagttctttgttcctgctttctctttcagtattaaactctcctttgatattatgtggcttttatttcagtgccatacatgttattgttttcaacctagaaacctttatccctgcttatctgaaacttcccaacttccctgttctttaagactttttttttttttttttttttttttgagacagagtctcgctctgtcgcccaggctggagggcagtggcacgatctcagctcactgcaagctccaactcccgggttcacgccattctcctgcctcagccttccaagtagctgggactacaggtgcccgccaccgtgcccggctaatttttttgtatttttagtagagacagggtttcaccatgttagccgggatggtcttgatctcctgacctcatgatccacccacctcagcctcccaaagtgttgggattacaggcgtgagccactgcgcccgggcaagacctttttttaaaaaaaaaaaaaaaaaaacttccattctttcttcctccagtctgttctcacataacagagtagttttggtttttaattttttttggttgtttgctgttttttgttttttaaggtgagttctcactatgtttctcagactggtctcgaactcctggcctcaagccatcttcccgcctcagcctctcaaatagctgggcttacaggcatgagccaccacacctggccaggatttggttgtttaaatataaatctgatcacccccctgcttagaacccttctgctttctattacccctcatttaaaatgtaaactcttcaccttggtttatgagaactggttcttgccttccccttgaacctcattaaatggtgatttcttgctaagctccagcccgagtggtctcctctcagcttctaattttgtgctctttcctgcccttttcctgggccttctcagctctccacccccaccactcttgactcaggtggtgtccttcttcctcaagtcttgacaattcccgggcccttcagtccctgagcagtctacttctgtgtctgtcaccacatcttgtcttttcccctcattgcatttattgcagtttatatatatgctacttttacttgttcatttctgtctcccctaccaggctgtaaatgagggcagaaaccttgtttgttttattcaccatcatgtaccaagtgcttggcacatagtgggccttcattaaatgtttgttgaataaaagagggaagaaggcaagccaaccttagctacaatcctaccttttgataaaatgttccttttgacaatatacacggattattatttgtactttgtttttccatgtgttttgcttttatccactggcatttttagctccttgaagacatatcatgtgtgagataacttccttcacatctcccatggtccctagcaaaatgctaggcctgtagtagtcaaggtgctcaataaatatttgtttgggtggtttgtgagccttgctgccaagtcctgcctttgggtcgacatagtatggaagtatttgagagagagaacctttccactcccactgccaggattttgtattgccatcgggtgccaaataaatgctcatatttattactga

SEQ ID NO: 17955 - protein, 452 aa, Homo sapiens; identical to SEQ ID NO: 2138

SEQ ID NO: 17956 - DNA, 3913 bp, Homo sapiens
gggtggcctggtgtgtgggcgcggcagggcgcaggcgcaggcgcagtgtgcgtccgcgtctgaggggagggatgtgggggaagcgacggcccccggtttgtttgggctgtgggcggtgcgcagcggagagcccgggaaaagcgggaaatggcggcgccgagcgcggggtcttggtccaccttccagcacaaggagctgatggccgctgacaggggacgcaggatattgggagtgtgtggcatgcatcctcatcatcaggaaactctaaaaaagaaccgagtggtgctagccaaacagctgttgttgagcgaattgttagaacatcttctggagaaggacatcatcaccttggaaatgagggagctcatccaggccaaagtgggcagtttcagccagaatgtggaactcctcaacttgctgcctaagaggggtccccaagcttttgatgccttctgtgaagccttgcactcctgaattttatcaaacacacttccagctggcatataggttgcagtctcggcctcgtggcctagcactggtgttgagcaatgtgcacttcactggagagaaagaactggaatttcgctctggaggggatgtggaccacagtactctagtcaccctcttcaagcttttgggctatgacgtccatgttctatgtgaccagactgcacaggaaatgcaagagaaactgcagaattttgcacagttacctgcacaccgagtcacggactcctgcatcgtggcactcctctcgcatggtgtggagggcgccatctatggtgtggatgggaaactgctccagctccaagaggtttttcagctctttgacaacgccaactgcccaagcctacagaacaaaccaaaaatgttcttcatccaggcctgccgtggagatgagactgatcgtggggttgaccaacaagatggaaagaaccacgcaggatcccctgggtgcgaggagagtgatgccggtaaagaaaagttgccgaagatgagactgcccacgcgctcagacatgatatgcggctatgcctgcctcaaagggactgccgccatgcggaacaccaaacgaggttcctggtacatcgaggctcttgctcaagtgttttctgagcgggcttgtgatatgcacgtggccgacatgctggttaaggtgaacgcacttatcaaggatcgggaaggttatgctcctggcacagaattccaccggtgcaaggagatgtctgaatactgcagcactctgtgccgccacctctacctgttcccaggacaccctcccacatgatgtcacctccccatcatccacgccaagtggaagccactggaccacaggaggtgtgatagagcctttgatcttcaggatgcacggtttctgttctgccccctcagggatgtgggaatctcccagacttgtttcctgtgcccatcatctctgcctttgagtgtgggactccaggccagctccttttctgtgaagccctttgcctgtagagccagccttggttggacctattgccaggaatgtttcagctgcagttgaagagcctgacaagtgaagttgtaaacacagtgtggttatggggagagggcatataaattccccatatttgtgttcagttccagcttttgtagatggcactttagtgattgcttttattacattagttaagatgtctgagagaccatctcctatcttttatttcattcatatcctccgccctttttgtcctagagtgagagtttggaaggtgtccaaatttaatgtagacattatcttttggctctgaagaagcaaacatgactagagacgcaccttgctgcagtgtccagaagcggcctgtgcgttcccttcagtactgcagcgccacccagtggaaggacactcttggctcgtttgggctcaaggcaccgcagcctgtcagccaacattgccttgcatttgtaccttattgatctttgcccatggaagtctcaaagatctttcgttggttgtttctctgagctttgttactgaaatgagcctcgtggggagcatcagagaaggccaggaagaatggtgtgtttccctagactctgtaaccacctctctgtctttttccttcctgagaaacgtccatctctctcccttactattcccactttcattcaatcaacctgcacttcatatctagatttctagaaaagcttcctagcttatctccctgcttcatatctctcccttctttaccttcatttcatcctgttggctgctgccaccaaatctgtctagaatcctgctttacaggatcatgtaaatgctcaaagatgtaatgtagttctttgttcctgctttctctttcagtattaaactctcctttgatattatgtggcttttatttcagtgccatacatgttattgttttcaacctagaaacctttatccctgcttatctgaaacttcccaacttccctgttctttaagactttttttttttttttttttttttttgagacagagtctcgctctgtcgcccaggctggagggcagtggcacgatctcagctcactgcaagctccaactcccgggttcacgccattctcctgcctcagccttccaagtagctgggactacaggtgcccgccaccgtgcccggctaatttttttgtatttttagtagagacagggtttcaccatgttagccgggatggtcttgatctcctgacctcatgatccacccacctcagcctcccaaagtgttgggattacaggcgtgagccactgcgcccgggcaagacctttttttaaaaaaaaaaaaaaaaaaacttccattctttcttcctccagtctgttctcacataacagagtagttttggtttttaattttttttggttgtttgctgttttttgttttttaaggtgagttctcactatgtttctcagactggtctcgaactcctggcctcaagccatcttcccgcctcagcctctcaaatagctgggcttacaggcatgagccaccacacctggccaggatttggttgtttaaatataaatctgatcacccccctgcttagaacccttctgctttctattacccctcatttaaaatgtaaactcttcaccttggtttatgagaactggttcttgccttccccttgaacctcattaaatggtgatttcttgctaagctccagcccgagtggtctcctctcagcttctaattttgtgctctttcctgcccttttcctgggccttctcagctctccacccccaccactcttgactcaggtggtgtccttcttcctcaagtcttgacaattcccgggcccttcagtccctgagcagtctacttctgtgtctgtcaccacatcttgtcttttcccctcattgcatttattgcagtttatatatatgctacttttacttgttcatttctgtctcccctaccaggctgtaaatgagggcagaaaccttgtttgttttattcaccatcatgtaccaagtgcttggcacatagtgggccttcattaaatgtttgttgaataaaagagggaagaaggcaagccaaccttagctacaatcctaccttttgataaaatgttccttttgacaatatacacggattattatttgtactttgtttttccatgtgttttgcttttatccactggcatttttagctccttgaagacatatcatgtgtgagataacttccttcacatctcccatggtccctagcaaaatgctaggcctgtagtagtcaaggtgctcaataaatatttgtttgggtggtttgtgagccttgctgccaagtcctgcctttgggtcgacatagtatggaagtatttgagagagagaacctttccactcccactgccaggattttgtattgccatcgggtgccaaataaatgctcatatttattactga

SEQ ID NO: 17957 - protein, 296 aa, Homo sapiens
MWNSSTCCLRGVPKLLMPSVKPCTPEFYQTHFQLAYRLQSRPRGLALVLSNVHFTGEKELEFRSGGDVDHSTLVTLFKLLGYDVHVLCDQTAQEMQEKLQNFAQLPAHRVTDSCIVALLSHGVEGAIYGVDGKLLQLQEVFQLFDNANCPSLQNKPKMFFIQACRGDETDRGVDQQDGKNHAGSPGCEESDAGKEKLPKMRLPTRSDMICGYACLKGTAAMRNTKRGSWYIEALAQVFSERACDMHVADMLVKVNALIKDREGYAPGTEFHRCKEMSEYCSTLCRHLYLFPGHPPT

SEQ ID NO: 17958 - DNA, 4031 bp, Homo sapiens
gaacgatttaaggagcgaatactactggtaaactaatggaagaaatctgctgcaccactggatattgggagtgtgtggcatgcatcctcatcatcaggaaactctaaaaaagaaccgagtggtgctagccaaacagctgttgttgagcgaattgttagaacatcttctggagaaggacatcatcaccttggaaatgagggagctcatccaggccaaagtgggcagtttcagccagaatgtggaactcctcaacttgctgcctaagaggggtccccaagcttttgatgccttctgtgaagcactgagggagaccaagcaaggccacctggaggatatgttgctcaccaccctttctgggcttcagcatgtactcccaccgttgagctgtgactacgacttgagtctcccttttccggtgtgtgagtcctgtcccctttacaagaagctccgcctgtcgacagatactgtggaacactccctagacaataaagatggtcctgtctgccttcaggtgaagccttgcactcctgaattttatcaaacacacttccagctggcatataggttgcagtctcggcctcgtggcctagcactggtgttgagcaatgtgcacttcactggagagaaagaactggaatttcgctctggaggggatgtggaccacagtactctagtcaccctcttcaagcttttgggctatgacgtccatgttctatgtgaccagactgcacaggaaatgcaagagaaactgcagaattttgcacagttacctgcacaccgagtcacggactcctgcatcgtggcactcctctcgcatggtgtggagggcgccatctatggtgtggatgggaaactgctccagctccaagaggtttttcagctctttgacaacgccaactgcccaagcctacagaacaaaccaaaaatgttcttcatccaggcctgccgtggaggtgctattggatcccttgggcacctccttctgttcactgctgccaccgcctctcttgctctatgagactgatcgtggggttgaccaacaagatggaaagaaccacgcaggatcccctgggtgcgaggagagtgatgccggtaaagaaaagttgccgaagatgagactgcccacgcgctcagacatgatatgcggctatgcctgcctcaaagggactgccgccatgcggaacaccaaacgaggttcctggtacatcgaggctcttgctcaagtgttttctgagcgggcttgtgatatgcacgtggccgacatgctggttaaggtgaacgcacttatcaaggatcgggaaggttatgctcctggcacagaattccaccggtgcaaggagatgtctgaatactgcagcactctgtgccgccacctctacctgttcccaggacaccctcccacatgatgtcacctccccatcatccacgccaagtggaagccactggaccacaggaggtgtgatagagcctttgatcttcaggatgcacggtttctgttctgccccctcagggatgtgggaatctcccagacttgtttcctgtgcccatcatctctgcctttgagtgtgggactccaggccagctccttttctgtgaagccctttgcctgtagagccagccttggttggacctattgccaggaatgtttcagctgcagttgaagagcctgacaagtgaagttgtaaacacagtgtggttatggggagagggcatataaattccccatatttgtgttcagttccagcttttgtagatggcactttagtgattgcttttattacattagttaagatgtctgagagaccatctcctatcttttatttcattcatatcctccgccctttttgtcctagagtgagagtttggaaggtgtccaaatttaatgtagacattatcttttggctctgaagaagcaaacatgactagagacgcaccttgctgcagtgtccagaagcggcctgtgcgttcccttcagtactgcagcgccacccagtggaaggacactcttggctcgtttgggctcaaggcaccgcagcctgtcagccaacattgccttgcatttgtaccttattgatctttgcccatggaagtctcaaagatctttcgttggttgtttctctgagctttgttactgaaatgagcctcgtggggagcatcagagaaggccaggaagaatggtgtgtttccctagactctgtaaccacctctctgtctttttccttcctgagaaacgtccatctctctcccttactattcccactttcattcaatcaacctgcacttcatatctagatttctagaaaagcttcctagcttatctccctgcttcatatctctcccttctttaccttcatttcatcctgttggctgctgccaccaaatctgtctagaatcctgctttacaggatcatgtaaatgctcaaagatgtaatgtagttctttgttcctgctttctctttcagtattaaactctcctttgatattatgtggcttttatttcagtgccatacatgttattgttttcaacctagaaacctttatccctgcttatctgaaacttcccaacttccctgttctttaagactttttttttttttttttttttttttgagacagagtctcgctctgtcgcccaggctggagggcagtggcacgatctcagctcactgcaagctccaactcccgggttcacgccattctcctgcctcagccttccaagtagctgggactacaggtgcccgccaccgtgcccggctaatttttttgtatttttagtagagacagggtttcaccatgttagccgggatggtcttgatctcctgacctcatgatccacccacctcagcctcccaaagtgttgggattacaggcgtgagccactgcgcccgggcaagacctttttttaaaaaaaaaaaaaaaaaaacttccattctttcttcctccagtctgttctcacataacagagtagttttggtttttaattttttttggttgtttgctgttttttgttttttaaggtgagttctcactatgtttctcagactggtctcgaactcctggcctcaagccatcttcccgcctcagcctctcaaatagctgggcttacaggcatgagccaccacacctggccaggatttggttgtttaaatataaatctgatcacccccctgcttagaacccttctgctttctattacccctcatttaaaatgtaaactcttcaccttggtttatgagaactggttcttgccttccccttgaacctcattaaatggtgatttcttgctaagctccagcccgagtggtctcctctcagcttctaattttgtgctctttcctgcccttttcctgggccttctcagctctccacccccaccactcttgactcaggtggtgtccttcttcctcaagtcttgacaattcccgggcccttcagtccctgagcagtctacttctgtgtctgtcaccacatcttgtcttttcccctcattgcatttattgcagtttatatatatgctacttttacttgttcatttctgtctcccctaccaggctgtaaatgagggcagaaaccttgtttgttttattcaccatcatgtaccaagtgcttggcacatagtgggccttcattaaatgtttgttgaataaaagagggaagaaggcaagccaaccttagctacaatcctaccttttgataaaatgttccttttgacaatatacacggattattatttgtactttgtttttccatgtgttttgcttttatccactggcatttttagctccttgaagacatatcatgtgtgagataacttccttcacatctcccatggtccctagcaaaatgctaggcctgtagtagtcaaggtgctcaataaatatttgtttgggtggtttgtgagccttgctgccaagtcctgcctttgggtcgacatagtatggaagtatttgagagagagaacctttccactcccactgccaggattttgtattgccatcgggtgccaaataaatgctcatatttattactga

SEQ ID NO: 17959 - protein, 312 aa, Homo sapiens
MHPHHQETLKKNRVVLAKQLLLSELLEHLLEKDIITLEMRELIQAKVGSFSQNVELLNLLPKRGPQAFDAFCEALRETKQGHLEDMLLTTLSGLQHVLPPLSCDYDLSLPFPVCESCPLYKKLRLSTDTVEHSLDNKDGPVCLQVKPCTPEFYQTHFQLAYRLQSRPRGLALVLSNVHFTGEKELEFRSGGDVDHSTLVTLFKLLGYDVHVLCDQTAQEMQEKLQNFAQLPAHRVTDSCIVALLSHGVEGAIYGVDGKLLQLQEVFQLFDNANCPSLQNKPKMFFIQACRGGAIGSLGHLLLFTAATASLAL

SEQ ID NO: 17960 - DNA, 3752 bp, Homo sapiens
gaacgatttaaggagcgaatactactggtaaactaatggaagaaatctgctgcaccactggatattgggagtgtgtggcatgcatcctcatcatcaggaaactctaaaaaagaaccgagtggtgctagccaaacagctgttgttgagcgaattgttagaacatcttctggagaaggacatcatcaccttggaaatgagggagctcatccaggccaaagtgggcagtttcagccagaatgtggaactcctcaacttgctgcctaagaggggtccccaagcttttgatgccttctgtgaagccttgcactcctgaattttatcaaacacacttccagctggcatataggttgcagtctcggcctcgtggcctagcactggtgttgagcaatgtgcacttcactggagagaaagaactggaatttcgctctggaggggatgtggaccacagtactctagtcaccctcttcaagcttttgggctatgacgtccatgttctatgtgaccagactgcacaggaaatgcaagagaaactgcagaattttgcacagttacctgcacaccgagtcacggactcctgcatcgtggcactcctctcgcatggtgtggagggcgccatctatggtgtggatgggaaactgctccagctccaagaggtttttcagctctttgacaacgccaactgcccaagcctacagaacaaaccaaaaatgttcttcatccaggcctgccgtggagatgagactgatcgtggggttgaccaacaagatggaaagaaccacgcaggatcccctgggtgcgaggagagtgatgccggtaaagaaaagttgccgaagatgagactgcccacgcgctcagacatgatatgcggctatgcctgcctcaaagggactgccgccatgcggaacaccaaacgaggttcctggtacatcgaggctcttgctcaagtgttttctgagcgggcttgtgatatgcacgtggccgacatgctggttaaggtgaacgcacttatcaaggatcgggaaggttatgctcctggcacagaattccaccggtgcaaggagatgtctgaatactgcagcactctgtgccgccacctctacctgttcccaggacaccctcccacatgatgtcacctccccatcatccacgccaagtggaagccactggaccacaggaggtgtgatagagcctttgatcttcaggatgcacggtttctgttctgccccctcagggatgtgggaatctcccagacttgtttcctgtgcccatcatctctgcctttgagtgtgggactccaggccagctccttttctgtgaagccctttgcctgtagagccagccttggttggacctattgccaggaatgtttcagctgcagttgaagagcctgacaagtgaagttgtaaacacagtgtggttatggggagagggcatataaattccccatatttgtgttcagttccagcttttgtagatggcactttagtgattgcttttattacattagttaagatgtctgagagaccatctcctatcttttatttcattcatatcctccgccctttttgtcctagagtgagagtttggaaggtgtccaaatttaatgtagacattatcttttggctctgaagaagcaaacatgactagagacgcaccttgctgcagtgtccagaagcggcctgtgcgttcccttcagtactgcagcgccacccagtggaaggacactcttggctcgtttgggctcaaggcaccgcagcctgtcagccaacattgccttgcatttgtaccttattgatctttgcccatggaagtctcaaagatctttcgttggttgtttctctgagctttgttactgaaatgagcctcgtggggagcatcagagaaggccaggaagaatggtgtgtttccctagactctgtaaccacctctctgtctttttccttcctgagaaacgtccatctctctcccttactattcccactttcattcaatcaacctgcacttcatatctagatttctagaaaagcttcctagcttatctccctgcttcatatctctcccttctttaccttcatttcatcctgttggctgctgccaccaaatctgtctagaatcctgctttacaggatcatgtaaatgctcaaagatgtaatgtagttctttgttcctgctttctctttcagtattaaactctcctttgatattatgtggcttttatttcagtgccatacatgttattgttttcaacctagaaacctttatccctgcttatctgaaacttcccaacttccctgttctttaagactttttttttttttttttttttttttgagacagagtctcgctctgtcgcccaggctggagggcagtggcacgatctcagctcactgcaagctccaactcccgggttcacgccattctcctgcctcagccttccaagtagctgggactacaggtgcccgccaccgtgcccggctaatttttttgtatttttagtagagacagggtttcaccatgttagccgggatggtcttgatctcctgacctcatgatccacccacctcagcctcccaaagtgttgggattacaggcgtgagccactgcgcccgggcaagacctttttttaaaaaaaaaaaaaaaaaaacttccattctttcttcctccagtctgttctcacataacagagtagttttggtttttaattttttttggttgtttgctgttttttgttttttaaggtgagttctcactatgtttctcagactggtctcgaactcctggcctcaagccatcttcccgcctcagcctctcaaatagctgggcttacaggcatgagccaccacacctggccaggatttggttgtttaaatataaatctgatcacccccctgcttagaacccttctgctttctattacccctcatttaaaatgtaaactcttcaccttggtttatgagaactggttcttgccttccccttgaacctcattaaatggtgatttcttgctaagctccagcccgagtggtctcctctcagcttctaattttgtgctctttcctgcccttttcctgggccttctcagctctccacccccaccactcttgactcaggtggtgtccttcttcctcaagtcttgacaattcccgggcccttcagtccctgagcagtctacttctgtgtctgtcaccacatcttgtcttttcccctcattgcatttattgcagtttatatatatgctacttttacttgttcatttctgtctcccctaccaggctgtaaatgagggcagaaaccttgtttgttttattcaccatcatgtaccaagtgcttggcacatagtgggccttcattaaatgtttgttgaataaaagagggaagaaggcaagccaaccttagctacaatcctaccttttgataaaatgttccttttgacaatatacacggattattatttgtactttgtttttccatgtgttttgcttttatccactggcatttttagctccttgaagacatatcatgtgtgagataacttccttcacatctcccatggtccctagcaaaatgctaggcctgtagtagtcaaggtgctcaataaatatttgtttgggtggtttgtgagccttgctgccaagtcctgcctttgggtcgacatagtatggaagtatttgagagagagaacctttccactcccactgccaggattttgtattgccatcgggtgccaaataaatgctcatatttattactga

SEQ ID NO: 17961 - protein, 296 aa, Homo sapiens; identical to SEQ ID NO: 17957

SEQ ID NO: 17962 - DNA, 3084 bp, Homo sapiens
atcatcaaaaataagagtctgtcttgggatacataaggcttgtatcaagagcaaggatctgctcaggatgagactgatcgtggggttgaccaacaagatggaaagaaccacgcaggatcccctgggtgcgaggagagtgatgccggtaaagaaaagttgccgaagatgagactgcccacgcgctcagacatgatatgcggctatgcctgcctcaaagggactgccgccatgcggaacaccaaacgaggttcctggtacatcgaggctcttgctcaagtgttttctgagcgggcttgtgatatgcacgtggccgacatgctggttaaggtgaacgcacttatcaaggatcgggaaggttatgctcctggcacagaattccaccggtgcaaggagatgtctgaatactgcagcactctgtgccgccacctctacctgttcccaggacaccctcccacatgatgtcacctccccatcatccacgccaagtggaagccactggaccacaggaggtgtgatagagcctttgatcttcaggatgcacggtttctgttctgccccctcagggatgtgggaatctcccagacttgtttcctgtgcccatcatctctgcctttgagtgtgggactccaggccagctccttttctgtgaagccctttgcctgtagagccagccttggttggacctattgccaggaatgtttcagctgcagttgaagagcctgacaagtgaagttgtaaacacagtgtggttatggggagagggcatataaattccccatatttgtgttcagttccagcttttgtagatggcactttagtgattgcttttattacattagttaagatgtctgagagaccatctcctatcttttatttcattcatatcctccgccctttttgtcctagagtgagagtttggaaggtgtccaaatttaatgtagacattatcttttggctctgaagaagcaaacatgactagagacgcaccttgctgcagtgtccagaagcggcctgtgcgttcccttcagtactgcagcgccacccagtggaaggacactcttggctcgtttgggctcaaggcaccgcagcctgtcagccaacattgccttgcatttgtaccttattgatctttgcccatggaagtctcaaagatctttcgttggttgtttctctgagctttgttactgaaatgagcctcgtggggagcatcagagaaggccaggaagaatggtgtgtttccctagactctgtaaccacctctctgtctttttccttcctgagaaacgtccatctctctcccttactattcccactttcattcaatcaacctgcacttcatatctagatttctagaaaagcttcctagcttatctccctgcttcatatctctcccttctttaccttcatttcatcctgttggctgctgccaccaaatctgtctagaatcctgctttacaggatcatgtaaatgctcaaagatgtaatgtagttctttgttcctgctttctctttcagtattaaactctcctttgatattatgtggcttttatttcagtgccatacatgttattgttttcaacctagaaacctttatccctgcttatctgaaacttcccaacttccctgttctttaagactttttttttttttttttttttttttgagacagagtctcgctctgtcgcccaggctggagggcagtggcacgatctcagctcactgcaagctccaactcccgggttcacgccattctcctgcctcagccttccaagtagctgggactacaggtgcccgccaccgtgcccggctaatttttttgtatttttagtagagacagggtttcaccatgttagccgggatggtcttgatctcctgacctcatgatccacccacctcagcctcccaaagtgttgggattacaggcgtgagccactgcgcccgggcaagacctttttttaaaaaaaaaaaaaaaaaaacttccattctttcttcctccagtctgttctcacataacagagtagttttggtttttaattttttttggttgtttgctgttttttgttttttaaggtgagttctcactatgtttctcagactggtctcgaactcctggcctcaagccatcttcccgcctcagcctctcaaatagctgggcttacaggcatgagccaccacacctggccaggatttggttgtttaaatataaatctgatcacccccctgcttagaacccttctgctttctattacccctcatttaaaatgtaaactcttcaccttggtttatgagaactggttcttgccttccccttgaacctcattaaatggtgatttcttgctaagctccagcccgagtggtctcctctcagcttctaattttgtgctctttcctgcccttttcctgggccttctcagctctccacccccaccactcttgactcaggtggtgtccttcttcctcaagtcttgacaattcccgggcccttcagtccctgagcagtctacttctgtgtctgtcaccacatcttgtcttttcccctcattgcatttattgcagtttatatatatgctacttttacttgttcatttctgtctcccctaccaggctgtaaatgagggcagaaaccttgtttgttttattcaccatcatgtaccaagtgcttggcacatagtgggccttcattaaatgtttgttgaataaaagagggaagaaggcaagccaaccttagctacaatcctaccttttgataaaatgttccttttgacaatatacacggattattatttgtactttgtttttccatgtgttttgcttttatccactggcatttttagctccttgaagacatatcatgtgtgagataacttccttcacatctcccatggtccctagcaaaatgctaggcctgtagtagtcaaggtgctcaataaatatttgtttgggtggtttgtgagccttgctgccaagtcctgcctttgggtcgacatagtatggaagtatttgagagagagaacctttccactcccactgccaggattttgtattgccatcgggtgccaaataaatgctcatatttattactga

SEQ ID NO: 17963 - protein, 97 aa, Homo sapiens [sequence omitted]

SEQ ID NO: 17964 - DNA, 385 bp, Homo sapiens
atggcaggtgagatcgccaaggctcaggtcgctcggcctggtggcaacactgtcttcgggaagatcatctgcaaggaaatcccagccaaaatcatttttgaggatgaccagtgccttgctttccatgacacttcccctcaagcaccaacacgttttctgttgatatcgaaaaaacatatatcccagatttctgcagcagaagataatgacgaaagtcttcttggacacttaatgattgttggcaagaaatgtgctgctgatttgggcctgaataagggttatcaaatggtggtgaataaaggttcagatggtggacagtctgtctgtcaagttcatctccatgttcttggaggttggcagatgcattggcctcctggttaagcac

SEQ ID NO: 17965 - protein, 126 aa, Homo sapiens
MAGEIAKAQVARPGGNTVFGKIICKEIPAKIIFEDDQCLAFHDTSPQAPTRFLLISKKHISQISAAEDNDESLLGHLMIVGKKCAADLGLNKGYQMVVNKGSDGGQSVCQVHLHVLGGWQMHWPPG

SEQ ID NO: 17966 - DNA, 3094 bp, Homo sapiens
agcaagagcagaggcttaaggagctacactgggggaaggacaggggcaagcaggccaaggcctggccggggctcggggggagggaatatggagcaatcccggtcacagcagcgtgggggtgaacaaagctggtggggtagtgacccccagtaccagtatatgccctttgaacactgcaccagctacggactgccctctgagaatgggggcctccagcacaggctccggaaggatgcaggcccccgccacaacgtccaccccacacagatttatggccatcacaaagaacaattctcagacagggagcaggacatagggatgcccaagaagacaggctccagttctaccgtggacagcaaggatgaggatcactattctaaatgtcaagattgtatccaccgcctgggacaggtggtgagaagaaaattaggggaagacgggatctttctggtgcttctgggactgctgatggctctggtcagctggagcatggactacgtcagtgccaaaagccttcaggcctacaagtggtcctacgcgcagatgcagcccagccttcctctgcagttcctggtctgggtcaccttcccactagtcctcatcctcttcagcgccctcttctgccacctcatctctccccaggctgttggctctggaatccccgaaatgaagacaatacttcgtggggttgtcctgaaggaatacctcacaatgaaagcctttgtggccaaggttgtcgccctgactgcgggcctgggcagtggcatccccgtggggaaagagggccccttcgtccacattgccagcatctgtgctgctgtcctcagcaaattcatgtctgtgttctgcggggtatatgagcagccatactactactctgatatcctgacggtgggctgtgctgtgggagtcggctgttgttttgggacaccacttggaggcaatgctatttagcatcgaggtcacctccacctactttgctgttcggaactactggagaggattctttgcagccacgttcagcgcctttgtgtttcgagtgctggcagtgtggaacaaggatgctgtcaccatcactgctctgttcagaaccaatttccgaatggatttcccctttgacctgaaggaactaccagcttttgctgccatcgggatttgctgtgggctcctgggagctgtatttgtgtatctgcatcgccaagtcatgctcggtgtccgaaagcacaaggccctcagccagtttcttgctaagcaccgcctgctgtatcctggaattgttacctttgtcattgcctcattcaccttcccaccaggaatgggtcaattcatggctggagagttgatgccccgcgaagccatcagtactttgtttgacaacaatacatgggtgaaacacgcgggtgatcctgagagcctgggccagtcagctgtgtggattcacccccgggtcaacgttgtcatcatcatctttctcttcttcgtcatgaagttctggatgtccatcgtggccaccactatgcccataccctgcggaggcttcatgcctgtgtttgtgctaggagctgcatttggaaggctggtaggagaaatcatggccatgctctttcctgatggtattttgtttgatgacatcatctacaagatcctacctgggggctatgcagtaattggagcagcagcgctgactggtgccgtttcccacacagtctccacagctgtgatttgcttcgaattaacgggtcagattgctcacatcctgcccatgatggtggctgttatcttggccaacatggtggcccagagcctgcagccctctctctatgacagcatcatccaggtcaagaagctaccctacttgcctgaccttggctggaaccagctcagcaaatataccatctttgttgaggacatcatggtacgtgatgtgaagtttgtttcagcttcttacacatatggggagttgcgaaccctgctccagaccaccacagtcaagactttaccactggttgactcaaaagattcaatgatcctgctgggctcggtggagcggtcggaactgcaggccctcctgcagcgccacctgtgtcctgagcgcaggctgcgcgcagcccaagagatggcgcggaagttgtcggagctgccttacgacgggaaggcgcggctggctggggaggggctccccggcgcgcctccaggccggcccgagtccttcgcctttgtggatgaggatgaggacgaagacctctctggcaagagcgagcttcctccttcccttgctctccacccctctactactgcccctctgtccccagaagagcccaatgggcctctgcctggccacaaacagcagccggaagcaccagagcctgcaggtcaaagaccctccatcttccagtccctgcttcactgcttgctgggcagagctcgccccacaaagaagaaaacaacccaggattccacagatttagtggataacatgtcacctgaagagattgaggcctgggagcaggagcagctgagccagcctgtctgttttgattcctgctgtattgaccagtctcccttccagctggtggagcagacaaccctgcacaagactcataccctgttttcactccttggcctccacctcgcttacgtgaccagcatggggaagctcaggggcgtcctggccctggaggagctacagaaggccattgaggggcacaccaagtctggggtgcagctccgccctccccttgccagcttccggaacacgacttcaactcgaaagagtaccggggcacctccatcttctgcagagaactggaacctgcctgaggacaggcctggggccactggaacaggggatgtgattgctgcctccccagagacccctgtgccatctccttccccagagccccctctctccctggccccaggcaaggtagagggcgagttggaggagctggagctggtggagagtccagggctggaagaggagctggccgacatcttgcagggccccagcctgcgatccacagacgaggaggatgaggatgaactgatcctttgaccccctcccacgacctcctcataaagaccgtggagaggc

SEQ ID NO: 17967 - protein, 703 aa, Homo sapiens
MLFSIEVTSTYFAVRNYWRGFFAATFSAFVFRVLAVWNKDAVTITALFRTNFRMDFPFDLKELPAFAAIGICCGLLGAVFVYLHRQVMLGVRKHKALSQFLAKHRLLYPGIVTFVIASFTFPPGMGQFMAGELMPREAISTLFDNNTWVKHAGDPESLGQSAVWIHPRVNVVIIIFLFFVMKFWMSIVATTMPIPCGGFMPVFVLGAAFGRLVGEIMAMLFPDGILFDDIIYKILPGGYAVIGAAALTGAVSHTVSTAVICFELTGQIAHILPMMVAVILANMVAQSLQPSLYDSIIQVKKLPYLPDLGWNQLSKYTIFVEDIMVRDVKFVSASYTYGELRTLLQTTTVKTLPLVDSKDSMILLGSVERSELQALLQRHLCPERRLRAAQEMARKLSELPYDGKARLAGEGLPGAPPGRPESFAFVDEDEDEDLSGKSELPPSLALHPSTTAPLSPEEPNGPLPGHKQQPEAPEPAGQRPSIFQSLLHCLLGRARPTKKKTTQDSTDLVDNMSPEEIEAWEQEQLSQPVCFDSCCIDQSPFQLVEQTTLHKTHTLFSLLGLHLAYVTSMGKLRGVLALEELQKAIEGHTKSGVQLRPPLASFRNTTSTRKSTGAPPSSAENWNLPEDRPGATGTGDVIAASPETPVPSPSPEPPLSLAPGKVEGELEELELVESPGLEEELADILQGPSLRSTDEEDEDELIL

SEQ ID NO: 17968 - DNA, 570 bp, Homo sapiens
catctctccccaggctgttggctctggaatccccgaaatgaagacaatacttcgtggggttgtcctgaaggaatacctcacaatgaaagcctttgtggccaaggttgtcgccctgactgcgggcctgggcagtggcatccccgtggggaaagagggccccttcgtccacattgccagcatctgtgctgctgtcctcagcaaattcatgtctgtgttctgcggggtatatgagcctgtgcctgtcctccaaatgtccacccctctttcacctgtggccccacatggagaccgtgcctgggcagcttgacctcctggtgtcggcctgtgcagtgggcgtgggatgctgctttgcagcccctgtcggagcagccatactactactctgatatcctgacggtgggctgtgctgtgggagtcggctgttgttttgggacaccacttggaggcaatgctatttagcatcgaggtcacctccacctactttgctgttcggaactactggagaggattctttgcagccacgttcagcgcctttgtgtttcgagtgctggcagtgtggaacaaggatgc

SEQ ID NO: 17969 - protein, 89 aa, Homo sapiens
MKTILRGVVLKEYLTMKAFVAKVVALTAGLGSGIPVGKEGPFVHIASICAAVLSKFMSVFCGVYEPVPVLQMSTPLSPVAPHGDRAWAA

SEQ ID NO: 17970 - DNA, 492 bp, Homo sapiens
catctctccccaggctgttggctctggaatccccgaaatgaagacaatacttcgtggggttgtcctgaaggaatacctcacaatgaaagcctttgtggccaaggttgtcgccctgactgcgggcctgggcagtggcatccccgtggggaaagagcctgtgcctgtcctccaaatgtccacccctctttcacctgtggccccacatggagaccgtgcctgggcagcttgacctcctggtgtcggcctgtgcagtgggcgtgggatgctgctttgcagcccctgtcggagcagccatactactactctgatatcctgacggtgggctgtgctgtgggagtcggctgttgttttgggacaccacttggaggcaatgctatttagcatcgaggtcacctccacctactttgctgttcggaactactggagaggattctttgcagccacgttcagcgcctttgtgtttcgagtgctggcagtgtggaacaaggatgc

SEQ ID NO: 17971 - protein, 63 aa, Homo sapiens
MKTILRGVVLKEYLTMKAFVAKVVALTAGLGSGIPVGKEPVPVLQMSTPLSPVAPHGDRAWAA

SEQ ID NO: 17972 - DNA, 1834 bp, Homo sapiens
cccgccccctctcttctccctccctcctccttccgtgtcctcctccggaggaggagggagggcctgaggcccccataccgcccccaccacagcccagggagaaggtgagcagtattgatttggagatcgactctctgtcctcactgctggatgacatgaccaagaatgatcctttcaaagcccgggtgtcatctggatatgtgcccccaccagtggccactccattcagttccaagtccagtaccaagcctgcagccgggggcacagcacccctgcctccttggaagtccccttccagctcccagcctctgccccaggttccggctccggctcagagccagacacagttccatgttcagccccagccccagcccaagcctcaggtccaactccatgtccagtcccagacccagcctgtgtctttggctaacacccagccccgagggcccccagcctcatctccggctccagcccctaagttttctccagtgactcctaagtttactcctgtggcttccaagttcagtcctggagccccaggtggatctgggtcacaaccaaatcaaaaattggggcaccccgaagctctttctgctggcacaggctcccctcaacctcccagcttcacctatgcccagcagagggagaagccccgagtgcaggagaagcagcaccccgtgcccccaccggctcagaaccaaaaccaggtgcgctcccctggggccccagggcccctgactctgaaggaggtggaggagctggagcagctgacccagcagctaatgcaggacatggagcatcctcagaggcagaatgtggctgtcaacgaactctgcggccgatgccatcaacccctggcccgggcgcagccagccgtccgcgctctagggcagctgttccacatcgcctgcttcacctgccaccagtgtgcgcagcagctccagggccagcagttctacagtctggagggggcgccgtactgcgagggctgttacactgacaccctggagaagtgtaacacctgcggggagcccatcactgaccgcatgctgagggccacgggcaaggcctatcacccgcactgcttcacctgtgtggtctgcgcccgccccctggagggcacctccttcatcgtggaccaggccaaccggccccactgtgtccccgactaccacaagcagtacgccccgaggtgctccgtctgctctgagcccatcatgcctgagcctggccgagatgagactgtgcgagtggtcgccctggacaagaacttccacatgaagtgttacaagtgtgaggactgcgggaagcccctgtcgattgaggcagatgacaatggctgcttccccctggacggtcacgtgctctgtcggaagtgccacactgctagagcccagacctgagtgaggacaggccctcttcagaccgcagtccatgccccattgtggaccacccacactgagaccacctgcccccacctcagttattgttttgatgtctagcccctcccatttccaacccctccctagcatcccaggtgccctgacccaggacccaacatggtctagggatgcaggatccccgccctggggtctggtcctcgcccatcctgcagggattgcccaccgtcttccagacaccccacctgaggggggcaccaggtttagtgctgctgctttcactgctgcacccgcgccctcggccggccccccgagcagcctttgtactctgcttgcggagggctgggagaccctccaggacattcccaccctcccccatgctgccaagttgtagctatagctacaaataaaaaaaaaccttgttttccagaatt

SEQ ID NO: 17973 - protein, 415 aa, Homo sapiens
MTKNDPFKARVSSGYVPPPVATPFSSKSSTKPAAGGTAPLPPWKSPSSSQPLPQVPAPAQSQTQFHVQPQPQPKPQVQLHVQSQTQPVSLANTQPRGPPASSPAPAPKFSPVTPKFTPVASKFSPGAPGGSGSQPNQKLGHPEALSAGTGSPQPPSFTYAQQREKPRVQEKQHPVPPPAQNQNQVRSPGAPGPLTLKEVEELEQLTQQLMQDMEHPQRQNVAVNELCGRCHQPLARAQPAVRALGQLFHIACFTCHQCAQQLQGQQFYSLEGAPYCEGCYTDTLEKCNTCGEPITDRMLRATGKAYHPHCFTCVVCARPLEGTSFIVDQANRPHCVPDYHKQYAPRCSVCSEPIMPEPGRDETVRVVALDKNFHMKCYKCEDCGKPLSIEADDNGCFPLDGHVLCRKCHTARAQT

SEQ ID NO: 17974 - DNA, 1174 bp, Homo sapiens
cctctcttctccctccctcctccttccgtgtgtccctccccgcccggctggaggctgctccggaccgggacgcagagtctgcggacccggcgccgaggcggccacccgagacgcggcgcgcacgctccggcctgcgcccggcccggccatggcggccccccgcccgtctcccgcgatctccgtttcggtctcggctccggctttttacgccccgcagaagaagttcggccctgtggtggccccaaagcccaaagtgaatcccttccggcccggggacagcgagcctcccccggcacccggggcccagcgcgcacagatgggccgggtgggcgagattcccccgccgcccccggaagactttcccctgcctccacctccccttgctggggatggcgacgatgcagagggtgctctgggaggtgccttcccgccgccccctcccccgatcgaggaatcatttccccctgcgcctctggaggaggagatcttcccttccccgccgcctcctccggaggaggagggagggcctgaggcccccataccgcccccaccacagcccagggagaaggtgagcagtattgatttggagatcgactctctgtcctcactgctggatgacatgaccaagaatgatcctttcaaagcccgggtgtcatctggatatgtgcccccaccagtggccactccattcagttccaagtccagtaccaagcctgcagccgggggcacagcacccctgcctccttggaagtccccttccagctcccagcctctgccccaggttccggctccggctcagagccagacacagttccatgttcagccccagccccagcccaagcctcaggtccaactccatgtccagtcccagacccagcctgtgtctttggctaacacccagccccgagggcccccagcctcatctccggctccagcccctaagttttctccagtgactcctaagtttactcctgtggcttccaagttcagtcctggagccccaggtggatctgggtcacaaccaaatcaaaaattggggcaccccgaagctctttctgctggcacaggctcccctcaacctcccagcttcacctatgcccagcagagggagaagccccgagtgcaggagaagcagcaccccgtgcccccaccggctcagaaccaaaaccaggtg

SEQ ID NO: 17975 - protein, 341 aa, Homo sapiens
MAAPRPSPAISVSVSAPAFYAPQKKFGPVVAPKPKVNPFRPGDSEPPPAPGAQRAQMGRVGEIPPPPPEDFPLPPPPLAGDGDDAEGALGGAFPPPPPPIEESFPPAPLEEEIFPSPPPPPEEEGGPEAPIPPPPQPREKVSSIDLEIDSLSSLLDDMTKNDPFKARVSSGYVPPPVATPFSSKSSTKPAAGGTAPLPPWKSPSSSQPLPQVPAPAQSQTQFHVQPQPQPKPQVQLHVQSQTQPVSLANTQPRGPPASSPAPAPKFSPVTPKFTPVASKFSPGAPGGSGSQPNQKLGHPEALSAGTGSPQPPSFTYAQQREKPRVQEKQHPVPPPAQNQNQ

SEQ ID NO: 17976 - DNA, 2298 bp, Homo sapiens
cctctcttctccctccctcctccttccgtgtgtccctccccgcccggctggaggctgctccggaccgggacgcagagtctgcggacccggcgccgaggcggccacccgagacgcggcgcgcacgctccggcctgcgcccggcccggccatggcggccccccgcccgtctcccgcgatctccgtttcggtctcggctccggctttttacgccccgcagaagaagttcggccctgtggtggccccaaagcccaaagtgaatcccttccggcccggggacagcgagcctcccccggcacccggggcccagcgcgcacagatgggccgggtgggcgagattcccccgccgcccccggaagactttcccctgcctccacctccccttgctggggatggcgacgatgcagagggtgctctgggaggtgccttcccgccgccccctcccccgatcgaggaatcatttccccctgcgcctctggaggaggagatcttcccttccccgccgcctcctccggaggaggagggagggcctgaggcccccataccgcccccaccacagcccagggagaaggtgagcagtattgatttggagatcgactctctgtcctcactgctggatgacatgaccaagaatgatcctttcaaagcccgggtgtcatctggatatgtgcccccaccagtggccactccattcagttccaagtccagtaccaagcctgcagccgggggcacagcacccctgcctccttggaagtccccttccagctcccagcctctgccccaggttccggctccggctcagagccagacacagttccatgttcagccccagccccagcccaagcctcaggtccaactccatgtccagtcccagacccagcctgtgtctttggctaacacccagccccgagggcccccagcctcatctccggctccagcccctaagttttctccagtgactcctaagtttactcctgtggcttccaagttcagtcctggagccccaggtggatctgggtcacaaccaaatcaaaaattggggcaccccgaagctctttctgctggcacaggctcccctcaacctcccagcttcacctatgcccagcagagggagaagccccgagtgcaggagaagcagcaccccgtgcccccaccggctcagaaccaaaaccaggtgcgctcccctggggccccagggcccctgactctgaaggaggtggaggagctggagcagctgacccagcagctaatgcaggacatggagcatcctcagaggcagaatgtggctgtcaacgaactctgcggccgatgccatcaacccctggcccgggcgcagccagccgtccgcgctctagggcagctgttccacatcgcctgcttcacctgccaccagtgtgcgcagcagctccagggccagcagttctacagtctggagggggcgccgtactgcgagggctgttacactgacaccctggagaagtgtaacacctgcggggagcccatcactgaccgcatgctgagggccacgggcaaggcctatcacccgcactgcttcacctgtgtggtctgcgcccgccccctggagggcacctccttcatcgtggaccaggccaaccggccccactgtgtccccgactaccacaagcagtacgccccgaggtgctccgtctgctctgagcccatcatgcctgagcctggccgagatgagactgtgcgagtggtcgccctggacaagaacttccacatgaagtgttacaagtgtgaggactgcgggaagcccctgtcgattgaggcagatgacaatggctgcttccccctggacggtcacgtgctctgtcggaagtgccacactgctagagcccagacctgagtgaggacaggccctcttcagaccgcagtccatgccccattgtggaccacccacactgagaccacctgcccccacctcagttattgttttgatgtctagcccctcccatttccaacccctccctagcatcccaggtgccctgacccaggacccaacatggtctagggatgcaggatccccgccctggggtctggtcctcgcccatcctgcagggattgcccaccgtcttccagacaccccacctgaggggggcaccaggtttagtgctgctgctttcactgctgcacccgcgccctcggccggccccccgagcagcctttgtactctgcttgcggagggctgggagaccctccaggacattcccaccctcccccatgctgccaagttgtagctatagctacaaataaaaaaaaaccttgttttccagaatt

SEQ ID NO: 17977 - protein, 572 aa, Homo sapiens; identical to SEQ ID NO: 2144

SEQ ID NO: 17978 - DNA, 2181 bp, Homo sapiens
ccctccccgcccggctggaggctgctccggaccgggacgcagagtctgcggacccggcgccgaggcggccacccgagacgcggcgcgcacgctccggcctgcgcccggcccggccatggcggccccccgcccgtctcccgcgatctccgtttcggtctcggctccggctttttacgccccgcagaagaagttcggccctgtggtggccccaaagcccaaagtgaatcccttccggcccgactttcccctgcctccacctccccttgctggggatggcgacgatgcagagggtgctctgggaggtgccttcccgccgccccctcccccgatcgaggaatcatttccccctgcgcctctggaggaggagatcttcccttccccgccgcctcctccggaggaggagggagggcctgaggcccccataccgcccccaccacagcccagggagaaggtgagcagtattgatttggagatcgactctctgtcctcactgctggatgacatgaccaagaatgatcctttcaaagcccgggtgtcatctggatatgtgcccccaccagtggccactccattcagttccaagtccagtaccaagcctgcagccgggggcacagcacccctgcctccttggaagtccccttccagctcccagcctctgccccaggttccggctccggctcagagccagacacagttccatgttcagccccagccccagcccaagcctcaggtccaactccatgtccagtcccagacccagcctgtgtctttggctaacacccagccccgagggcccccagcctcatctccggctccagcccctaagttttctccagtgactcctaagtttactcctgtggcttccaagttcagtcctggagccccaggtggatctgggtcacaaccaaatcaaaaattggggcaccccgaagctctttctgctggcacaggctcccctcaacctcccagcttcacctatgcccagcagagggagaagccccgagtgcaggagaagcagcaccccgtgcccccaccggctcagaaccaaaaccaggtgcgctcccctggggccccagggcccctgactctgaaggaggtggaggagctggagcagctgacccagcagctaatgcaggacatggagcatcctcagaggcagaatgtggctgtcaacgaactctgcggccgatgccatcaacccctggcccgggcgcagccagccgtccgcgctctagggcagctgttccacatcgcctgcttcacctgccaccagtgtgcgcagcagctccagggccagcagttctacagtctggagggggcgccgtactgcgagggctgttacactgacaccctggagaagtgtaacacctgcggggagcccatcactgaccgcatgctgagggccacgggcaaggcctatcacccgcactgcttcacctgtgtggtctgcgcccgccccctggagggcacctccttcatcgtggaccaggccaaccggccccactgtgtccccgactaccacaagcagtacgccccgaggtgctccgtctgctctgagcccatcatgcctgagcctggccgagatgagactgtgcgagtggtcgccctggacaagaacttccacatgaagtgttacaagtgtgaggactgcgggaagcccctgtcgattgaggcagatgacaatggctgcttccccctggacggtcacgtgctctgtcggaagtgccacactgctagagcccagacctgagtgaggacaggccctcttcagaccgcagtccatgccccattgtggaccacccacactgagaccacctgcccccacctcagttattgttttgatgtctagcccctcccatttccaacccctccctagcatcccaggtgccctgacccaggacccaacatggtctagggatgcaggatccccgccctggggtctggtcctcgcccatcctgcagggattgcccaccgtcttccagacaccccacctgaggggggcaccaggtttagtgctgctgctttcactgctgcacccgcgccctcggccggccccccgagcagcctttgtactctgcttgcggagggctgggagaccctccaggacattcccaccctcccccatgctgccaagttgtagctatagctacaaataaaaaaaaaccttgttttccagaatt

SEQ ID NO: 17979 - protein, 544 aa, Homo sapiens
MAAPRPSPAISVSVSAPAFYAPQKKFGPVVAPKPKVNPFRPDFPLPPPPLAGDGDDAEGALGGAFPPPPPPIEESFPPAPLEEEIFPSPPPPPEEEGGPEAPIPPPPQPREKVSSIDLEIDSLSSLLDDMTKNDPFKARVSSGYVPPPVATPFSSKSSTKPAAGGTAPLPPWKSPSSSQPLPQVPAPAQSQTQFHVQPQPQPKPQVQLHVQSQTQPVSLANTQPRGPPASSPAPAPKFSPVTPKFTPVASKFSPGAPGGSGSQPNQKLGHPEALSAGTGSPQPPSFTYAQQREKPRVQEKQHPVPPPAQNQNQVRSPGAPGPLTLKEVEELEQLTQQLMQDMEHPQRQNVAVNELCGRCHQPLARAQPAVRALGQLFHIACFTCHQCAQQLQGQQFYSLEGAPYCEGCYTDTLEKCNTCGEPITDRMLRATGKAYHPHCFTCVVCARPLEGTSFIVDQANRPHCVPDYHKQYAPRCSVCSEPIMPEPGRDETVRVVALDKNFHMKCYKCEDCGKPLSIEADDNGCFPLDGHVLCRKCHTARAQT

SEQ ID NO: 17980 - DNA, 840 bp, Homo sapiens
gaccgcctggggctcctgagcccggctccgcgctgcgtaacccggcgacccaccccagcagcccggcccggccatggcggccccccgcccgtctcccgcgatctccgtttcggtctcggctccggctttttactcctcactgctggatgacatgaccaagaatgatcctttcaaagcccgggtgtcatctggatatgtgcccccaccagtggccactccattcagttccaagtccagtaccaagcctgcagccgggggcacagcacccctgcctccttggaagtccccttccagctcccagcctctgccccaggttccggctccggctcagagccagacacagttccatgttcagccccagccccagcccaagcctcaggtccaactccatgtccagtcccagacctgagtgaggacaggccctcttcagaccgcagtccatgccccattgtggaccacccacactgagaccacctgcccccacctcagttattgttttgatgtctagcccctcccatttccaacccctccctagcatcccaggtgccctgacccaggacccaacatggtctagggatgcaggatccccgccctggggtctggtcctcgcccatcctgcagggattgcccaccgtcttccagacaccccacctgaggggggcaccaggtttagtgctgctgctttcactgctgcacccgcgccctcggccggccccccgagcagcctttgtactctgcttgcggagggctgggagaccctccaggacattcccaccctcccccatgctgccaagttgtagctatagctacaaataaaaaaaaaccttgttttccagaatt

SEQ ID NO: 17981 - protein, 111 aa, Homo sapiens
MAAPRPSPAISVSVSAPAFYSSLLDDMTKNDPFKARVSSGYVPPPVATPFSSKSSTKPAAGGTAPLPPWKSPSSSQPLPQVPAPAQSQTQFHVQPQPQPKPQVQLHVQSQT

SEQ ID NO: 17982 - DNA, 627 bp, Homo sapiens
ccaccacagcccagggagaaggtgagcagtattgatttggagatcgactctctgtcctcactgctggatgacatgaccaagaatgatcctttcaaagcccgggtgtcatctggatatgtgcccccaccagtggccactccattcagttccaagtccagtaccaagcctgcagccgggggcacagcacccctgcctccttggaagtccccttccagctcccagcctctgccccaggttccggctccggctcagagccagacacagttccatgttcagccccagccccagcccaagcctcaggtccaactccatgtccagtcccagacccagcctgtgtctttggctaacacccagccccgagggcccccagcctcatctccggctccagcccctaagttttctccagtgactcctaagtttactcctgtggcttccaagttcagtcctggagccccaggtggatctgggtcacaaccaaatcaaaaattggggcaccccgaagctctttctgctggcacaggctcccctcaacctcccagcttcacctatgcccagcagagggagaagccccgagtgcaggagaagcagcaccccgtgcccccaccggctcagaaccaaaaccaggtg

SEQ ID NO: 17983 - protein, 184 aa, Homo sapiens
MTKNDPFKARVSSGYVPPPVATPFSSKSSTKPAAGGTAPLPPWKSPSSSQPLPQVPAPAQSQTQFHVQPQPQPKPQVQLHVQSQTQPVSLANTQPRGPPASSPAPAPKFSPVTPKFTPVASKFSPGAPGGSGSQPNQKLGHPEALSAGTGSPQPPSFTYAQQREKPRVQEKQHPVPPPAQNQNQ

SEQ ID NO: 17984 - DNA, 668 bp, Homo sapiens
ggtggggggatagaggcatggaataggtgctctgacctctgaccctctagcccagggagaaggtgagcagtattgatttggagatcgactctctgtcctcactgctggatgacatgaccaagaatgatcctttcaaagcccgggtgtcatctggatatgtgcccccaccagtggccactccattcagttccaagtccagtaccaagcctgcagccgggggcacagcacccctgcctccttggaagtccccttccagctcccagcctctgccccaggttccggctccggctcagagccagacacagttccatgttcagccccagccccagcccaagcctcaggtccaactccatgtccagtcccagacccagcctgtgtctttggctaacacccagccccgagggcccccagcctcatctccggctccagcccctaagttttctccagtgactcctaagtttactcctgtggcttccaagttcagtcctggagccccaggtggatctgggtcacaaccaaatcaaaaattggggcaccccgaagctctttctgctggcacaggctcccctcaacctcccagcttcacctatgcccagcagagggagaagccccgagtgcaggagaagcagcaccccgtgcccccaccggctcagaaccaaaaccaggtg

SEQ ID NO: 17985 - protein, 184 aa, Homo sapiens; identical to SEQ ID NO: 17983

SEQ ID NO: 17986 - DNA, 611 bp, Homo sapiens
cgtggtaggggatggggaaacaggagctgagagaagaggtcttcgaatggaggtgagccaacctctattttattagggtggtggtgggcaggggagcaagcaccttgggagcagctctacccactgcttgccctcttgcaggaaggtcctagtgggtgactggaagtaggatagggatggggagttgggtgtggctggaaaaagcgatgacaccagctctgagccatgaagcatctttctaattccaagatggagctggatggggtggggtagggtggagcagagcaggggccttccggtccagtgcccctcacccttccttcttcccaggactgcgggaagcccctgtcgattgaggcagatgacaatggctgcttccccctggacggtcacgtgctctgtcggaagtgccacactgctagagcccagacctgagtgaggacaggccctcttcagaccgcagtccatgccccattgtggaccacccacactgagaccacctgcccccacctcagttattgttttgatgtctagcccaggacattcccaccctcccccatgctgccaagttgtagctatagctacaaataaaaaaaaaccttgttttccag

SEQ ID NO: 17987 - protein, 47 aa, Homo sapiens
MPHCGPPTLRPPAPTSVIVLMSSPGHSHPPPCCQVVAIATNKKKPCF

SEQ ID NO: 17988 - DNA, 4227 bp, Homo sapiens
gcccccgcccggcccgcccggctctcctagtcccttgcaacctggcgctgccatccgggccactgtcccaggtcccggcccggagctatggagcggcgctggcccctggggctagggctggtgctgctgctctgcgccccgctgcccccgggggcgcgcgccaaggaagttactctgatggacacaagcaaggcacagggagagctgggctggctgctggatcccccaaaagatgggtggagtgaacagcaacagatactgaatgggacacccctgtacatgtaccaggactgcccaatgcaaggacgcagagacactgaccactggcttcgctccaattggatctaccgcggggaggaggcttcccgcgtccacgtggagctgcagttcaccgtgcgggactgcaagagtttccctgggggagccgggcctctgggctgcaaggagaccttcaaccttctgtacatggagagtgaccaggatgtgggcattcagctccgacggcccttgttccagaaggtaaccacggtggctgcagaccagagcttcaccattcgagaccttgtgtctggctccgtgaagctgaatgtggagcgctgctctctgggccgcctgacccgccgtggcctctacctcgctttccacaacccgggtgcctgtgtggccctggtgtctgtccgggtcttctaccagcgctgtcctgagaccctgaatggcttggcccaattcccagacactctgcctggccccgctgggttggtggaagtggcggggacctgcttgccccacgcgcgggccagccccaggccctcaggtgcaccccgcatgcactgcagccctgatggcgagtggctggtgcctgtaggacggtgccactgtgagcctggctatgaggaaggtggcagtggcgaagcatgtgttgcctgccctagcggctcctaccggatggacatggacacaccccattgtctcacgtgcccccagcagagcactgctgagtctgagggggccaccatctgtacctgtgagagcggccattacagagctcccggggagggcccccaggtggcatgcacaggtcccccctcggccccccgaaacctgagcttctctgcctcagggactcagctctccctgcgttgggaacccccagcagatacggggggacgccaggatgtcagatacagtgtgaggtgttcccagtgtcagggcacagcacaggacggggggccctgccagccctgtggggtgggcgtgcacttctcgccgggggcccgggggctcaccacacctgcagtgcatgtcaatggccttgaaccttatgccaactacacctttaatgtggaagcccaaaatggagtgtcagggctgggcagctctggccatgccagcacctcagtcagcatcagcatggggcatgcagagtcactgtcaggcctgtctctgagactggtgaagaaagaaccgaggcaactagagctgacctgggcggggtcccggccccgaagccctggggcgaacctgacctatgagctgcacgtgctgaaccaggatgaagaacggtaccagatggttctagaacccagggtcttgctgacagagctgcagcctgacaccacatacatcgtcagagtccgaatgctgaccccactgggtcctggccctttctcccctgatcatgagtttcggaccagcccaccagtgtccaggggcctgactggaggagagattgtagccgtcatctttgggctgctgcttggtgcagccttgctgcttgggattctcgttttccggtccaggagagcccagcggcagaggcagcagaggcagcgtgaccgcgccaccgatgtggatcgagaggacaagctgtggctgaagccttatgtggacctccaggcatacgaggaccctgcacagggagccctggactttacccgggagcttgatccagcgtggctgatggtggacactgtcataggagaaggagagtttggggaagtgtatcgagggaccctgaggctccccagccaggactgcaagactgtggccattaagaccttaaaagacacatccccaggtggccagtggtggaacttccttcgagaggcaactatcatgggccagtttagccacccgcatattctgcatctggaaggcgtcgtcacaaagcgaaagccgatcatgatcatcacagaatttatggagaatggagccctggatgccttcctgagggagcgggaggaccagctggtccctgggcagctagtggccatgctgcagggcatagcatctggcatgaactacctcagtaatcacaattatgtccaccgggacctggctgccagaaacatcttggtgaatcaaaacctgtgctgcaaggtgtctgactttggcctgactcgcctcctggatgactttgatggcacatacgaaacccagggaggaaagatccctatccgttggacagcccctgaagccattgcccatcggatcttcaccacagccagcgatgtgtggagctttgggattgtgatgtgggaggtgctgagctttggggacaagccttatggggagatgagcaatcaggaggttatgaagagcattgaggatgggtaccggttgccccctcctgtggactgccctgcccctctgtatgagctcatgaagaactgctgggcatatgaccgtgcccgccggccacacttccagaagcttcaggcacatctggagcaactgcttgccaacccccactccctgcggaccattgccaactttgaccccaggatgactcttcgcctgcccagcctgagtggctcagatgggatcccatatcgaaccgtctctgagtggctcgagtccatacgcatgaaacgctacatcctgcacttccactcggctgggctggacaccatggagtgtgtgctggagctgaccgctgaggacctgacgcagatgggaatcacactgcccgggcaccagaagcgcattctttgcagtattcagggattcaaggactgatccctcctctcaccccatgcccaatcagggtgcaaggagcaaggacggggccaaggtcgctcatggtcactccctgcgccccttcccacaacctgccagactaggctatcggtgctgcttctgcccactttcaggagaaccctgctctgcaccccagaaaacctctttgttttaaaagggaggtgggggtagaagtaaaaggatgatcatgggagggagctgaggggttaatatatatacatacatacacatatatatatttttgtaaataaacaggaactgattttctgcctccatcccacccatgagggctgcaggcactacaaaagagctgactactgagaattctggaaaacaaggtttttttttatttgtagctatagctacaacttggcagcatgggggagggtgggaatgtcctggagggtctcccagccctccgcaagcagagtacaaaggctgctcggggggccggccgagggcgcgggtgcagcagtgaaagcagcagcactaaacctggtgcccccctcaggtggggtgtctggaagacggtgggcaatccctgcaggatgggcgaggaccagaccccagggcggggatcctgcatccctagaccatgttgggtcctgggtcagggcacctgggatgctagggaggggttggaaatgggaggggctagacatcaaaacaataactgaggtgggggcaggtggtctcagtgtgggtggtccacaatggggcatggactgcggtctgaagagggcctgtcctcactcaggtctgggctctagcagtgtggcacttccgacagagcacgtgaccgtccagggggaagcagccattgtcatctgcctcaatcgacaggggcttcccgcagtcctgggaagaaggaagggtgaggggcactggaccggaaggcccctgctctgctccaccctaccccaccccatccagctccatcttggaattagaaagatgcttcatggctcagagctggtgtcatcgctttttccagccacacccaactccccatccctatcctacttccagtcacccactaggaccttcctgcaagagggcaagcagtgggtagagctgctcccaaggtgcttgctcccctgcccaccaccaccctaataaaatagaggttggctcacctccattcgaagacctcttctctcagctcctgtttccccatcccctaccacg

SEQ ID NO: 17989 - protein, 976 aa, Homo sapiens
MERRWPLGLGLVLLLCAPLPPGARAKEVTLMDTSKAQGELGWLLDPPKDGWSEQQQILNGTPLYMYQDCPMQGRRDTDHWLRSNWIYRGEEASRVHVELQFTVRDCKSFPGGAGPLGCKETFNLLYMESDQDVGIQLRRPLFQKVTTVAADQSFTIRDLVSGSVKLNVERCSLGRLTRRGLYLAFHNPGACVALVSVRVFYQRCPETLNGLAQFPDTLPGPAGLVEVAGTCLPHARASPRPSGAPRMHCSPDGEWLVPVGRCHCEPGYEEGGSGEACVACPSGSYRMDMDTPHCLTCPQQSTAESEGATICTCESGHYRAPGEGPQVACTGPPSAPRNLSFSASGTQLSLRWEPPADTGGRQDVRYSVRCSQCQGTAQDGGPCQPCGVGVHFSPGARGLTTPAVHVNGLEPYANYTFNVEAQNGVSGLGSSGHASTSVSISMGHAESLSGLSLRLVKKEPRQLELTWAGSRPRSPGANLTYELHVLNQDEERYQMVLEPRVLLTELQPDTTYIVRVRMLTPLGPGPFSPDHEFRTSPPVSRGLTGGEIVAVIFGLLLGAALLLGILVFRSRRAQRQRQQRQRDRATDVDREDKLWLKPYVDLQAYEDPAQGALDFTRELDPAWLMVDTVIGEGEFGEVYRGTLRLPSQDCKTVAIKTLKDTSPGGQWWNFLREATIMGQFSHPHILHLEGVVTKRKPIMIITEFMENGALDAFLREREDQLVPGQLVAMLQGIASGMNYLSNHNYVHRDLAARNILVNQNLCCKVSDFGLTRLLDDFDGTYETQGGKIPIRWTAPEAIAHRIFTTASDVWSFGIVMWEVLSFGDKPYGEMSNQEVMKSIEDGYRLPPPVDCPAPLYELMKNCWAYDRARRPHFQKLQAHLEQLLANPHSLRTIANFDPRMTLRLPSLSGSDGIPYRTVSEWLESIRMKRYILHFHSAGLDTMECVLELTAEDLTQMGITLPGHQKRILCSIQGFKD

SEQ ID NO: 17990 - DNA, 795 bp, Homo sapiens
agggacctgacgcagatgggaatcacactgcccgggcaccagaagcgcattctttgcagtattcagggattcaaggactgatccctcctctcaccccatgcccaatcagggtgcaaggagcaaggacggggccaaggtcgctcatggtcactccctgcgccccttcccacaacctgccagactaggctatcggtgctgcttctgcccactttcaggagaaccctgctctgcaccccagaaaacctctttgttttaaaagggaggtgggggtagaagtaaaaggatgatcatgggagggagctgaggggttaatatatatacatacatacacatatatatatttttgtaaataaacaggaactgattttctgcctccatcccacccatgagggctgcaggcactacaaaagagctgactactgagaattctggaaaacaagagcacgtgaccgtccagggggaagcagccattgtcatctgcctcaatcgacaggggcttcccgcagtcctgggaagaaggaagggtgaggggcactggaccggaaggcccctgctctgctccaccctaccccaccccatccagctccatcttggaattagaaagatgcttcatggctcagagctggtgtcatcgctttttccagccacacccaactccccatccctatcctacttccagtcacccactaggaccttcctgcaagagggcaagcagtgggtagagctgctcccaaggtgcttgctcccctgcccaccaccaccctaataaaatagaggttggctcacctccattcg

SEQ ID NO: 17991 - protein, 126 aa, Homo sapiens
MRAAGTTKELTTENSGKQEHVTVQGEAAIVICLNRQGLPAVLGRRKGEGHWTGRPLLCSTLPHPIQLHLGIRKMLHGSELVSSLFPATPNSPSLSYFQSPTRTFLQEGKQWVELLPRCLLPCPPPP

SEQ ID NO: 17992 - DNA, 1149 bp, Homo sapiens
tgctggatattttttcccccagcagatttactttgctaatggtttttggctctggcgagctttagtacaggaacactcattgtattgtgggtgtcagagtgcaagaataacagccgaagctgaaggtggtgaggaaggactgctcccggaactcaagcagccactatggaaaaaggcaggaccacgcccaggtgccaggcctctgttctcctactttcagcttcctctcagacaggagacttccatgtcttaaccagccctcagtcaggtgcccagaaccggccactccagcaggagaccggctggtgatccccttctgttggggcttcccaggacagtcccttcctataggcctgtcgacatagcaggactgtcagccagtccactgttgtgagcacaccaggaaacaggccaggaagtgggctcagagataatggtggggtcaatccacagtctagatgatctctgtgcccagacaccgaacttcagtgctggctgctgatgctcagaggccaaggccaaccagatcagcccatgtacccgctgtgactgacatgcccatgtcccacaggatgactcttcgcctgcccagcctgagtggctcagatgggatcccatatcgaaccgtctctgagtggctcgagtccatacgcatgaaacgctacatcctgcacttccactcggctgggctggacaccatggagtgtgtgctggagctgaccgctgaggacctgacgcagatgggaatcacactgcccgggcaccagaagcgcattctttgcagtattcagggattcaaggactgatccctcctctcaccccatgcccaatcagggtgcaaggagcaaggacggggccaaggtcgctcatggtcactccctgcgccccttcccacaacctgccagactaggctatcggtgctgcttctgcccactttcaggagaaccctgctctgcaccccagaaaacctctttgttttaaaagggaggtgggggtagaagtaaaaggatgatcatgggagggagctgaggggttaatatatatacatacatacacatatatatatttttgtaaataaacaggaactgattttctgcctccatcccacccatgagggctgcaggcactacaaaagagctgactactgag

SEQ ID NO: 17993 - protein, 115 aa, Homo sapiens
MISVPRHRTSVLAADAQRPRPTRSAHVPAVTDMPMSHRMTLRLPSLSGSDGIPYRTVSEWLESIRMKRYILHFHSAGLDTMECVLELTAEDLTQMGITLPGHQKRILCSIQGFKD

SEQ ID NO: 17994 - DNA, 3361 bp, Homo sapiens
gcccccgcccggcccgcccggctctcctagtcccttgcaacctggcgctgccatccgggccactgtcccaggtcccggcccggagctatggagcggcgctggcccctggggctagggctggtgctgctgctctgcgccccgctgcccccgggggcgcgcgccaaggaagttactctgatggacacaagcaaggcacagggagagctgggctggctgctggatcccccaaaagatgggtggagtgaacagcaacagatactgaatgggacacccctgtacatgtaccaggactgcccaatgcaaggacgcagagacactgaccactggcttcgctccaattggatctaccgcggggaggaggcttcccgcgtccacgtggagctgcagttcaccgtgcgggactgcaagagtttccctgggggagccgggcctctgggctgcaaggagaccttcaaccttctgtacatggagagtgaccaggatgtgggcattcagctccgacggcccttgttccagaaggtaaccacggtggctgcagaccagagcttcaccattcgagaccttgtgtctggctccgtgaagctgaatgtggagcgctgctctctgggccgcctgacccgccgtggcctctacctcgctttccacaacccgggtgcctgtgtggccctggtgtctgtccgggtcttctaccagcgctgtcctgagaccctgaatggcttggcccaattcccagacactctgcctggccccgctgggttggtggaagtggcggggacctgcttgccccacgcgcgggccagccccaggccctcaggtgcaccccgcatgcactgcagccctgatggcgagtggctggtgcctgtaggacggtgccactgtgagcctggctatgaggaaggtggcagtggcgaagcatgtgttgcctgccctagcggctcctaccggatggacatggacacaccccattgtctcacgtgcccccagcagagcactgctgagtctgagggggccaccatctgtacctgtgagagcggccattacagagctcccggggagggcccccaggtggcatgcacaggtcccccctcggccccccgaaacctgagcttctctgcctcagggactcagctctccctgcgttgggaacccccagcagatacggggggacgccaggatgtcagatacagtgtgaggtgttcccagtgtcagggcacagcacaggacggggggccctgccagccctgtggggtgggcgtgcacttctcgccgggggcccgggggctcaccacacctgcagtgcatgtcaatggccttgaaccttatgccaactacacctttaatgtggaagcccaaaatggagtgtcagggctgggcagctctggccatgccagcacctcagtcagcatcagcatggggcatgcagagtcactgtcaggcctgtctctgagactggtgaagaaagaaccgaggcaactagagctgacctgggcggggtcccggccccgaagccctggggcgaacctgacctatgagctgcacgtgctgaaccaggatgaagaacggtaccagatggttctagaacccagggtcttgctgacagagctgcagcctgacaccacatacatcgtcagagtccgaatgctgaccccactgggtcctggccctttctcccctgatcatgagtttcggaccagcccaccagtgtccaggggcctgactggaggagagattgtagccgtcatctttgggctgctgcttggtgcagccttgctgcttgggattctcgttttccggtccaggagagcccagcggcagaggcagcagaggcagcgtgaccgcgccaccgatgtggatcgagaggacaagctgtggctgaagccttatgtggacctccaggcatacgaggaccctgcacagggagccctggactttacccgggagcttgatccagcgtggctgatggtggacactgtcataggagaaggagagtttggggaagtgtatcgagggaccctgaggctccccagccaggactgcaagactgtggccattaagaccttaaaagacacatccccaggtggccagtggtggaacttccttcgagaggcaactatcatgggccagtttagccacccgcatattctgcatctggaaggcgtcgtcacaaagcgaaagccgatcatgatcatcacagaatttatggagaatggagccctggatgccttcctgagggagcgggaggaccagctggtccctgggcagctagtggccatgctgcagggcatagcatctggcatgaactacctcagtaatcacaattatgtccaccgggacctggctgccagaaacatcttggtgaatcaaaacctgtgctgcaaggtgtctgactttggcctgactcgcctcctggatgactttgatggcacatacgaaacccagggaggaaagatccctatccgttggacagcccctgaagccattgcccatcggatcttcaccacagccagcgatgtgtggagctttgggattgtgatgtgggaggtgctgagctttggggacaagccttatggggagatgagcaatcaggaggttatgaagagcattgaggatgggtaccggttgccccctcctgtggactgccctgcccctctgtatgagctcatgaagaactgctgggcatatgaccgtgcccgccggccacacttccagaagcttcaggcacatctggagcaactgcttgccaacccccactccctgcggaccattgccaactttgaccccaggatgactcttcgcctgcccagcctgagtggctcagatgggatcccatatcgaaccgtctctgagtggctcgagtccatacgcatgaaacgctacatcctgcacttccactcggctgggctggacaccatggagtgtgtgctggagctgaccgctgaggacctgacgcagatgggaatcacactgcccgggcaccagaagcgcattctttgcagtattcagggattcaaggactgatccctcctctcaccccatgcccaatcagggtgcaaggagcaaggacggggccaaggtcgctcatggtcactccctgcgccccttcccacaacctgccagactaggctatcggtgctgcttctgcccactttcaggagaaccctgctctgcaccccagaaaacctctttgttttaaaagggaggtgggggtagaagtaaaaggatgatcatgggagggagctgaggggttaatatatatacatacatacacatatatatatttttgtaaataaacaggaactgattttctgcctccatcccacccatgagggctgcaggcactacaaaagagctgactactgag

SEQ ID NO: 17995 - protein, 976 aa, Homo sapiens; identical to SEQ ID NO: 17989

SEQ ID NO: 17996 - DNA, 694 bp, Homo sapiens
gggagagctgggctggctgctggatcccccaaaagatgggtggagtgaacagcaacagatactgaatgggacacccctgtacatgtaccaggactgcccaatgcaaggacgcagagacactgaccactggcttcgctccaattggatctaccgcggggaggaggcttcccgcgtccacgtggagctgcagttcaccgtgcgggactgcaagagtttccctgggggagccgggcctctgggctgcaaggagaccttcaaccttctgtacatggagagtgaccaggatgtgggcattcagctccgacggcccttgttccagaaggtgctgcttccctccatgccatctgggtcctggtgcagatccctggtggctccttattgggtgccagagaaggttgcagagacaggaagagggtgcagaggtagaatcttgaaaagaatttggcgcttgaaggctgggcatggtggcttgtgcctgtaattccagtgctttgggaaaccgatgtgggaagatcacttgaggccaggagcttgagaccagcctgggcaacatagcaaaacttcatctctgcaaaaaattaaaaatcacctgggcatggtggcccatacctgtagtcccagcgactcaggaggctgaggcaggaggatcacttgagcccaggagtttgaggctgcagtgatctatgattgtgcc

SEQ ID NO: 17997 - protein, 132 aa, Homo sapiens
MYQDCPMQGRRDTDHWLRSNWIYRGEEASRVHVELQFTVRDCKSFPGGAGPLGCKETFNLLYMESDQDVGIQLRRPLFQKVLLPSMPSGSWCRSLVAPYWVPEKVAETGRGCRGRILKRIWRLKAGHGGLCL

SEQ ID NO: 17998 - DNA, 1079 bp, Homo sapiens
ggggagaaaaagggctcaggactgaggagtgaagagctccagggatttcactcttctttgtgtgtgtgaaggaaggcaggtttatttgcaagatgggtttgagggaattaaggataaagtctgctgaaagtagcaccagcctctggattaaaagggatgtttggatgaagcttcaatctcaagaagaggcaagagaaaactaaagaaaaaggtaagagagccgggtgtggtggcgggcgcctataatcccagctactcagcctcccaagtagctgggattacaggcatgtgccaccatgcctggctacctttttgtatttttagtagagacagggtttctctatgttggtcaggctggtctggtcaggctggtctatgaactgccgacctcaggtgatccgcccgcctcggcctcccaaagtgctgggattacaggtgtgagccaccgcacctggctctgattaagtcttcttacactgaagctgctgtgttgtctgaacagagcctcaattaagaagtgactgaagcttttcccctccctccctctcttcctttcttccttcctttcttctttgtttcaacagttctggggaagtactaaatattagaccaaaattaaaacctgatacccaccgtactgagtgtttgcttagaaagttcttgtttgtttttgagaagcactaggagttaatggaatgggtatttagtggcctttggattctgtagactcctagctctctgcctcctatgtgtaaggccttggacatttctcttaacctctctgagactgagcttcttcacatgcaaatggactcatttaccttccaggagcacctctgtgggagggggatgcaccatgtgaaagaggtaagccctaaggtggaggcagaagcaagtggccaagggaatacaggaggctaattttgacaggaactgtatgggaaaaggtggcctttgtgttgagcctagtagaatgacttcaataggcagtttttattcattcattcaacaaaaatttattgagatcttattatgagtcaggcactgttctaagtgctggggatataccagcaaacaac

SEQ ID NO: 17999 - protein, 57 aa, Homo sapiens [sequence omitted]

SEQ ID NO: 18000 - DNA, 483 bp, Homo sapiens
ctgaggagtgaagagctccagggatttcactcttctttgtgtgtgtgaaggaaggcaggtttatttgcaagatgggtttgagggaattaaggataaagtctgctgaaagtagcaccagcctctggattaaaagggatgtttggatgaagcttcaatctcaagaagaggcaagagaaaactaaagaaaaagagacaagaaggtagttgacaagctgtgaacctgcattgcattctagtgatgggacacgtggaaggggaagctgaagttgaagggtggatggtagcagccacagggagtgagatgggctcgtttctggagctgttgggagagaaaaagggagtcaaacgggaattcacacagggttgtgcattatatccaagtgtgtattcagatacaagcctttatctcaataccttccttacccccattccgcacatatctcataccaaagtacaaataaaaccattcccaattgttctaat

SEQ ID NO: 18001 - protein, 80 aa, Homo sapiens
MGHVEGEAEVEGWMVAATGSEMGSFLELLGEKKGVKREFTQGCALYPSVYSDTSLYLNTFLTPIPHISHTKVQIKPFPIV

SEQ ID NO: 18002 - DNA, 957 bp, Homo sapiens; identical to SEQ ID NO: 2149

SEQ ID NO: 18003 - protein, 318 aa, Homo sapiens; identical to SEQ ID NO: 2150

SEQ ID NO: 18004 - DNA, 922 bp, Homo sapiens
atgcaagcagcactgacggccttcttcgtgttgctctttagcctgctgagtcttctggggattgcagcgaatggcttcattgtgctggtgctgggcagggagtggctgcgatatggcaggttgctgcccttggatatgatcctcattagcttgggtgcctcccgcttctgcctgcagttggttgggacggtgcacaacttctactactctgcccagaaggtcgagtactctgggggtctcggccgacagttcttccatctacactggcacttcctgaactcagccaccttctggttttgcagctggctcagtgtcctgttctgtgtgaagattgctaacatcacacactccaccttcctgtggctgaagtggaggttcccagggtgggtgccctggctcctgttgggctctgtcctgatctccttcatcataaccctgctgtttttttgggtgaactaccctgtatatcaagaatttttaattagaaaattttctgggaacatgacctacaagtggaatacaaggatagaaacatactatttcccatccctgaaactggtcatctggtcaattcctttttctgtttttctggtctcaattatgctgttaattaattctctgaggaggcatactcagagaatgcagcacaacgggcacagcctgcaggaccccagcacccaggctcacaccagagctctgaagtccctcatctccttcctcattctttatgctctgtcctttctgtccctgatcattgatgccgcaaaatttatctccatgcagaacgacttttactggccatggcaaattgcagtctacctgtgcatatctgtccatcccttcatcctcatcttcagcaacctcaagcttcgaagcgtgttctcgcagctcctgttgttggcaaggggcttctgggtggcct

SEQ ID NO: 18005 - protein, 306 aa, Homo sapiens
MQAALTAFFVLLFSLLSLLGIAANGFIVLVLGREWLRYGRLLPLDMILISLGASRFCLQLVGTVHNFYYSAQKVEYSGGLGRQFFHLHWHFLNSATFWFCSWLSVLFCVKIANITHSTFLWLKWRFPGWVPWLLLGSVLISFIITLLFFWVNYPVYQEFLIRKFSGNMTYKWNTRIETYYFPSLKLVIWSIPFSVFLVSIMLLINSLRRHTQRMQHNGHSLQDPSTQAHTRALKSLISFLILYALSFLSLIIDAAKFISMQNDFYWPWQIAVYLCISVHPFILIFSNLKLRSVFSQLLLLARGFWV

SEQ ID NO: 18006 - DNA, 907 bp, Homo sapiens
ggtgtttagccaaggactcaaagactgatttctggaaccattttcctgtgtagcttatttttccctctaatctccgcatccttcactgagcaagatttccaggtactagattctgaggtctgagactaaagtcattccatcatgagttccaaactggacttgagaggggaagaatcatttcctttgagattgaccaataccaggagtttcactaaagaaggcaatgaaagacccacagccttggacataattgatttcctgtgatatctgtgtgggcccaggcatgctgctcacctgggtctttcccctctttcactcctttggaactgccccaccactaaccactttcctactctctccttccccaccccagtatctccttgcctcaagagtttcctgttactagcaataatttagttcactcccagggaactactatttctggttctcagttactaacctttccattcagttctttccattccatttttaccagaattaacgtttcctcatctttcccagtgaatgtaaaaggtaccttctgggaagcattttaccggaactgatgactgctatgcttgacagcagcttcaacagcctcggatacaactcatcatgaattagctctggcatgactgagttagaatactgttctgtttcctatctctacatgtaggaaaaatttaaagtggcatttctatgctttggtcttttctcataaatgacttaggggaaaacacttaatgaggatgagtaactaaaattcaatgaatactaaaagctttataagaatcatctaattgaaactttacataatttccttattatgtattaacattgaacgggcattatgcattccatttctagaaaagaagtctttccttaataaattacaagtgcaaacatg

SEQ ID NO: 18007 - protein, 40 aa, Homo sapiens
MSSKLDLRGEESFPLRLTNTRSFTKEGNERPTALDIIDFL

SEQ ID NO: 18008 - DNA, 930 bp, Homo sapiens
atgcgtacccgacaagctctgccctcctgtgcctctcttctacaggtgcctgtgggcgggctcgtgcatggacagtcccagcaatgccaccgtgccctgtggctttctccttcaaggcttctccgaattcccgcacctgagacccgtgctcttccttttgctgctgggggtgcacctggccaccctgggcgggaacctgctcatcctggtggccgtggcctcgatgccaagccggcagcccatgctgctcttcctgtgccagctatgcagatgtttgtggctctgggcggggccgagtgcttcctgctggccgccatggcctatgaccgctacgtggccatctgccacccgttgcgctacgcggccgtggtgacccccgggctgtgcgcgcgactggctctggcctgctgcctcaggggactggcggtgtccgtggggctcacggtggccatcttccacctgcctttctgcggctcccgcctgctgctgcacttcttctgcgacatcacggcgctgctgcacctggcctgcacgcggagctacgccgacgagctgcctctgctgggcgcctgcctggtgctgctgctgctgccctcggtgctcatcctggcctcctatggcgccatcgccgccgccctgcgccgcctgcgctgccccaaaggccggggcaaggccgcctccacctgcgccttgcacctggcagtcaccttcctgcactacggctgcgccaccttcatgtacgtgcggcccagggccagctactccccgcgcctggaccgcaccctggcgctggtctacaccaacgtcacgccgctgctgtgcccactcatctacagcctgcgcaaccgcgagatcaccgccgccctgagcagggtgctggggcgccggcggccaggccaagctccaggcggggatctgcgcgagctctga

SEQ ID NO: 18009 - protein, 309 aa, Homo sapiens
MRTRQALPSCASLLQVPVGGLVHGQSQQCHRALWLSPSRLLRIPAPETRALPFAAGGAPGHPGREPAHPGGRGLDAKPAAHAALPVPAMQMFVALGGAECFLLAAMAYDRYVAICHPLRYAAVVTPGLCARLALACCLRGLAVSVGLTVAIFHLPFCGSRLLLHFFCDITALLHLACTRSYADELPLLGACLVLLLLPSVLILASYGAIAAALRRLRCPKGRGKAASTCALHLAVTFLHYGCATFMYVRPRASYSPRLDRTLALVYTNVTPLLCPLIYSLRNREITAALSRVLGRRRPGQAPGGDLREL

SEQ ID NO: 18010 - DNA, 4974 bp, Homo sapiens
atgagcagagcagaattaatgctgagtccctctgccacccctccaacaagtctccatacccattgtgaagatgacctctccgacgacagagaagagcttctgcatgggatttcagagctggacatcagcaactcggattgtttcccatcccagctgctagtgcatggggctttagcctttcctctagggttagattcctaccatggctgtgttatagcggctgcccgctatggccggggccgggtggttgtgactggccataaggtattattcactgttggtaaactgggcccctttctgctcaatgctgtccgctggctggatgggggccgcagaggcaagattgtggtgcagacagagctgagaaccctgagtggcctcctcgcagtggggggcatagacaccagcatcgagcccaatctgaccagtgatgcaagtgtctactgctttgaacccgtgagtgaagtgggggtcaaggaactgcaggagtttgtagcagagggtggcgggctatttgttggagcccaagcctggtggtgggccttcaagaaccccggagtgtcccctttggctcgattcccaggaaacctcctcctcaacccctttggcatcagcattacaagccaaagcctcaatccagggccctttcgtactcctaaagcagggataaggacctatcacttccgctccaccttggccgagttccaggttataatgggcaggaagagaggaaatgtggaaaagggctggttggcaaagctgggaccagatggtgcagctttcctgcagattcccgcagaagagatccctgcctacatgtctgtgcatcgactcctgaggaagctgctaagtcgatatcggcttccagtagcaacccgagagaaccctgttatcaatgactgctgcagaggtgctatgctttccctggccacagggctggcccactctggaagcgacctctctctgttagtcccagaaattgaagatatgtacagcagcccctatctgcgcccctcagaatctcctatcaccgtcgaggtcaactgcaccaatccaggcaccagatattgctggatgagtactgggctctacatacctggaaggcaaattatagaagtctcactgcctgaagctgctgcctctgccgacctgaagatacagattggctgccacacagatgacctgaccagggccagcaagcttttccgaggcccactcgtaattaaccggtgctgcttggacaaacccacaaaatcgatcacgtgcctctggggtggactcctctatataattgtgcctcagaacagcaaactgggttctgtgcctgtcaccgtgaagggggctgtgcatgctccatactacaagctgggggagaccaccctggaggagtggaagaggcgtatccaggagaatccagggccctggggagagctggccacggacaacatcattctgaccgtgccgaccgcaaatcttcgtactctggagaaccctgagccgctgctccgcctctgggatgaggtgatgcaggctgtggcgcgactgggagctgagcccttccctttgcgcctgcctcagaggattgttgccgacgtgcagatctcagtgggctggatgcatgcagggtaccccatcatgtgccatctggagtcagtgcaggagctcatcaacgagaagctcatcagaaccaaggggctgtggggccccgtccatgagctgggccgcaaccagcagcggcaggagtgggagttcccaccacacaccaccgaggccacctgcaacctgtggtgtgtgtatgtgcatgagacggtcttgggcattcctcgaagccgtgccaatattgctctgtggcccccagttcgggagaagagagtcagaatctacctgagcaagggtcccaatgtgaaaaactggaatgcatggaccgcactggaaacgtatttacagctccaggaagcctttggttgggagccattcatccgtctcttcaccgagtacaggaaccagaccaacttgcccacagaaaatgttgacaaaatgaatctgtgggtcaagatgttctcccaccaagtgcagaagaacctggctccgttctttgaggcctgggcctggcccatccagaaggaagtggctaccagcctggcctatctgcctgaatggaaggaaaatattatgaaattgtacctcctcacacagatgccccactgaaattgaagtcaagaaatgcaaaaaggaactgacacatctcagcaaagaaaactgaagggatttggttataagtggagaggatctcagcatatttctggaagatagaaagtggatgaagcatgataatgaaagagtgaagaacctttcagataaaatgtaagctgatctgaacaacataaccccaaagagacttgcgcacctgaaaagcttgtctactgaagaattactccagttgtaagattgagccctctcctactctcccccaactcttatgcacagaacacaggcagtctccactattgataccagttaaaaatttcttgttattgttgctgttgttgtttgtataaaggaattgaacaggctgcttgcagagagataagagttggtgctccagaaaaaaatttctcttctagtggaaataagtgcccctacccccagccggtcagctaattctctactgacagctgagacctcctactcaagtgcctgttgccttcaggtatagaagaggtttcctgaagaaacagacctaactgtacaacagcagaggaaacccatgccaactgttatacaagttaacagttatgttgattcttaaatgggaatggtgagttagaaattcccagacatgggcgatggggagggaagaggaataagaaaagtcacgaggtagaattaggggccttgaaaatatgacaaactctgagggaaacaaagacaatgtggaaagaataacttaattttaattccatctccagagagatttgaggtgtatttaagatgaaaaacaggatactacaaagaaacggaaaactcaggagttcgagaccagcctaggcaagatggcaacatcccgtctctacaaaataatttttaaaaattagccaagcatggtggcatgtgcctgtggtcctagctacttgggaggctgaagtgggaagatcacttgagcccaggagttcaaggcttcagtgggccatgatggtgccactgcactccagcctgggggacagagtgagaccctgtctcttaaaaagcaagaaaagaaagagaagactgagaataagaagatctctttgaaaataaaataagactgctaaaagtatttggtatacagtctggaaaataaagttgagggaatctctccagataaagagcaaaaagaaatagatagaaaaatataaagaaagaaaaaagacatagacaatcaatatgtaatgttaggagttcctggaagagagaacagagacagtgtaggtgaagaaataaaaagaaaaagaattgaagaacagagcaagctaagtctccagattgagagggcccaatacaatctacatctagacacaatattgtaaaattttggaatattaaggatagaaggaagatattaaagtggccagggagaaaacaaatgaggtcatcacgattagctcaacacaaaaatggatgagaaatagactgctaacagatttgtcatcagcaacactgaatgccagaagtcaatggatcaacatcttcagagcttatggaaaatttttgtacctagaatttcatagtaaggcagactgtcaagaagaacatcaaagtgaagacattttctgtcaggcaaattttcagaaagtctccctcctttgcacccttactgaggaagtatcttgaggaaattctccagcaaaatgaggatgaaaaccaggaaagaagaagaaatgggatccataaaacagtggaccttacttaggatgtctcattctagagtgacagccaaaagggtatctcaccctagagtgacagctatccagcagactaatttcagatgagagcatactgtctcgggctttctgggaagaatgtgcattcagtgccatagatagtatcattgaagagctgggatgcttgagaagattatttagtcaagaaaaaagaaagacaaatcaacaatatgtcaaaaaattcaggtccaattatagagcaaaataaaatgaggcatgattttgagttattcatgaagaataagaagaggcttcataggtacatttccttttctatggcacaggcatgatgatattgggtgtgtagggaagaaaatatcctagcttatactaggctcccagtaagaagtatttaaatagccaaaataatgtggatatcatttattagtattcagtgttcagatcagcctattaacaaagtgtgaaaggtttcattttttattcagaactgaagttgaaagtaattaatgctgacaaagggaaagaaagcagaaagagattgagaattagaggaagagaagtggaatcaaaggtagagatacttatatattcaaagtggggatgaaaagatcttcagttaatggaacaagaactagaggattagtgtattgttcaaagctataaaatcaaaccaatagatgtattaaaaagtgatgtaactatcagacatttggagagagatggacaaaggaaagtggcgatagtgtaagttaaatccttatcttttgtaatggggaattattaaagatgttgtaaagtcagtaagtcaagaaattattgctcaaacatattatttaaagttagaaagttagttaccagacgatctaaaataaatattgttaaaagcattacctctagggaatgggatttagatttaaaaagggtgggatgggaaactgtgtttttcattttaagtccttctgtactatttaattttttaccttgtgcatgtattactttgaaaaaatttttaataaacccaaataaaaatctt

SEQ ID NO: 18011 - protein, 735 aa, Homo sapiens
MSRAELMLSPSATPPTSLHTHCEDDLSDDREELLHGISELDISNSDCFPSQLLVHGALAFPLGLDSYHGCVIAAARYGRGRVVVTGHKVLFTVGKLGPFLLNAVRWLDGGRRGKIVVQTELRTLSGLLAVGGIDTSIEPNLTSDASVYCFEPVSEVGVKELQEFVAEGGGLFVGAQAWWWAFKNPGVSPLARFPGNLLLNPFGISITSQSLNPGPFRTPKAGIRTYHFRSTLAEFQVIMGRKRGNVEKGWLAKLGPDGAAFLQIPAEEIPAYMSVHRLLRKLLSRYRLPVATRENPVINDCCRGAMLSLATGLAHSGSDLSLLVPEIEDMYSSPYLRPSESPITVEVNCTNPGTRYCWMSTGLYIPGRQIIEVSLPEAAASADLKIQIGCHTDDLTRASKLFRGPLVINRCCLDKPTKSITCLWGGLLYIIVPQNSKLGSVPVTVKGAVHAPYYKLGETTLEEWKRRIQENPGPWGELATDNIILTVPTANLRTLENPEPLLRLWDEVMQAVARLGAEPFPLRLPQRIVADVQISVGWMHAGYPIMCHLESVQELINEKLIRTKGLWGPVHELGRNQQRQEWEFPPHTTEATCNLWCVYVHETVLGIPRSRANIALWPPVREKRVRIYLSKGPNVKNWNAWTALETYLQLQEAFGWEPFIRLFTEYRNQTNLPTENVDKMNLWVKMFSHQVQKNLAPFFEAWAWPIQKEVATSLAYLPEWKENIMKLYLLTQMPH

SEQ ID NO: 18012 - DNA, 2975 bp, Homo sapiens
cctccgacccgtcccccgcgcgccactgcagagcctgtccgtcagtccctaggtatccgcactgctcagggcagctgatagaaccatggcgaccattgctgctgctgcgtttgaggccctcatggatggagtgacatgctgggatgtccccagaggccccatccccagtgaactccttcttattggagaagccgccttccccgtgatggtgaatgacaagggccaggtgctcattgctgcctcctcctacggccgaggccgcctcgtggttgtgtcccatgagggctacctgtcgcatactggcttggctccatttctcctcaatgcagtgagctggctctgtccctgtcctggggctcccgtgggagtgcatccatccctggcacctctagtaaacatcctacaggatgctgggcttgaggcacaggtcaagccagaaccaggagagcccctaggggtttactgtatcaatgcctacaatgacaccttgactgcaacgctgatccagtttgtgaaacatggagggggcttgttaatcgggggccaggcctggtactgggccagccagcacggccctgacaaggtgctctccaggttccctgggaacaaggtgacaagtgtagctggagtgtacttcactgacacctatggggacagagaccggttcaaggtctctaagaaggtgcccaagatcccactccatgtcaggtatggggaggatgtcaggcaggaccagcagcagctcctggaggggatctcagagctggacatcaggacagggggagtcccctcacagctgcttgtacatggagccctggccttccctctggggctggatgcctcactcaactgcttcctggcggctgctcactatggccggggccgggtggtcctggctgcccacgagtgcctgctctgtgctcccaagatggggcccttcttgctcaatgcggtgcgctggctggccagaggccagacaggcaaagttggggtgaacacaaatctaaaagatctgtgtcctctcctatcggagcatggcctgcaatgcagcctggagccccatctgaacagcgacttgtgtgtctactgctgcaaggcgtacagtgacaaggaggctaagcagctgcaggagtttgtggctgagggtggggggctgctgattgggggccaggcctggtggtgggcctcccagaaccctggccactgccccttggctggcttccctggtaacatcatcctcaactgctttggcctcagcatcctgcctcagactctcaaagcaggctgcttccccgttcccacccctgagatgagaagctaccacttccgcaaggcgctctctcaattccaggctatactgaaccacgagaatgggaacttggaaaagagctgtctggcaaagttgagagttgatggtgcagccttcctacagattcctgcggagggggtccctgcttacatatccctgcacaggctcctgaggaagatgctacgagggtctggcctcccagctgtgagccgggaaaatccagttgccagtgactcctatgaggctgcggtgctctccctggccactgggctggctcactctggaactgactgctcccagctggcccaggggcttggcacctggacctgctcctccagtttgtacccctcaaaacaccccatcaccgtggagatcaatggaatcaacccaggcaacaatgattgctgggtgagtaccgggctctacctcctggaaggacaaaatgcagaagtctcactgtctgaagctgctgcctctgctggcctgagggtacagataggctgccacaccgatgaccttaccaaggccaggaagctatctcgagcccccgtggtgactcaccaatgctggatggacaggactgagcggtcagtctcctgcctctggggcggcctcctctacgtcatcgtgcccaagggcagccaactaggccctgtgcctgtcactatcaggggagctgtgcctgccccatactacaagctgggtaagacatcgctggaggagtggaagaggcagatgcaggagaacctggctccctggggagagctggccacggacaacatcatcctgacagtgccaaccacaaaccttcaggccctgaaggaccccgagcctgtgctccgcctctgggatgagatgatgcaggctgtggccaggctggcggctgagcccttccctttccgccgtcctgagaggattgtggctgatgtgcagatctcagctggctggatgcattcaggataccccatcatgtgccacctggagtctgtgaaggagatcatcaatgagatggacatgaggagcaggggtgtgtggggccccatccatgagctgggccacaaccaacagcggcatggatgggagttccccccacacactactgaggccacctgtaacctttggtcagtctacgtgcatgaaacagtcctggggatccccagggctcaggcccacgaggctctgagccctccagagcgagagaggagaatcaaggcccacctgggaaagggagcccccctgtgtgactggaatgtatggacagccctggaaacatatctacaggtactgagcagaaattctgggagaaggggatgaccagacccctcagtcatgtagcgacctggatcccagtagccctccacctccttcgccactccaccagcctggacctccacctcccctggaaatgagagggactgggccgcagggtggtgcttcttgggttatacccctctaaggcagagagaatggcacctgtctcactcaccttctgattttgcaatgtaagaggaaatgaaaaatattatgaaaaaaatagaaatatagcatattattcaagggcagaaactctgttagacattcctgcagctgaatcacagctcttgccctcattggttttgttcttggtctcctaataagtgttccataaatggtcattgctttgttt

SEQ ID NO: 18013 - protein, 845 aa, Homo sapiens
MATIAAAAFEALMDGVTCWDVPRGPIPSELLLIGEAAFPVMVNDKGQVLIAASSYGRGRLVVVSHEGYLSHTGLAPFLLNAVSWLCPCPGAPVGVHPSLAPLVNILQDAGLEAQVKPEPGEPLGVYCINAYNDTLTATLIQFVKHGGGLLIGGQAWYWASQHGPDKVLSRFPGNKVTSVAGVYFTDTYGDRDRFKVSKKVPKIPLHVRYGEDVRQDQQQLLEGISELDIRTGGVPSQLLVHGALAFPLGLDASLNCFLAAAHYGRGRVVLAAHECLLCAPKMGPFLLNAVRWLARGQTGKVGVNTNLKDLCPLLSEHGLQCSLEPHLNSDLCVYCCKAYSDKEAKQLQEFVAEGGGLLIGGQAWWWASQNPGHCPLAGFPGNIILNCFGLSILPQTLKAGCFPVPTPEMRSYHFRKALSQFQAILNHENGNLEKSCLAKLRVDGAAFLQIPAEGVPAYISLHRLLRKMLRGSGLPAVSRENPVASDSYEAAVLSLATGLAHSGTDCSQLAQGLGTWTCSSSLYPSKHPITVEINGINPGNNDCWVSTGLYLLEGQNAEVSLSEAAASAGLRVQIGCHTDDLTKARKLSRAPVVTHQCWMDRTERSVSCLWGGLLYVIVPKGSQLGPVPVTIRGAVPAPYYKLGKTSLEEWKRQMQENLAPWGELATDNIILTVPTTNLQALKDPEPVLRLWDEMMQAVARLAAEPFPFRRPERIVADVQISAGWMHSGYPIMCHLESVKEIINEMDMRSRGVWGPIHELGHNQQRHGWEFPPHTTEATCNLWSVYVHETVLGIPRAQAHEALSPPERERRIKAHLGKGAPLCDWNVWTALETYLQVLSRNSGRRG

SEQ ID NO: 18014 - DNA, 2333 bp, Homo sapiens
gacccgtcccccgcgcgccactgcagagcctgtccgtcagtccctaggtatccgcactgctcaggggtatggggaggatgtcaggcaggaccagcagcagctcctggaggggatctcagagctggacatcaggacagggggagtcccctcacagctgcttgtacatggagccctggccttccctctggggctggatgcctcactcaactgcttcctggcggctgctcactatggccggggccgggtggtcctggctgcccacgagtgcctgctctgtgctcccaagatggggcccttcttgctcaatgcggtgcgctggctggccagaggccagacaggcaaagttggggtgaacacaaatctaaaagatctgtgtcctctcctatcggagcatggcctgcaatgcagcctggagccccatctgaacagcgacttgtgtgtctactgctgcaaggcgtacagtgacaaggaggctaagcagctgcaggagtttgtggctgagggtggggggctgctgattgggggccaggcctggtggtgggcctcccagaaccctggccactgccccttggctggcttccctggtaacatcatcctcaactgctttggcctcagcatcctgcctcagactctcaaagcaggctgcttccccgttcccacccctgagatgagaagctaccacttccgcaaggcgctctctcaattccaggctatactgaaccacgagaatgggaacttggaaaagagctgtctggcaaagttgagagttgatggtgcagccttcctacagattcctgcggagggggtccctgcttacatatccctgcacaggctcctgaggaagatgctacgagggtctggcctcccagctgtgagccgggaaaatccagttgccagtgactcctatgaggctgcggtgctctccctggccactgggctggctcactctggaactgactgctcccagctggcccaggggcttggcacctggacctgctcctccagtttgtacccctcaaaacaccccatcaccgtggagatcaatggaatcaacccaggcaacaatgattgctgggtgagtaccgggctctacctcctggaaggacaaaatgcagaagtctcactgtctgaagctgctgcctctgctggcctgagggtacagataggctgccacaccgatgaccttaccaaggccaggaagctatctcgagcccccgtggtgactcaccaatgctggatggacaggactgagcggtcagtctcctgcctctggggcggcctcctctacgtcatcgtgcccaagggcagccaactaggccctgtgcctgtcactatcaggggagctgtgcctgccccatactacaagctgggtaagacatcgctggaggagtggaagaggcagatgcaggagaacctggctccctggggagagctggccacggacaacatcatcctgacagtgccaaccacaaaccttcaggccctgaaggaccccgagcctgtgctccgcctctgggatgagatgatgcaggctgtggccaggctggcggctgagcccttccctttccgccgtcctgagaggattgtggctgatgtgcagatctcagctggctggatgcattcaggataccccatcatgtgccacctggagtctgtgaaggagatcatcaatgagatggacatgaggagcaggggtgtgtggggccccatccatgagctgggccacaaccaacagcggcatggatgggagttccccccacacactactgaggccacctgtaacctttggtcagtctacgtgcatgaaacagtcctggggatccccagggctcaggcccacgaggctctgagccctccagagcgagagaggagaatcaaggcccacctgggaaagggagcccccctgtgtgactggaatgtatggacagccctggaaacatatctacaggtactgagcagaaattctgggagaaggggatgaccagacccctcagtcatgtagcgacctggatcccagtagccctccacctccttcgccactccaccagcctggacctccacctcccctggaaatgagagggactgggccgcagggtggtgcttcttgggttatacccctctaaggcagagagaatggcacctgtctcactcaccttctgattttgcaatgtaagaggaaatgaaaaatattatgaaaaaaatagaaatatagcatattattcaagggcagaaactctgttagacattcctgcagctgaatcacagctcttgccctcattggttttgttcttggtctcctaataagtgttccataaatggtcattgctttgttt

SEQ ID NO: 18015 - protein, 564 aa, Homo sapiens
MGPFLLNAVRWLARGQTGKVGVNTNLKDLCPLLSEHGLQCSLEPHLNSDLCVYCCKAYSDKEAKQLQEFVAEGGGLLIGGQAWWWASQNPGHCPLAGFPGNIILNCFGLSILPQTLKAGCFPVPTPEMRSYHFRKALSQFQAILNHENGNLEKSCLAKLRVDGAAFLQIPAEGVPAYISLHRLLRKMLRGSGLPAVSRENPVASDSYEAAVLSLATGLAHSGTDCSQLAQGLGTWTCSSSLYPSKHPITVEINGINPGNNDCWVSTGLYLLEGQNAEVSLSEAAASAGLRVQIGCHTDDLTKARKLSRAPVVTHQCWMDRTERSVSCLWGGLLYVIVPKGSQLGPVPVTIRGAVPAPYYKLGKTSLEEWKRQMQENLAPWGELATDNIILTVPTTNLQALKDPEPVLRLWDEMMQAVARLAAEPFPFRRPERIVADVQISAGWMHSGYPIMCHLESVKEIINEMDMRSRGVWGPIHELGHNQQRHGWEFPPHTTEATCNLWSVYVHETVLGIPRAQAHEALSPPERERRIKAHLGKGAPLCDWNVWTALETYLQVLSRNSGRRG

SEQ ID NO: 18016 - DNA, 2956 bp, Homo sapiens
ggatctctctcggctgcttttttccactggtaacttctgaggctgagatcagcagctgatagaaccatggcgaccattgctgctgctgcgtttgaggccctcatggatggagtgacatgctgggatgtccccagaggccccatccccagtgaactccttcttattggagaagccgccttccccgtgatggtgaatgacaagggccaggtgctcattgctgcctcctcctacggccgaggccgcctcgtggttgtgtcccatgagggctacctgtcgcatactggcttggctccatttctcctcaatgcagtgagctggctctgtccctgtcctggggctcccgtgggagtgcatccatccctggcacctctagtaaacatcctacaggatgctgggcttgaggcacaggtcaagccagaaccaggagagcccctaggggtttactgtatcaatgcctacaatgacaccttgactgcaacgctgatccagtttgtgaaacatggagggggcttgttaatcgggggccaggcctggtactgggccagccagcacggccctgacaaggtgctctccaggttccctgggaacaaggtgacaagtgtagctggagtgtacttcactgacacctatggggacagagaccggttcaaggtctctaagaaggtgcccaagatcccactccatgtcaggtatggggaggatgtcaggcaggaccagcagcagctcctggaggggatctcagagctggacatcaggacagggggagtcccctcacagctgcttgtacatggagccctggccttccctctggggctggatgcctcactcaactgcttcctggcggctgctcactatggccggggccgggtggtcctggctgcccacgagtgcctgctctgtgctcccaagatggggcccttcttgctcaatgcggtgcgctggctggccagaggccagacaggcaaagttggggtgaacacaaatctaaaagatctgtgtcctctcctatcggagcatggcctgcaatgcagcctggagccccatctgaacagcgacttgtgtgtctactgctgcaaggcgtacagtgacaaggaggctaagcagctgcaggagtttgtggctgagggtggggggctgctgattgggggccaggcctggtggtgggcctcccagaaccctggccactgccccttggctggcttccctggtaacatcatcctcaactgctttggcctcagcatcctgcctcagactctcaaagcaggctgcttccccgttcccacccctgagatgagaagctaccacttccgcaaggcgctctctcaattccaggctatactgaaccacgagaatgggaacttggaaaagagctgtctggcaaagttgagagttgatggtgcagccttcctacagattcctgcggagggggtccctgcttacatatccctgcacaggctcctgaggaagatgctacgagggtctggcctcccagctgtgagccgggaaaatccagttgccagtgactcctatgaggctgcggtgctctccctggccactgggctggctcactctggaactgactgctcccagctggcccaggggcttggcacctggacctgctcctccagtttgtacccctcaaaacaccccatcaccgtggagatcaatggaatcaacccaggcaacaatgattgctgggtgagtaccgggctctacctcctggaaggacaaaatgcagaagtctcactgtctgaagctgctgcctctgctggcctgagggtacagataggctgccacaccgatgaccttaccaaggccaggaagctatctcgagcccccgtggtgactcaccaatgctggatggacaggactgagcggtcagtctcctgcctctggggcggcctcctctacgtcatcgtgcccaagggcagccaactaggccctgtgcctgtcactatcaggggagctgtgcctgccccatactacaagctgggtaagacatcgctggaggagtggaagaggcagatgcaggagaacctggctccctggggagagctggccacggacaacatcatcctgacagtgccaaccacaaaccttcaggccctgaaggaccccgagcctgtgctccgcctctgggatgagatgatgcaggctgtggccaggctggcggctgagcccttccctttccgccgtcctgagaggattgtggctgatgtgcagatctcagctggctggatgcattcaggataccccatcatgtgccacctggagtctgtgaaggagatcatcaatgagatggacatgaggagcaggggtgtgtggggccccatccatgagctgggccacaaccaacagcggcatggatgggagttccccccacacactactgaggccacctgtaacctttggtcagtctacgtgcatgaaacagtcctggggatccccagggctcaggcccacgaggctctgagccctccagagcgagagaggagaatcaaggcccacctgggaaagggagcccccctgtgtgactggaatgtatggacagccctggaaacatatctacaggtactgagcagaaattctgggagaaggggatgaccagacccctcagtcatgtagcgacctggatcccagtagccctccacctccttcgccactccaccagcctggacctccacctcccctggaaatgagagggactgggccgcagggtggtgcttcttgggttatacccctctaaggcagagagaatggcacctgtctcactcaccttctgattttgcaatgtaagaggaaatgaaaaatattatgaaaaaaatagaaatatagcatattattcaagggcagaaactctgttagacattcctgcagctgaatcacagctcttgccctcattggttttgttcttggtctcctaataagtgttccataaatggtcattgctttgttt

SEQ ID NO: 18017 - protein, 845 aa, Homo sapiens; identical to SEQ ID NO: 18013

SEQ ID NO: 18018 - DNA, 456 bp, Homo sapiens
tcccagctggcccaggggcttggcacctggacctgctcctccagtttgtacccctcaaaacaccccatcaccgtggagatcaatggaatcaacccaggcaacaatgattgctgggtgagtaccgggctctacctcctggaaggacaaaatgcagaagtctcactgtctgaagctgctgcctctgctggcctgagggtaaggtctgaacacccacatctgccacctctcaaaaccgtagagctgtgtcattctcatccactgtctagttccagctcatggcaatgctgccaggagtacagagatggattattctgcccattttacagattttacagatgaagcagctaaatttcagggcatctaagtgagtgactgaagtgcctagtgttatcaagcaagagaagctcactgcagaatggactagaagccaaaactatgacacttgagtttttcacc

SEQ ID NO: 18019 - protein, 30 aa, Homo sapiens
MAMLPGVQRWIILPILQILQMKQLNFRASK

SEQ ID NO: 18020 - DNA, 980 bp, Homo sapiens
catgaaacagtcctggggatccccagggctcaggcccacgaggctctgagccctccagagcgagagaggagaatcaaggcccacctgggaaagggagcccccctgtgtgactggaatgtatggacagccctggaaacatatctacagctccaagaggccttcgggtgggagccattcacccagctctttgctgagtaccagaccctctctcacctccccaaagacaacactggcaggatgaatctatgggtgaagaagttctctgaaaaagtgaagaagaatctggttcccttctttgaggcctggggctggcctatccagaaggaggtggctgacagcctggcctccctaccagagtggcaggaaaaccccatgcaagtgtacctccgtgccaggaagtaaaggatgccccacaaggcgggagagaaaaggcagggtcacgccatcaactccaccatggggctttggccgtgtgctcagtatctggagcctgaatcccgcttccaagcctgaccactagatggtggccacggtcataagaaaaaatggaacccctttctgtaaaaggtgccttgtgcttctttttattgtttttctgcctacgctattgctttccccaagagactcacttcacctcttagtcttccagagaggatctttcatcctgccatcctgaggcttctatttttgaccaatagctctaaagaccacgggttcccataacaacctgatatccctttctcatccctgccatccctgaataaggcttctaatttattatgctttaacaagttttcaaatagcaagcgagacacgctggaatagtggagagagccccaaaccagctttggttctatggaaaatcactccacctctctgtgtttctgtcttcacatccatgacatgaggatacaaatcttttcctcacaaagctgttgtttgatttctcctggtcccatagtggactgttaacggtgtcc

SEQ ID NO: 18021 - protein, 41 aa, Homo sapiens
MYGQPWKHIYSSKRPSGGSHSPSSLLSTRPSLTSPKTTLAG

SEQ ID NO: 18022 - DNA, 2735 bp, Homo sapiens
gcctgtgggtgcccgcgttccccagctccccccgcagcccgctccacagtggtccgctccggttggttgtcacgtgcgcattcgggttccagacccaaggctgcgtgttctccaccgcttgttgtggccagtgttactgcggtgaccgccagagcagcctcgacgctatggaggagcctggtgctacccctcagccctacctggggctggtcctggaggagctacgcagagttgtggcagcactacctgagagtatgagaccagatgagaatccttatggttttccatcggaactggtggtatgtgcagctgttattggattttttgttgttctcctttttttgtggagaagttttagatcggttaggagtcggctttacgtgggaagagagcaaaaacttggtgcaacgctttctggactaattgaagaaaaatgtaaactacttgaaaagtttagccttattcaaaaagagtatgaaggctatgaagtagagtcatctttagaggatgccagctttgagaaggcggcagcagaagaagcacgaagtttggaggcaacctgtgaaaagctgaacaggtccaattctgaacttgaggatgaaatcctctgtctagaaaaagacttaaaagaagagaaatctaaacattctcaacaagatgaattgatggcggatatttcaaaaagtatacagtctctagaagatgagtcaaaatccctcaaatcacaaatagctgaagccaaaatcatctgcaagacatttaaaatgagtgaagaacgacgggctatagcaataaaagatgctttgaatgaaaattctcaacttcagacaagccataaacagctttttcagcaagaagctgaagtatggaaaggagaagtgagtgaacttaataaacagaaaataacatttgaagactccaaagtacacgcagaacaagttctgaatgataaagaaaatcacatcaagaccctgactggacacttgccaatgatgaaagatcaggctgctgtgcttgaagaagacacaacggatgatgataacctggaattagaagtgaacagtcaatgggaaaatggtgctaacttagatgatcctctgaaaggagctttgaagaaactgattcatgctgctaagttaaatgtttctttaaaaagcttagaaggagaaagaaaccacattattattcagttatctgaagtggacaaaacaaaggaagagcttacagagcatattaaaaatcttcagactcaacaagaatctttgcaatcagaaaacatatattttgaaagtgagaatcagaagcttcaacagaaacttaaaataatgactgaattctatcaagaagatgaaatgaaactctataggaaattaacagtggaggaaaattaccgaatagaggaagaagagaagctttctaaagtggaagaaaagctcagccgtgccactgaacagctggagacctatagaaagctagccaaagatcttgaagaagaattggagagaactgttcatttttatcaaaagcaggttatttcctacgagaaaagaggacatgataattggttggcagctcggactgctgaaagaaacctcagtgatttaaggaaagaaaatgctcacaacaaacaaaaattaactgaaacagagttgaaatttgaacttttagaaaaagatcctaatgcacttgatgtttcaaatacagcatttggcagagagcatgccccgaatggtcccgcaccattgggtcagcgttcatctgaaacgagagcttttctctctcctcaaactttgttggaggatccactgggactctcacctgtgcttccggagggaggaggaagaggcccaagaggcccagggaatcccctggaccatcagattaccaatgaaagaggagaaccaagctgtgacaggttaaccgatcctcacagggctccttctgacactgggtccctgtcatctccggtggaacaggactgtaagatgatgtttcctccaccaggacaatcatatcctgattcagctcttcctcctcaaagggaagacagattttattctaattctgaaagactgtctggatcagcagaacccagaagttttaaaatgacttctttggataaaatggatgggtcaatgccttcagaaatggaatccagtagaaatgatgccaaagatgatcttggtaatttaaatgtgcctgattcatctctccctgctgaaaatgaagcaactggccctggctttattcctccacctcttgctccagtcagaggaccattgtttccagtggatacaaggggcccgttcatgagaagaggacctcctttccccccacctcctccaggaaccatgtttggagcttctcgaggttattttccaccaagggatttcccaggtccaccacatgctccatttgcaatgagaaacatctacccaccgaggggtttacctccttactttcacccgagacctggattttaccccaaccccgcattctgaaggtagaagcgagttcccttcaggattgattccgcctttaatgctactgaacatccaggaccacaaaagaaacctgacaatattgttgctttcttcaaaagtaattttgactgatctcattttcagtttaagtaactgctattacttaagtgattgcacttttgctcaaattgaagtttaatggaattataattctcaggatagtattttgtaaataaagatgttttaaatagg

SEQ ID NO: 18023 - protein, 777 aa, Homo sapiens; identical to SEQ ID NO: 2158

SEQ ID NO: 18024 - DNA, 456 bp, Homo sapiens; identical to SEQ ID NO: 18018

SEQ ID NO: 18025 - protein, 30 aa, Homo sapiens; identical to SEQ ID NO: 18019

SEQ ID NO: 18026 - DNA, 2501 bp, Homo sapiens
ggatctctctcggctgcttttttccactggtaacttctgaggctgagatcagcagctgatagaaccatggcgaccattgctgctgctgcgtttgaggccctcatggatggagtgacatgctgggatgtccccagaggccccatccccagtgaactccttcttattggagaagccgccttccccgtgatggtgaatgacaagggccaggtgctcattgctgcctcctcctacggccgaggccgcctcgtggttgtgtcccatgagggctacctgtcgcatgctggcttggctccgtttctcctcaatgcagtgagctggctctgtccctgtcctggggctcccgtgggagtgcatccatccctggcacctctagtaaacatcctacaggatgctgggcttgaggcacaggtcaagccagaaccaggagagcccctaggggtttactgtatcaatgcctacaatgacaccttgactgcaacgctgatccagtttgtgaaacatggagggggcttgttaatcgggggccaggcctggtactgggccagccagcacggccctgacaaggtgctctccaggttccctgggaacaaggtgacaagtgtagccggagtgtacttcactgacacctatggggacagagaccggttcaaggtctctaagaaggtgcccaagatcccactccatgtcaggaggattccctgggagcacccaccagctgagatctgcacatcagccacaatcctctcaggacggcggaaagggaagggctcagccgccagcctggccacagcctgcatcatctcatcccagaggcggagcacaggctcggggtccttcagggcctgaaggtttgtggttggcactgtcaggatgatgttgtccgtggccagctctccccagggagccaggttctcctgcatctgcctcttccactcctccagcgatgtcttacctgggaataaatatcatggaacctaccacacccacttctccaacttcccttgagctgaaaaataccatttgaactctggaagaacattgcaataatgaactactatcacaggcgtctataggctgtaaagtgaagaaaaggcttcctgactcttctctttgtctgccctgaagtctccatggacacagggtattccgtatcttctgcctccatgttccctcccaacagttcttcctctttctctccaccaaagctcatccctctcccatttagcaaccaccccacagttcccacggcatctgccactcttcctcctccctaaatgttcactccacttacccagcttgtagtatggggcaggcacagctcccctgatagtgacaggcacagggcctagttggctgcccttgggcacgatgacgtagaggaggccgccccagaggcaggagactgaccgctcagtcctgtccatccagcattggtgagtcaccacgggggctcgagatagcttcctggccttggtaaggtcatcggtgtggcagccaatctgtacctggacaggtgattccaccaagcgttggagaaattagagtctttgtgatgctttgtgatgtgcgtgtgaggttgtgtagatggaaggtattagacaaacatgcccatgaaaccccagcttcccttttctatgtgctaggcatggaaacttatgaaattttagcactccaaagtcatttggacttcaaggcatttaaaatcatttttctaaggatttaaacagctccactataagtcttcacctgacatgaattggtgagagaccaggctgatcctggcaaaggtcttgtgtctttctgccaggcaaaatcctgggttcttctagcaggacctaagccagtctggggacgctgatattgaggatgagctgggggactctgctctgtcctctgtgaacacacaggaggcccatccagagtgagtgaggttgattctctctccctctttgcccagagcttccctttctggccgccagatgggtggagatctgttttgtctggagtcctggagttgcttttcttaggtttgatataagcaagctccagaaagaatgctgacagaaaagggaccctagctgtggtaggaagtggccctcagagtcaaggaggcaggatgaatttaaattctgcatgtagggcatattttggggagtgatgggattatgcacacccttcaggtgtcaagataaagagataaaaccagagtttgtgcagaatgagcttgctgacacacagcctaaatttgtaccgcatgtttcatactaactccctctgagtttgcacatgggacccatgaggaggcatgaagaggtaactgcccatgcccgaggattttccagcccttccttttctttctatcaatcacctactaatcacagaatccactccctacaccttttctactaaaataactctttaaaataagtacaatgggacagatttgagctgggctcctgtctccttgttaatcaaattgcaataaaatgttttcttttgtt

SEQ ID NO: 18027 - protein, 259 aa, Homo sapiens
MATIAAAAFEALMDGVTCWDVPRGPIPSELLLIGEAAFPVMVNDKGQVLIAASSYGRGRLVVVSHEGYLSHAGLAPFLLNAVSWLCPCPGAPVGVHPSLAPLVNILQDAGLEAQVKPEPGEPLGVYCINAYNDTLTATLIQFVKHGGGLLIGGQAWYWASQHGPDKVLSRFPGNKVTSVAGVYFTDTYGDRDRFKVSKKVPKIPLHVRRIPWEHPPAEICTSATILSGRRKGKGSAASLATACIISSQRRSTGSGSFRA

SEQ ID NO: 18028 - DNA, 5750 bp, Homo sapiens
gtagtttcgagcccgctgccctttgcctcctgggcggagaagctgcttcctcctgggaacaaccgcctcccgctcctagcaggttgctactgccccgaacccgcgctgcagggaacagcggggcaaacagtgagtggggttcagcgtagactctggaccaggagaggcccgcggtgaccgaggcctgggccccggaaaccaatagagccatggcgactccctctgctgccttcgaggcccttatgaatggtgtgacaagctgggatgtacccgaagatgctgttccatgtgaactgcttcttattggagaggcttcatttcctgtgatggtgaatgacatgggccaggtcctcattgctgcctcctcctatggccgtggccgcctggtggtcgtgtcccatgaggactacttggtggaagcccagctcacgccctttctcctgaacgcagtggggtggctttgctcttcccctggggctcccattggtgtacacccatccctggcacctttggccaaaatcctcgagggctctggagtggatgcaaaggttgagccagaagtgaaagactccctgggggtttactgtattgatgcctacaatgaaaccatgacagaaaagctggtcaagttcatgaaatgtggtggcggcttgctcataggaggacaagcctgggattgggccaaccagggggaggatgaaagggttctgttcacgttccctgggaacctcgtgaccagtgtggctggcatttactttactgacaacaaaggggacacgagtttctttaaagtctccaagaagatgcccaagatcccagtgttggttagttgtgaagatgacctctccgacgacagagaagagcttctgcatgggatttcagagctggacatcagcaactcggattgtttcccatcccagctgctagtgcatggggctttagcctttcctctagggttagattcctaccatggctgtgttatagcggctgcccgctatggccggggccgggtggttgtgactggccataaggtattattcactgttggtaaactgggcccctttctgctcaatgctgtccgctggctggatgggggccgcagaggcaaggttgtggtgcagacagagctgagaaccctgagtggcctcctcgcagtggggggcatagacaccagcatcgagcccaatctgaccagtgatgcaagtgtctactgctttgaacccgtgagtgaagtgggggtcaaggaactgcaggagtttgtagcagagggtggcgggctatttgttggagcccaagcctggtggtgggccttcaagaaccccggagtgtcccctttggctcgattcccaggaaacctcctcctcaacccctttggcatcagcattacaagccaaagcctcaatccagggccctttcgtactcctaaagcagggataaggacctatcacttccgctccaccttggccgagttccaggttataatgggcaggaagagaggaaatgtggaaaagggctggttggcaaagctgggaccagatggtgcagctttcctgcagattcccgcagaagagatccctgcctacatgtctgtgcatcgactcctgaggaagctgctaagtcgatatcggcttccagtagcaacccgagagaaccctgttatcaatgactgctgcagaggtgctatgctttccctggccacagggctggcccactctggaagcgacctctctctgttagtcccagaaattgaagatatgtacagcagcccctatctgcgcccctcagaatctcctatcaccgtcgaggtcaactgcaccaatccaggcaccagatattgctggatgagtactgggctctacatacctggaaggcaaattatagaagtctcactgcctgaagctgctgcctctgccgacctgaagatacagattggctgccacacagatgacctgaccagggccagcaagcttttccgaggcccactcgtaattaaccggtgctgcttggacaaacccacaaaatcgatcacgtgcctctggggtggactcctctatataattgtgcctcagaacagcaaactgggttctgtgcctgtcaccgtgaagggggctgtgcatgctccatactacaagctgggggagaccaccctggaggagtggaagaggcgtatccaggagaatccagggccctggggagagctggccacggacaacatcattctgaccgtgccgaccgcaaatcttcgtactctggagaaccctgagccgctgctccgcctctgggatgaggtgatgcaggctgtggcgcgactgggagctgagcccttccctttgcgcctgcctcagaggattgttgccgacgtgcagatctcagtgggctggatgcatgcagggtaccccatcatgtgccatctggagtcagtgcaggagctcatcaacgagaagctcatcagaaccaaggggctgtggggccccgtccatgagctgggccgcaaccagcagcggcaggagtgggagttcccaccacacaccaccgaggccacctgcaacctgtggtgtgtgtatgtgcatgagacggtcttgggcattcctcgaagccgtgccaatattgctctgtggcccccagttcgggagaagagagtcagaatctacctgagcaagggtcccaatgtgaaaaactggaatgcatggaccgcactggaaacgtatttacagctccaggaagcctttggttgggagccattcatccgtctcttcaccgagtacaggaaccagaccaacttgcccacagaaaatgttgacaaaatgaatctgtgggtcaagatgttctcccaccaagtgcagaagaacctggctccgttctttgaggcctgggcctggcccatccagaaggaagtggctaccagcctggcctatctgcctgaatggaaggaaaatattatgaaattgtacctcctcacacagatgccccactgaaattgaagtcaagaaatgcaaaaaggaactgacacatctcagcaaagaaaactgaagggatttggttataagtggagaggatctcagcatatttctggaagatagaaagtggatgaagcatgataatgaaagagtgaagaacctttcagataaaatgtaagctgatctgaacaacataaccccaaagagacttgcgcacctgaaaagcttgtctactgaagaattactccagttgtaagattgagccctctcctactctcccccaactcttatgcacagaacacaggcagtctccactattgataccagttaaaaatttcttgttattgttgctgttgttgtttgtataaaggaattgaacaggctgcttgcagagagataagagttggtgctccagaaaaaaatttctcttctagtggaaataagtgcccctacccccagccggtcagctaattctctactgacagctgagacctcctactcaagtgcctgttgccttcaggtatagaagaggtttcctgaagaaacagacctaactgtacaacagcagaggaaacccatgccaactgttatacaagttaacagttatgttgatttttaaatgggaatggtgagttagaaattcccagacatgggcgatggggagggaagaggaataagaaaagtcacgaggtagaattaggggccttgaaaatatgacaaactctgagggaaacaaagacaatgtggaaagaataacttaattttaattccatctccagagagatttgaggtgtatttaagatgaaaaacaggatactacaaagaaacggaaaactcaggagttcgagaccagcctaggcaagatggcaacatcccgtctctacaaaataatttttaaaaattagccaagcatggtggcatgtgcctgtggtcctagctacttgggaggctgaagtgggaagatcacttgagcccaggagttcaaggcttcagtgagccatgatggtgccactgcactccagcctgggggacagagtgagaccctgtctcttaaaaagcaagaaaagaaagagaagactgagaataagaagatctctttgaaaataaaataagactgctaaaagtatttggtatacagtctggaaaataaagttgagggaatctctccagataaagagcaaaaagaaatagatagaaaaatataaagaaagaaaaaagacatagacaatcaatatgtaatgttaggagttcctggaagagagaacagagacagtgtaggtgaagaaataaaaagaaaaagaattgaagaacagagcaagctaagtctccagattgagagggcccaatacaatctacatctagacacaatattgtaaaattttggaatattaaggatagaaggaagatattaaagtggccagggagaaaacaaatgaggtcatcacgattagctcaacacaaaaatggatgagaaatagactgctaacagatttgtcatcagcaacactgaatgccagaagtcaatggatcaacatcttcagagcttaaggaaaatttttgtacctagaatttcatagtaaggcagactgtcaagaagaacatcaaagtgaagacattttctgtcaggcaaattttcagaaagtctcctttgcacccttactgaggaagtatcttgaggaaattctccagcaaaatgaggatgaaaaccaggaaagaagaagaaatgggatccataaaacagtggaccttacttaggatgtctcattctagagtgacagccaaaagggtatctcaccctagagtgacagctatccagcagactaatttcagatgagagcatactgtctcgggctttctgggaagaatgtgcattcagtgccatagatagtatcattgaagagctgggatgcttgagaagattatttagtcaagaaaaaagaaagacaaatcaacaatatgtcaaaaaattcaggtccaattatagagcaaaataaaatgaggcatgattttgagttattcatgaagaataagaagaggcttgataggtacatttccttttctatggcacaggcatgatgatattgggtgtgtagggaagaaaatatcctagcttatactaggctcccagtaagaagtatttaaatagccaaaataatgtggatatcatttattagtattcaatgttcagatcagcctattaacaaagtgtgaaaggtttcattttttattcagaactgaagttgaaagtaattaatgctgacaaagggaaagaaagcagaaagagattgagaattagaggaagagaagtggaatcaaaggtagagatacttatatattcaaagtggggatgaaaagatcttcagttaatggaacaagaactagaggattagtgtattgttcaaagctataaaatcaaaccaatagatgtattaaaaagtgatgtaactatcagacatttggagagagatggacaaaggaaagtggcgatagtgtaagttaaatccttatcttttgtaatggggaattattaaagatgttgtaaagtcagtaagtcaagaaattattgctcaaacatattatttaaagttagaaagttaccagacgatctaaaataaatattgttaaaagcattacctctagggaatgggatttagatttaaaaagggtgggatgggaaactgtgtttttcattttaagtccttctgtactatttaattttttaccttgtgcatgtattactttgaaaaaatttttaataaacccaaataaaaatcttccagtgacttcacattg

SEQ ID NO: 18029 - protein, 921 aa, Homo sapiens
MATPSAAFEALMNGVTSWDVPEDAVPCELLLIGEASFPVMVNDMGQVLIAASSYGRGRLVVVSHEDYLVEAQLTPFLLNAVGWLCSSPGAPIGVHPSLAPLAKILEGSGVDAKVEPEVKDSLGVYCIDAYNETMTEKLVKFMKCGGGLLIGGQAWDWANQGEDERVLFTFPGNLVTSVAGIYFTDNKGDTSFFKVSKKMPKIPVLVSCEDDLSDDREELLHGISELDISNSDCFPSQLLVHGALAFPLGLDSYHGCVIAAARYGRGRVVVTGHKVLFTVGKLGPFLLNAVRWLDGGRRGKVVVQTELRTLSGLLAVGGIDTSIEPNLTSDASVYCFEPVSEVGVKELQEFVAEGGGLFVGAQAWWWAFKNPGVSPLARFPGNLLLNPFGISITSQSLNPGPFRTPKAGIRTYHFRSTLAEFQVIMGRKRGNVEKGWLAKLGPDGAAFLQIPAEEIPAYMSVHRLLRKLLSRYRLPVATRENPVINDCCRGAMLSLATGLAHSGSDLSLLVPEIEDMYSSPYLRPSESPITVEVNCTNPGTRYCWMSTGLYIPGRQIIEVSLPEAAASADLKIQIGCHTDDLTRASKLFRGPLVINRCCLDKPTKSITCLWGGLLYIIVPQNSKLGSVPVTVKGAVHAPYYKLGETTLEEWKRRIQENPGPWGELATDNIILTVPTANLRTLENPEPLLRLWDEVMQAVARLGAEPFPLRLPQRIVADVQISVGWMHAGYPIMCHLESVQELINEKLIRTKGLWGPVHELGRNQQRQEWEFPPHTTEATCNLWCVYVHETVLGIPRSRANIALWPPVREKRVRIYLSKGPNVKNWNAWTALETYLQLQEAFGWEPFIRLFTEYRNQTNLPTENVDKMNLWVKMFSHQVQKNLAPFFEAWAWPIQKEVATSLAYLPEWKENIMKLYLLTQMPH

SEQ ID NO: 18030 - DNA, 954 bp, Homo sapiens; identical to SEQ ID NO: 2161

SEQ ID NO: 18031 - protein, 317 aa, Homo sapiens; identical to SEQ ID NO: 2162

SEQ ID NO: 18032 - DNA, 3106 bp, Homo sapiens
gggaatgacagtttgctgcagtcccgtcaatgggggaatctgcccgagctctgcctgcattttgagcagcaaagcagctccagccaccaagaccgttgcctgcgctgtcttaggccagcccatgctgtctgccagccgcttgttgcgctgccttggggactgggaacacacccagccccggtccccatctgttgcagacatgcagtggcagcagctcggagcacagccgaaccctagaaattgcctgtgctgaaggggctgggaaaccccttctctgatggacctttcgagtgaggcagcaggatttgtcagagctgggagtgccgcccgtccccgtcactcgcatcctgccatccagcagcttacaagcctgcactgcttattagcatctggaagagaagacctccaggaccccttggggctgagacctgagctccttcgccatgccgctcctggacggagacctggagggttccggaaagcattcctctcgaaaggtggacagccccttcggcccgggcagcccctccaaagggttcttctccagaggcccccagccccggccctccagccccatgtctgcacctgtgaggcccaagaccagccccggctctcccaaaaccgtgttcccgttctcctaccaggagtccccgccacgctcccctcgacgcatgagcttcagtgggatcttccgctcctcctccaaagagtcttcccccaactccaaccctgctacctcgcccgggggcatcaggtttttctcccgctccagaaaaacctccggcctctcctcctctccgtcaacacccacccaagtgaccaagcagcacacgtttcccctggaatcctataagcacgagcctgaacggttagagaatcgcatctatgcctcgtcttcccccccggacacagggcagaggttctgcccgtcttccttccagagcccgaccaggcctccactggcatcaccgacacactatgctccctccaaagccgcggcgctggcggcggccctgggacccgcggaagccggcatgctggagaagctggagttcgaggacgaagcagtagaagactcagaaagtggtgtttacatgcgattcatgaggtcacacaagtgttatgacatcgttccaaccagttcaaagcttgttgtctttgatactacattacaagttaaaaaggccttctttgctttggtagccaacggtgtccgagcagcgccactgtgggagagtaaaaaacaaagttttgtaggaatgctaacaattacagatttcataaatatactacatagatactataaatcacctatggtacagatttatgaattagaggaacataaaattgaaacatggagggagctttatttacaagaaacatttaagcctttagtgaatatatctccagatgcaagcctcttcgatgctgtatactccttgatcaaaaataaaatccacagattgcccgttattgaccctatcagtgggaatgcactttatatacttacccacaaaagaatcctcaagttcctccagctttttatgtctgatatgccaaagcctgccttcatgaagcagaacctggatgagcttggaataggaacgtaccacaacattgccttcatacatccagacactcccatcatcaaagccttgaacatatttgtggaaagacgaatatcagctctgcctgttgtggatgagtcaggaaaagttgtagatatttattccaaatttgatgtaattaatcttgctgctgagaaaacatacaataacctagatatcacggtgacccaggcccttcagcaccgttcacagtattttgaaggtgttgtgaagtgcaataagctggaaatactggagaccatcgtggacagaatagtaagagctgaggtccatcggctggtggtggtaaatgaagcagatagtattgtgggtattatttccctgtcggacattctgcaagccctgatcctcacaccagcaggtgccaaacaaaaggagacagaaacggagtgaccgccgtgaatgtagacgccctaggaggagaacttgaacaaagtctctgggtcacgttttgcctcatgaacactggctgcaagtggttaagaatgtatatcagggtttaacaataggtatttcttccagtgatgttgaaattaagcttaaaaaagaaagattttatgtgcttgaagattcaggcttgcattaaaagactgttttcagacctttgtctgaaggattttaaatgctgtatgtcattaaagtgcactgtgtcctgaagttttcattatttttcatttcaaagaattcactggtatggaacaggtgatgtggcataaggtgagtgcacggtatgttcagatcacagtgccttatgtccgaatacagcaatatgtcaccgccgcagccggggcgcacgcgtgtgaaacaacaccgagcttgaatgtggaagtctttgaaccttttaccaaatcagtttgttttctttagatttgtcaaaaagttgtaatttgaatataaataattactttaaaattgtaatgacacttttacacgtaagtgttttgttctgggctaccgtgtcaacgaggctgctttacaacagctttatttatttttactttcatgcaatttttttacacatcttttggtggagtaaacttcaccacatccatgaataaactctcagttattttgaaatggcaaatttctcattatttaagtttggatctggaaaggacatgacttctgaaatagccgctgctgggttttaaaagctgaggtctctcaaagtgtggaggagacgttgccgtcaggcgggagccaagtgccgggaagatgtctattttttttcttgtgtattgaaatgtaaaatcatgatgtttgttatgactgctgatgcgattgtttttgtaaattttattgtggcatatacagtattgtcatacagttgaagagaaacaatgtttcctaatgtaagtgctctgaaaatgttgacactgtatatatatatatgaggatagtttgttttttttttgttttgggtttttttttttcagattgaaaaattaaaatagatcctactatctaccattttgtta

SEQ ID NO: 18033 - protein, 525 aa, Homo sapiens; identical to SEQ ID NO: 2164

SEQ ID NO: 18034 - DNA, 3337 bp, Homo sapiens
tcgcccagaaaggaggacggacccagctgcaggctccgagctggtttattctgcggccgaggattacatttatgcacgaacgggcttactggttccagattccccacttgggcacaggcataggaggcttgttttccaaattgctggttttaattgcacctgcctttcagattacctctgggaatctgtgggaggagccgagagggtggaaaatgtttcttagctttgcaaaaggaagaaaactttgtcacccagcgggagacctcagccacgagtaacccggggagacaccagaaccgggacgggctttgactgatttgcctacgagggttccgtaggaaaggacgcttgaattcggcgcttcggcggcggcggcggccgcgcgagttccctgctcaccctccctctccgcggaagtccccacgaggtggcttcagggtgtaacagagcgcgcggctccagtccgaaggcagcggccgggggagggaaggaggggaccgaacccccgaggagtttcgcagaatcaacttctggttagagttatgggaagcgcggttatggacaccaagaagaaaaaagatgtttccagccccggcgggagcggcggcaagaaaaatgccagccagaagaggcgttcgctgcgcgtgcacattccggacctgagctccttcgccatgccgctcctggacggagacctggagggttccggaaagcattcctctcgaaaggtggacagccccttcggcccgggcagcccctccaaagggttcttctccagaggcccccagccccggccctccagccccatgtctgcacctgtgaggcccaagaccagccccggctctcccaaaaccgtgttcccgttctcctaccaggagtccccgccacgctcccctcgacgcatgagcttcagtgggatcttccgctcctcctccaaagagtcttcccccaactccaaccctgctacctcgcccgggggcatcaggtttttctcccgctccagaaaaacctccggcctctcctcctctccgtcaacacccacccaagtgaccaagcagcacacgtttcccctggaatcctataagcacgagcctgaacggttagagaatcgcatctatgcctcgtcttcccccccggacacagggcagaggttctgcccgtcttccttccagagcccgaccaggcctccactggcatcaccgacacactatgctccctccaaagccgcggcgctggcggcggccctgggacccgcggaagccggcatgctggagaagctggagttcgaggacgaagcagtagaagactcagaaagtggtgtttacatgcgattcatgaggtcacacaagtgttatgacatcgttccaaccagttcaaagcttgttgtctttgatactacattacaagttaaaaaggccttctttgctttggtagccaacggtgtccgagcagcgccactgtgggagagtaaaaaacaaagttttgtaggaatgctaacaattacagatttcataaatatactacatagatactataaatcacctatggtacagatttatgaattagaggaacataaaattgaaacatggagggagctttatttacaagaaacatttaagcctttagtgaatatatctccagatgcaagcctcttcgatgctgtatactccttgatcaaaaataaaatccacagattgcccgttattgaccctatcagtgggaatgcactttatatacttacccacaaaagaatcctcaagttcctccagctttttatgtctgatatgccaaagcctgccttcatgaagcagaacctggatgagcttggaataggaacgtaccacaacattgccttcatacatccagacactcccatcatcaaagccttgaacatatttgtggaaagacgaatatcagctctgcctgttgtggatgagtcaggaaaagttgtagatatttattccaaatttgatgtaattaatcttgctgctgagaaaacatacaataacctagatatcacggtgacccaggcccttcagcaccgttcacagtattttgaaggtgttgtgaagtgcaataagctggaaatactggagaccatcgtggacagaatagtaagagctgaggtccatcggctggtggtggtaaatgaagcagatagtattgtgggtattatttccctgtcggacattctgcaagccctgatcctcacaccagcaggtgccaaacaaaaggagacagaaacggagtgaccgccgtgaatgtagacgccctaggaggagaacttgaacaaagtctctgggtcacgttttgcctcatgaacactggctgcaagtggttaagaatgtatatcagggtttaacaataggtatttcttccagtgatgttgaaattaagcttaaaaaagaaagattttatgtgcttgaagattcaggcttgcattaaaagactgttttcagacctttgtctgaaggattttaaatgctgtatgtcattaaagtgcactgtgtcctgaagttttcattatttttcatttcaaagaattcactggtatggaacaggtgatgtggcataaggtgagtgcacggtatgttcagatcacagtgccttatgtccgaatacagcaatatgtcaccgccgcagccggggcgcacgcgtgtgaaacaacaccgagcttgaatgtggaagtctttgaaccttttaccaaatcagtttgttttctttagatttgtcaaaaagttgtaatttgaatataaataattactttaaaattgtaatgacacttttacacgtaagtgttttgttctgggctaccgtgtcaacgaggctgctttacaacagctttatttatttttactttcatgcaatttttttacacatcttttggtggagtaaacttcaccacatccatgaataaactctcagttattttgaaatggcaaatttctcattatttaagtttggatctggaaaggacatgacttctgaaatagccgctgctgggttttaaaagctgaggtctctcaaagtgtggaggagacgttgccgtcaggcgggagccaagtgccgggaagatgtctattttttttcttgtgtattgaaatgtaaaatcatgatgtttgttatgactgctgatgcgattgtttttgtaaattttattgtggcatatacagtattgtcatacagttgaagagaaacaatgtttcctaatgtaagtgctctgaaaatgttgacactgtatatatatatatgaggatagtttgttttttttttgttttgggtttttttttttcagattgaaaaattaaaatagatcctactatctaccattttgtta

SEQ ID NO: 18035 - protein, 569 aa, Homo sapiens; identical to SEQ ID NO: 2166

SEQ ID NO: 18036 - DNA, 690 bp, Homo sapiens
catcatgattttacatttcaatacacaagaaaaaaaatagacatcttcccggcacttggctcccgcctgacggcaacgtctcctccacactttgagagacctcagcttttaaaacccagcagcggctatttcagaagtcatgtcctttccagatccaaacttaaataatgagaaatttgccatttcaaaataactgagagtttattcatggatgtggtgaagtttactccaccaaaagatgtgtaaaaaaattgcatgaaagtaaaaataaataaagctgttgtaaagcagcctcgttgacacggtagcccagaacaaaacacttacgtgtaaaagtgtcattacaattttaaagtaattatttatattcaaattacaactttttgacaaatctaaagaaaacaaactgatttggtaaaaggttcaaagacttccacattcaagctcggtgttgtttcacacgcgtgcgccggggctggaaacatcttttttcttcttggtgtccataaccgcgcttcccataactctaaccagaagttgattctgcgaaactcctcgggggttcggtcccctccttccctcccccggccgctgccttcggactggagccgcgcgctctgttacaccctgaagccacctcgtggggacttccgcggagagggagggtgagcagggaactcgcgcggccgc

SEQ ID NO: 18037 - protein, 90 aa, Homo sapiens
RKQTDLVKGSKTSTFKLGVVSHACAGAGNIFFLLGVHNRASHNSNQKLILRNSSGVRSPPSLPRPLPSDWSRALCYTLKPPRGDFRGEGG

SEQ ID NO: 18038 - DNA, 1774 bp, Homo sapiens
ggccgcccgtagcctaattgcgcagagggctcgccttgcacctcctcttcccccgccgccctccctctcgcccagaaaggaggacggacccagctgcaggctccgagctggtttattctgcggccgaggattacatttatgcacgaacgggcttactggttccagattccccacttgggcacaggcataggaggcttgttttccaaattgctggttttaattgcacctgcctttcagattacctctgggaatctgtgggaggagccgagagggtggaaaatgtttcttagctttgcaaaaggaagaaaactttgtcacccagcgggagacctcagccacgagtaacccggggagacaccagaaccgggacgggctttgactgatttgcctacgagggttccgtaggaaaggacgcttgaattcggcgcttcggcggcggcggcggccgcgcgagttccctgctcaccctccctctccgcggaagtccccacgaggtggcttcagggtgtaacagagcgcgcggctccagtccgaaggcagcggccgggggagggaaggaggggaccgaacccccgaggagtttcgcagaatcaacttctggttagagttatgggaagcgcggttatggacaccaagaagaaaaaagatgtttccagccccggcgggagcggcggcaagaaaaatgccagccagaagaggcgttcgctgcgcgtgcacattccggacctgagctccttcgccatgccgctcctggacggagacctggagggttccggaaagcattcctctcgaaaggtggacagccccttcggcccgggcagcccctccaaagggttcttctccagaggcccccagccccggccctccagccccatgtctgcacctgtgaggcccaagaccagccccggctctcccaaaaccgtgttcccgttctcctaccaggagtccccgccacgctcccctcgacgcatgagcttcagtgggatcttccgctcctcctccaaagagtcttcccccaactccaaccctgctacctcgcccgggggcatcaggtttttctcccgctccagaaaaacctccggcctctcctcctctccgtcaacacccacccaagtgaccaagcagcacacgtttcccctggaatcctataagcacgagcctgaacggttagagaatcgcatctatgcctcgtcttcccccccggacacagggcagaggttctgcccgtcttccttccagagcccgaccaggcctccactggcatcaccgacacactatgctccctccaaagccgtaagtctgggcccttctgtgggtggggctgccgggtggcagagggagggcagagcagttattgccccaagctgagcagtctatctgcagccgaggctgaggtcgtgtgctcccgacatcttcaggatattgtaccataaatcacaggctgagggagaaatggtgagggcacaatagcaaatggaaatacacaaaaaatagctgggtgcggtggctcacacctgtagtcccagcactttgggaggccaagataggcagatcacttgaggccaggagttcgagaccagcctggccaacatggcaaaaccctgtctctaccaaaactgcaaaaattagctgggtgtggtggcgtgcacctgtatcccaactactcgggaggctgaggcataagaattgcttaaacctagatggcagacactgcagtgagctgagatcatgacaccgcactccagcccctatgtaacagagcagactctgtctg

SEQ ID NO: 18039 - protein, 252 aa, Homo sapiens
MGSAVMDTKKKKDVSSPGGSGGKKNASQKRRSLRVHIPDLSSFAMPLLDGDLEGSGKHSSRKVDSPFGPGSPSKGFFSRGPQPRPSSPMSAPVRPKTSPGSPKTVFPFSYQESPPRSPRRMSFSGIFRSSSKESSPNSNPATSPGGIRFFSRSRKTSGLSSSPSTPTQVTKQHTFPLESYKHEPERLENRIYASSSPPDTGQRFCPSSFQSPTRPPLASPTHYAPSKAVSLGPSVGGAAGWQREGRAVIAPS

SEQ ID NO: 18040 - DNA, 575 bp, Homo sapiens
ggatttttaaaatatgccagagctggctgggtacagtggctcacacctgtaacctgaggactttgaggtggagacgggcagaccacctgagctcaggagctcaagaccagcctgggcaacatggcaaaaccctgtctctactaacactataaaaagttagctgggcgtgttggtgcatgctgtagtcccagctactcaggaggctgagccacgagaatcgcttgaacctgggagatggaggttgaagtgagccaagatcgcaccattgcactccagcctggggaaaaaaaaaagccaggcctcctaatgtactcatttaaacatcacttgtgtccacctgggttcagaattgcgctggacatgggatacacaaagtttcaattggcctcttggtgccaaagcaccatggcgtgttacacctatcagatcgggcacactgccccttcttcccaacctacgagctgaaatggccagcactgcgccttccagaacccagcgtagatgcacagctgccacggaggtaggaagaatgattcgtttgccaccaaaagcccagtttctccaacaggtaagtc

SEQ ID NO: 18041 - protein, 76 aa, Homo sapiens
MEVEVSQDRTIALQPGEKKKPGLLMYSFKHHLCPPGFRIALDMGYTKFQLASWCQSTMACYTYQIGHTAPSSQPTS

SEQ ID NO: 18042 - DNA, 2137 bp, Homo sapiens
gacgggcagaccacctgagctcaggagctcaagaccagcctgggcaacatggcaaaaccctgtctctactaacactataaaaagttagctgggcgtgttggtgcatgctgtagtcccagctactcaggaggctgagccacgagaatcgcttgaacctgggagatggaggttgaagtgagccaagatcgcaccattgcactccagcctggggaaaaaaaaaagccaggcctcctaatgtactcatttaaacatcacttgtgtccacctgggttcagaattgcgctggacatgggatacacaaagcgggagtggaattttcaggaagcagctgtgctgtgggtgacggtcatactttattctctaaaactctccagtttcaattggcctcttggtgccaaagcaccatggcgtgttacacctatcagatcgggcacactgccccttcttcccaacctacgagctgaaatggccagcactgcgccttccagaacccagcgtagatgcacagctgccacggaggtaggaagaatgattcgtttgccaccaaaagcccagtttctccaacaggtgaatccctaggccagcccggccccttcccacacacccctaccccgagacgggtgcagaatcagcagcggggatcatccagagactctcgcagtccacggcaggtgtcggagtgggcctcattccagagttgtggtggccgctccacctggcgagcttcgaggggactccggcaggcgctcgctgtggggtcctcccaccagtcttctcagcacaggaacggtgccttcacattggtcttccggggcttaaaagcatatcattcctgcttgctcttcagatgcaaactccccctccaaggatacctccaggttccctgccagctcacttgactcacatggcaatggtcaccgggctgcctgagcccaaatcaagcaccgtttattagggggaagctccgttatccagaaagctcatctttgaagagctacccatttcctgccaaagttgtggcgggaaggccttaggtactagaaaaccttggggaatggcaattaaaggattatcattcttacttatttgtttggataagcagcaatcacccttcggatgcttattggtgagaatatttctaaaagtgtcctgcacatttccctgctttgatgaatggaacggcagggcaggatttaactgtctgatggctacggttttgggaaagtgccagaacctccacgtcagccaccccagagccacaggcagggtatgagccacagcaatgggccccaagaaagagccccacacccaccatggtccacggaagacgctgcttactggccccgggttacctggagtcatgtgcattctccttacatcaagtgaagataatattttgtttccttcccactttttctctaacacaagccaccccagttctcccttctgacaacaggcaagtggaccctagtagaccttccagaaaagccttagagagcacccccaaatgctcacatttgtcagctgtaattccaccctcagttaaaacctgattctcaatgtgacttggccaacgcagcttgcaaagcaagaacgtcttcatctaaggttgaaaacatcagttgtttgggttgtgagaaaagaaaagcccacaaggtttccgaggcttggtgctgtttctcactgtcctcagctcctgattctgcagctggttctctctccaagcactagcaaaaccctgccctaggagcccccagactctgagagcccatgaccaaaaagaaaaggaaagccaagttggggaagaacaggggcccccaactccacagccctccactctgcccagagggcccaccctgggctgcctggaaccccctaaagttgccacccccgcaacacagtagtggggcagttcctggcagcgcctgcagcccatgggctggctctgtacccgcagccccgccaagcgtctgttatcttatttactggaatctgcacagccaggctctagctcaccggtgactaaggagctgcagccattattaccaggcagatggcagactccctaaaagcagacattaaacaataaaatgccaccacataccttgcccacaaaataaaatcaaaacaaacacct

SEQ ID NO: 18043 - protein, 138 aa, Homo sapiens
MEVEVSQDRTIALQPGEKKKPGLLMYSFKHHLCPPGFRIALDMGYTKREWNFQEAAVLWVTVILYSLKLSSFNWPLGAKAPWRVTPIRSGTLPLLPNLRAEMASTAPSRTQRRCTAATEVGRMIRLPPKAQFLQQVNP

SEQ ID NO: 18044 - DNA, 629 bp, Homo sapiens
cagagactctcgcagtccacggcaggtgtcggagtgggcctcattccagagttgtggtggccgctccacctggcgagcttcgaggggactccggcaggcgctcgctgtggggtcctcccaccagtcttctcagcacaggaacggtgccttcacattggtcttccggggcttaaaagcatatcattctcctgattctgcagctggttctctctccaagcactagcaaaaccctgccctaggagcccccagactctgagagcccatgaccaaaaagaaaaggaaagccaagttggggaagaacaggggcccccaactccacagccctccactctgcccagagggcccaccctgggctgcctggaaccccctaaagttgccacccccgcaacacagtagtggggcagttcctggcagcgcctgcagcccatgggctggctctgtacccgcagccccgccaagcgtctgttatcttatttactggaatctgcacagccaggctctagctcaccggtgactaaggagctgcagccattattaccaggcagatggcagactccctaaaagcagacattaaacaataaaatgccaccacataccttgcccacaaaataaaatcaaaacaaacacct

SEQ ID NO: 18045 - protein, 83 aa, Homo sapiens
MTKKKRKAKLGKNRGPQLHSPPLCPEGPPWAAWNPLKLPPPQHSSGAVPGSACSPWAGSVPAAPPSVCYLIYWNLHSQALAHR

SEQ ID NO: 18046 - DNA, 884 bp, Homo sapiens
tcgcccagaaaggaggacggacccagctgcaggctccgagctggtttattctgcggccgaggattacatttatgcacgaacgggcttactggttccagattccccacttgggcacaggcataggaggcttgttttccaaattgctggttttaattgcacctgcctttcagattacctctgggaatctgtgggaggagccgagagggtggaaaatgtttcttagctttgcaaaaggaagaaaactttgtcacccagcgggagacctcagccacgagtaacccggggagacaccagaaccgggacgggctttgactgatttgcctacgagggttccgtaggaaaggacgcttgaattcggcgcttcggcggcggcggcggccgcgcgagttccctgctcaccctccctctccgcggaagtccccacgaggtggcttcagggtgtaacagagcgcgcggctccagtccgaaggcagcggccgggggagggaaggaggggaccgaacccccgaggagtttcgcagaatcaacttctggttagagttatgggaagcgcggttatggacaccaagaagaaaaaagatgtttccagccccggcgggagcggcggcaagaaaaatgccagccagaagaggcgttcgctgcgcgtgcacattccgcactctcaacgccctgcgagcgccgacggttggatggagggagggtcgcccggattcacccccagctgccatccccgtgggccagcactgcctctttctctccctcttcttccaccttatcttcctgtccactttccccctttccctcccccataattgaccccaatgtggaattgagggtcatttcaaaatatttctgatactatttgaagaaaataaactttatct

SEQ ID NO: 18047 - protein, 89 aa, Homo sapiens
MGSAVMDTKKKKDVSSPGGSGGKKNASQKRRSLRVHIPHSQRPASADGWMEGGSPGFTPSCHPRGPALPLSLPLLPPYLPVHFPPFPPP

SEQ ID NO: 18048 - DNA, 588 bp, Homo sapiens
gctcaaatgactgaccccacgtttctttaggtgcacacgagctgtctgtcacctgtctgccatgttgtgagctgccctactgaaaatctccttgcagtaccggcctacaaatgtaccgttaggaagctgttctcttcaagagcaggcttggaagctagagaggactgagattgcagctgtggtctgaagggctgtgtgtgaacgggggagccagagagacttggatctatcagtcagggttttctagagaagcagaaccaataagaaggaaagaacaagagttatgatgaggaattggctcacatgattatggaggctgatgagtcccaagatccgtgggatgagttggggagctgggggcccgtgagagccaatggtgcagtgcagcaaggtgctacggaccccggcagacaggtgtggatgatattctttgccaactgcctttggacaacctcagatttcaccacggtcaacaaatagagttacctctgacttcagtttggaaatttttttttttttgcagggaattctttgtagattttcaaactgctgttgattagtttgtcaataaaatttattgagtgcctt

SEQ ID NO: 18049 - protein, 58 aa, Homo sapiens [sequence omitted]

SEQ ID NO: 18050 - DNA, 2698 bp, Homo sapiens
gaatgggacctcattcggacaaaagggtctttgcagatgtaattaaggacctcaagatgaaatcctcctggactaatcaggtaggcccgagaccccatgacacagacagagacacagggagagttccatgtgacagtggaggcagggactggagtgatgtatctgtgcccaaggaacaccaaggattgccagcagctcccaggaggagatgggatggagctgacgctctccagagccttcagaaggaaccaaatctgatactggatttccgtcctgcagaactgggagaaaatgcatttctgtttgaagttaccaagtttgtggtcatttgtgagagcagccccaggagatgaacacagggtggctccatgccaggacaggggggcaagaggctggggctctgtgctcctccaggtctcactcaggctcactctgagcattcagcgcagtgtttggggcacccggtgaccctgggtgtgaggagacgtggtctgtgccttctggcccatcgtcatttgctctgggtgctgatatcaaccacaggcaatttaattctagactggaatggagctgggaagggcgcaccttcctgccaaaagcaatttcgtccaaagtctgcacctcggtggctgagcatggcgggccgggatgttttcacactgccactctagaaagagcggaaatgcagacgctttcctccttcacaatttttgattgctttgacttttggtgtgtccgagaggctgtaactcaaataaccgttccccacctttggttagatcctagagtctctggtacattgtccgtcagcggtgctgcttggaggcttcccaaaggccgccattttggtaggctcattgagagatacagaagaaataggagcaaacggctccacagtagagatacaagcagcttctaccttcaaattactgtggtttttatttgacctgttggaagttctggggtttctgtaaaggataaaaactctctttgggcaggcacagtgtagatctgaaaagtcctgactacggccccttcagtttatggcctgaggagcttgagggcctgagggaagccagtggccggaacacacgggctctttagctgaggagggacttgaacccaggtgttccgacgcgaggactctctcccaccacatacagcacagcactgcttgcgttgtttggttttgtattgctttggaattagtccaactatcatcatcgatgtgaataaatagacatatatcttttcagtttgcacaactacaaccataaatgaatatttattagtgtgaagacacccccaggtcctggaacactcaacacatgtagagccaggtgtattcaggagtccatgcagcaggaagtggagccatcatcacagggtacgaagggaggacaagtgcagtgtcgtgagcatgtacagagggaagttgacagcggggagaggctttgctgaggaagtggcgtttggaagaacgagaatgagatggggttttgccgtgttacccaggctagtcacgaactcctgtgctcaagcgatctgtctgcctcggcctccaaagtgctgggattgcaggcatgagccaccgcgcccagccagaaagccactgctttatagaccaccacttaaatgcacctggcagcttcatgtacgcaagaactttcctgcagctcctttaaatttaagaatcttttggcaaaatgaagaatacaagcgtgtttcttcttcatatgctttgttttaggaacattaaaaaaatatagttactacaatcagaaagcagttatatttgtatgttttgtaacaaatactgtggcctgatagaatgagcttctgacaaaggcatgtgctttccaagtgggccaagttcaaaagttgtccgctgagttgtctcactggctcatccagccaatcattcaaatatttaaaggccccactaagggccatgttactcattgtacatctttaaggatgggtgtaacttacttatctgtttattttcaatttcagaatactttatattgactcctaaaagtatggtgtagtgtatgtttgttttgggagtttcaatacaatccctaaatttatgtatctcaaatgtacagggactgatcaaattagtgctaattttcctaaaacagtgtcaaaaacaagggaatcaatcatgaacacactaagcatgagcatcgactgtcacaagacatggctcagtttattttttcttccttcttactacaccgtagaacagagctcttttgtttgcttatgacctgggcaaatatgctgtatgataaaaaaaaatcatgtatgcatttgattctcatccagatgcccttaggataagaggttcattttcatcttctgttttccaaatgaagctttaaatctaattagatcttgaaagaaaataactgcaatagggtttctgtaagtaaagggccctcatttaaataatgctgttatttgtttatgtgatttacagtaagtgatgaaactcttcgtggccagcacgccgctcacttcggggatcctttgcacagagcactttgagttagttataaaccattctacacacagaagcatttaattgttagaacatttcatagtgtaacagcatttctcattgcctagcatgggccttctccatatcgaaggcccaataaatatttgtagaataaaggaattcacaccc

SEQ ID NO: 18051 - protein, 109 aa, Homo sapiens
MYRGKLTAGRGFAEEVAFGRTRMRWGFAVLPRLVTNSCAQAICLPRPPKCWDCRHEPPRPARKPLLYRPPLKCTWQLHVRKNFPAAPLNLRIFWQNEEYKRVSSSYALF

SEQ ID NO: 18052 - DNA, 1045 bp, Homo sapiens
cgcagagccactgcaatgcagcacccggatctcccttcaggaaaaaggatgaattcctccagctcccgggaatgctgccagcagacagcactcaccgtcggcattccctgggaaccgcttcagtccacagcaggcgctcacacctgcttcctgaaagagtaagagaatgctgccgaggtcggactgcaccaaagctcccagcctgagcttggcagtgagaaacaaaaccagaattctaactccgagttaaacctaagcaaacagtggtgaacacaatggattatggagctgtaaccggagctgggcccaaccctgagcaaatggtgcagccagcgaagtgtgtctttgatgccctctcctttctgtgggctccacctgcaccctgatctgggctccctcacaggcatctccatgaacttcaaagctggaactccacccacagctgagctgcacccagacagagatgcgggcagagctttctaaggaacccaaattagcagctcatggacgcagcgttaatttgctcttgctgctggctgactttgaacttagtatctcagttttctctctgtgtcaccggctttgaacttcaatgctttggtgcctgcattctctttataacccactgtgccccgggacctcagagggccccacgaaccccaaccaccacctgcctggactcagcctgcctctgctgctcaaatcctcacctgcctcagcaccccaagacagacacctcgggccccgcatgggttggagacatttattggcagtcctcatgcacttctctgaccttggagggctcttttggtttaagactgaagcccaggacggagcaaaaggagatggagctgagaaaatgggatcatcctgtgtctatcctgggattctgggcttttctgtccattaattcaccgaaggaggaaacttagctccctgatcattcaaaacacttgtgccttttcccctcaactcctcattttcttttcctgaccaacctccagtcgtctgataaataaatcagtgtgacttgccaatagcgaca

SEQ ID NO: 18053 - protein, 48 aa, Homo sapiens
MQHPDLPSGKRMNSSSSRECCQQTALTVGIPWEPLQSTAGAHTCFLKE

SEQ ID NO: 18054 - DNA, 758 bp, Homo sapiens
agccactcaaaatgcgagcttctggtcctgacatttcacggggaaaggaaggctcatgaaccgactgagacatggttgagcggctaagatttctgtagctatgatgctgccatccaggccgacttcagacttgggaagtttccatggaagaatatttctcagccctccgttctcaagacagatgagtgctttagaaagaggactctgcagcggtgaggaggatggaatgacaggcaaagcacgcaggaccaggagatggcttcgttccctcaatcactcatccaaagacgtttaatgagcacctattgtgtgtcaggcattgtaccgggcaatggggatatcgtagtcagtaataagtgaggagagatgagttcatttgtgagaggctctgaccagtggaatcagaggaagggagttcccctgggtgggccaggttcaaagacattttggaagtagaatctgcagaacatgatgatcttttggaaacagggcagggacgtgaatgagcacgtaatgtccccatgggtttgtctttccgaaggtttaaaatcctcaagaataaggaacataggcatgtgtcgtaacggtctccacagtgggggagtattatgttagtgcacctgcatgttaactctgctcatgaaggggccacgtcttcaccaccacaaagcctcaagcatgcatatctggtccctccaaccccctccctattgaggtgcaataaaggcccatgtttctcctagtatgggaacagaact

SEQ ID NO: 18055 - protein, 64 aa, Homo sapiens
MMLPSRPTSDLGSFHGRIFLSPPFSRQMSALERGLCSGEEDGMTGKARRTRRWLRSLNHSSKDV

SEQ ID NO: 18056 - DNA, 916 bp, Homo sapiens
caggccctcctggtgagatcccatcacgtcccctggcctccagtgtcatctgctctgcatgatatctccagggggacctctctgctgggctccaggccgcatggctgtgggtgaccagcatcatgtcccaccgggtcccctgcagtcccagtgcacctgcctgctcatccagggacctgtcctcactgcctgctgcctgcactgtgtggaaggacagaggctaaacgacgaagcctcgagctctggtctcatggaaatggcagcctgcccaccacccacgcttgcccagcctttcttcacgcaggaagaatatttctcagccctccgttctcaagacagatgagtgctttagaaagaggactctgcagcggtgaggaggatggaatgacaggcaaagcacgcaggaccaggagatggcttcgttccctcaatcactcatccaaagacgtttaatgagcacctattgtgtgtcaggcattgtaccgggcaatggggatatcgtagtcagtaataagtgaggagagatgagttcatttgtgagaggctctgaccagtggaatcagaggaagggagttcccctgggtgggccaggttcaaagacattttggaagtagaatctgcagaacatgatgatcttttggaaacagggcagggacgtgaatgagcacgtaatgtccccatgggtttgtctttccgaaggtttaaaatcctcaagaataaggaacataggcatgtgtcgtaacggtctccacagtgggggagtattatgttagtgcacctgcatgttaactctgctcatgaaggggccacgtcttcaccaccacaaagcctcaagcatgcatatctggtccctccaaccccctccctattgaggtgcaataaaggcccatgtttctcctagtatgggaacagaact

SEQ ID NO: 18057 - protein, 94 aa, Homo sapiens
MISPGGPLCWAPGRMAVGDQHHVPPGPLQSQCTCLLIQGPVLTACCLHCVEGQRLNDEASSSGLMEMAACPPPTLAQPFFTQEEYFSALRSQDR

SEQ ID NO: 18058 - DNA, 640 bp, Homo sapiens
gctcgccggcccccgccccgcgcacggcgtcagcgtctagacgcaggccctcctggtgagatcccatcacgtcccctggcctccagtgtcatctgctctgcatgatatctccagggggacctctctgctgggctccaggccgcatggctgtgggtgaccagcatcatgtcccaccgggtcccctgcagtcccagtgcacctgcctgctcatccagggacctgtcctcactgcctgctgcctgcactgtgtggaaggacagaggctaaacgacgaagcctcgagctctggtctcatggaaatggcagcctgcccaccacccacgcttgcccagcctttcttcacgcattaaaacgtggagagtggaatcttctgggcccaggtaatgcgcctttgctccgacattcccttcactactcactggcgagctcagttggaaattcactcccaataggagttccacggcagacacatcgtgagtcatggcagaactttgtcttttaattgcagaatgttaaagaaagagtcactcaggtagcaaagattggcttttcaggggcgattttatggagctattaactcagagacaccattacttaaatgtaatttttattattacaattaaagactgatttgatttta

SEQ ID NO: 18059 - protein, 82 aa, Homo sapiens [sequence omitted]

SEQ ID NO: 18060 - DNA, 327 bp, Homo sapiens
catcacgtcccctggcctccagtgtcatctgctctgcatgatatctccagggggacctctctgctgggctccaggccgcatggctgtgggtgaccagcatcatgtcccaccgggtcccctgcagtcccagtgcacctgcctgctcatccagggacctgtcctcactgcctgctgcctgcactgtgtggaaggacagaggctaaacgacgaagcctcgagctctggtctcatggaaatggcagcctgcccaccacccacgcttgcccagcctttcttcacgcagtgcgtaaaacacttttaaaaatacaagtattatcctgtcctgtt

SEQ ID NO: 18061 - protein, 87 aa, Homo sapiens
MISPGGPLCWAPGRMAVGDQHHVPPGPLQSQCTCLLIQGPVLTACCLHCVEGQRLNDEASSSGLMEMAACPPPTLAQPFFTQCVKHF

SEQ ID NO: 18062 - DNA, 2287 bp, Homo sapiens
atgctcgccagccccgcccggcccacattgcgcatgcttgccaaccacgccctgtccacaccacactgcgcatgctcgccggcccccgccccgcgcacggcgtcagcgtctagacgcaggtgcgttcccgtcgaggctcgcgcagcgggcgtttttggggatcgcctggcgggggtgttcgggagccgcgggctgaagcacgggggcgtgcaggcgcccaggcctcgtgtagtgagggccgagccccgcgccggcttcgctgtagtccgcagcccccggcggctttgtgggcgcagccacgctcctcagccgcccgcccacctgggcctgggccccggttgtttccctgcggtggctgtggtcgttcccgttccagggtctcgagcgcaccgccccttcgctgcgctgttagtcgagggcagttttctgggggatcccccgatccccccgcgccgctcaggcgtcttggctcgcggaagcgcaggcgccgactgcctggcgtcgtccgtgactcctggcccttctctgtggatccctttgcttctcgttgcgggttgtgtttcctgcttcgtgggcctggccgtttgcgtttggatgcaggcccgggtgagccctgcgtggcccgctggccttttcctgctccctaggtgactgagccgcgtgtgtgacacatcggagtgaattgaggcaacgcgttcctttccaggcttgcagcgggcggtgtcgttcacgctcctgagcagagccttccggtgctttactcgacgccacaaatagtgcagggttcctcccaggggctgtcgcgagctagaactcttccccgcccctgtgagctcgggctgttcttcctcctccgcgtggctcactccagcctcggatgtttcctcgctgcacagacctgctcgggaagactcgagaaggccaccccaggactccagctctccccggaagggcttcccctcggattgcgtcttggcccctggaaccctccctctgtatcctctgctgttcctctcttggcctccatttgggttgtggcctggatactctggctcgctgcttcccttctcttaaggatcacagccctgcactgcctgtcgtccggtgcctggaaaccattgtattttttggtctgattttgtagttgtttgagaacttaagtctggtccctcacactccatgcccagaagcagaaatgagtaaagtttgttttatcttttcttaatatgacaattattgtgttggttcaacttatgttgtactttaattagaagaaatttggccgaaaatacaaggaaaatatacaaatgcaagtaattttttttaaacttccctgaaagcagggtctaaagaaattaccaaccaacttagactggatctagaagaaaaggaagggtctttgcagtcttaggactcttccgttccgcgacgtaggtgttaggataacagccataaatggttgtaagactttgggctcagataagtagacttaagttcaaattttgacttattttacaagtgtgtgatttttggcaagctcatcttcctaaaccatgagctccttatttgtaaaggggacattagccactctccagcaacagccctggtacttcttcagtcctgggatgggacgtatgattagcctaagcgaaccagaaaatccaggcccgtgaccagtgacttgatcagggctggcgatatatctaggtaggccaaccaggtggactcagtatttttgtgggtgctactggaaaatttatttaattctaactgaatgtagaaacagcaacagacatgaaatggcagttgtattgctgtcttatcatgaggtgagggcctgaagctatggtagccaccctgtgaaccttggaaggagggttctacaggaactggcagagctgagactgggacgcaacccatgtcctggtgacgtatttgagtcctgaggctggccctcctgttagtcttttctcttactggcttcagccagatggggtctggttttctgttacttgcaacaggaaaaattggaatgatatctatgcatgctattaccgccttatggctgtggtgagattaaaacatgatactgtgggtgaactgcttagtacagtgcctgctattctttatgttggttttaaggtatttttcttgaactttaaagttctaagaaaaattaccgttttaaaattcctaccctctgttcacatgtttaaattttcatgatagtttttctgtctgcatgttttctattcaaaataaattggtcattcttcagttagccacg

SEQ ID NO: 18063 - protein, 216 aa, Homo sapiens
MLASPARPTLRMLANHALSTPHCACSPAPAPRTASASRRRCVPVEARAAGVFGDRLAGVFGSRGLKHGGVQAPRPRVVRAEPRAGFAVVRSPRRLCGRSHAPQPPAHLGLGPGCFPAVAVVVPVPGSRAHRPFAALLVEGSFLGDPPIPPRRSGVLARGSAGADCLASSVTPGPSLWIPLLLVAGCVSCFVGLAVCVWMQARVSPAWPAGLFLLPR

SEQ ID NO: 18064 - DNA, 557 bp, Homo sapiens
gcgccggcttcgctgtagtccgcagcccccggcggctttgtgggcgcagccacgctcctcagccgcccgcccacctgggcctgggccccggttgtttccctgcggtggctgtggtcgttcccgttccagggtctcgagcgcaccgcccccctgtgagctcgggctgttcttcctcctccgcgtggctcactccagcctcggatgtttcctcgctgcacagacctgctcgggaagactcgagaaggccaccccaggactccagctctccccggaagggcttcccctcggattgcgtcttggcccctggaaccctccctctgtatcctctgctgttcctctcttggcctccatttgggttgtggcctggatactctggctcgctgcttcccttctcttaaggatcacagccctgcactgcctgtcgtccggtgcctggaaaccattgtattttttggtctgattttgtagttgtttgagaacttaagtctggtccctcacactccatgcccagaagcagaaatgagtaaagtttgttttatcttttcttaatatgacaa

SEQ ID NO: 18065 - protein, 88 aa, Homo sapiens; identical to SEQ ID NO: 2170

SEQ ID NO: 18066 - DNA, 1746 bp, Homo sapiens
gagcgcggaggcgggcgttgctacggcaacggtgggcggccagggagttgcctgagggaaaaggggcagacgtccctgggttccggtgttcgcggaggagtcgagcagaagaatagaaggaaggtgataggatgtgatgatagaatttgtgatagccaagcaacaacttttcctaattcggcatgttaaaaaataagggtcactcatctaagaaagataacttggcagtcaatgcagttgctttacaagatcacattttacatgatcttcaacttcgaaatctttcagttgcagatcattctaagacacaagtacaaaagaaagagaacaaatctctaaaaagagatacaaaggcaataatagatactggacttaaaaaaactacacagtgccccaaactagaagactcagaaaaagaatatgttcttgatcccaaaccgccgccgttgactttggcacagaagttgggcctcattgggcctccaccacctccactgtcatcagatgaatgggagaaggtgaaacagcgctctctcctgcaaggggactccgtgcaaccatgccccatctgtaaagaagaattcgagcttcgtcctcaggtgctgctttcatgctcccatgtgttccacaaagcatgtcttcaggcttttgaaaagttcacaaataagaaaacctgtcctctctgtagaaagaaccagtatcaaacccgagtgatacacgatggggcccgcctgttcagaatcaagtgtgtgaccagaatccaagcctactggagaggatgtgttgttagaaagtggtacagaaacctgaggaaaacagtacctcccacagatgccaagttaagaaaaaaattctttgaaaaaaagttcacagaaatcagccaccgcatcctgtgctcatacaacaccaacattgaagagctctttgcagaaatcgatcagtgcttggccataaatcgaagtgttcttcagcagttggaagaaaaatgtggccatgagatcacagaagaggaatgggagaaaatccaagtgcaggctctgcgccgggagacccacgagtgctccatctgcctggcccctctctccgctgctggcggtcagcgcgtgggtgcaggcaggcgttccagagagatggccctcctgtcctgctcacatgtgttccaccatgcgtgtctgctggcactagaggagttctccgtgggagacaggcctcctttccatgcctgtcctctctgccgctcctgctaccagaagaagattcttgaatgttgaattcatagtcaaggaaagttaggtaattctgaggaaaaaagtttaccatcattttggatgaactgcatgagttctgggttaagtactacaatgtaatctgtttcccagggaaataagctattggtagttgtaggaaatcttagtatattttaaaagctgacatcccacctaattttaatctttggtctctaaaaagtaaatttcaaatttatgagtttaatcacttcaaatatgaatagcaaaaaatgagagcttgcttacttctaaaaattgaggttaagatatagctagtgtctgaacgacactccttaaagtaagttccaaatgtaaaacactccttaagttccaaatgttttccgctaatagtctgtcctaaagcctttgccattcctaatactcgttttgtaataattgctgtatttctgtgtaataaaatataaaaataaaatattcagtggtattcaacatcaaaaaa

SEQ ID NO: 18067 - protein, 362 aa, Homo sapiens; identical to SEQ ID NO: 2172

SEQ ID NO: 18068 - DNA, 1158 bp, Homo sapiens
ggagttgcctgagggaaaaggggcagacgtccctgggttccggtgttcgcggaggagtcgaggcacggagaggcttcgggggagggacggaaagaagggtggcccgccaggcgggcggggtccatggattcggggtgagggccgtccgcggcctcgctttcgcctcctccgagccgggccggcgatggccgcagctgtgaggcgagcagaagaatagaaggaaggtgataggatgtgatgatagaatttgtgatagccaagcaacaacttttcctaattcggcatgttaaaaaataagggtcactcatctaagaaagataacttggcagtcaatgcagttgctttacaagatcacattttacatgatcttcaacttcgaaatctttcagttgcagatcattctaagacacaagtacaaaagaaagagaacaaatctctaaaaagagatacaaaggcaataatagatactggacttaaaaaaactacacagtgccccaaactagaagactcagaaaaagaatatgttcttgatcccaaaccgccgccgttgactttggcacagaagttgggcctcattgggcctccaccacctccactgtcatcagatgaatgggagaaggtgaaacagcgctctctcctgcaaggggactccgtgcaaccatgccccatctgtaaagaagaattcgagcttcgtcctcaggtgtttagcatacgagggtgagctagagagctcctgggctgtttcctagggacgaggcccagagctggagcctaagattccaagcttcctttttccagtttcatcctcctgtgtgagcctcacacacttccattttgttttccattaattaaagtgtgtgaagagctaaacaccctcattaaatagttttgtttgtttactaactggtattctcaagtactaaagtttgtacaaaaggaatgtttctgttcaacaggccccatgcggctgtgcagacaactggggggcttcccaggagcagctgtgtcccagcgcgggaaggatgaaagcagagggactcttaagtggttttgtgatttgagtcagaaaagaaaaaaaaaactgtgcttgaatgtctccaaagaatttgtgagagaatctttaagaaaagtaaaatcttttaatgatttttattcatg

SEQ ID NO: 18069 - protein, 145 aa, Homo sapiens
MLKNKGHSSKKDNLAVNAVALQDHILHDLQLRNLSVADHSKTQVQKKENKSLKRDTKAIIDTGLKKTTQCPKLEDSEKEYVLDPKPPPLTLAQKLGLIGPPPPPLSSDEWEKVKQRSLLQGDSVQPCPICKEEFELRPQVFSIRG

SEQ ID NO: 18070 - DNA, 1281 bp, Homo sapiens
ttccggtgttcgcggaggagtcgaggcacggagaggcttcgggggagggacggaaagaagggtggcccgccaggcgggcggggtccatggattcggggtgagggccgtccgcggcctcgctttcgcctcctccgagccgggccggcgatggccgcagctgtgaggcgaggtcgggtcccgtagcggcgcgcagcctccttgggggactcggggtcctgtatattttgaatacatctgtcttcataaaatacaccatgtccaaaatctaaaagggccaattccaaattattccaccagctttgaagggaattgaagcaagaataacaagacagaagaatagaaggaaggtgataggatgtgatgatagaatttgtgatagccaagcaacaacttttcctaattcggcatgttaaaaaataagggtcactcatctaagaaagataacttggcagtcaatgcagttgctttacaagatcacattttacatgatcttcaacttcgaaatctttcagttgcagatcattctaagacacaagtacaaaagaaagagaacaaatctctaaaaagagatacaaaggcaataatagatactggacttaaaaaaactacacagtgccccaaactagaagactcagaaaaagaatatgttcttgatcccaaaccgccgccgttgactttggcacagaagttgggcctcattgggcctccaccacctccactgtcatcagatgaatgggagaaggtgaaacagcgctctctcctgcaaggggactccgtgcaaccatgccccatctgtaaagaagaattcgagcttcgtcctcaggtgtttagcatacgagggtgagctagagagctcctgggctgtttcctagggacgaggcccagagctggagcctaagattccaagcttcctttttccagtttcatcctcctgtgtgagcctcacacacttccattttgttttccattaattaaagtgtgtgaagagctaaacaccctcattaaatagttttgtttgtttactaactggtattctcaagtactaaagtttgtacaaaaggaatgtttctgttcaacaggccccatgcggctgtgcagacaactggggggcttcccaggagcagctgtgtcccagcgcgggaaggatgaaagcagagggactcttaagtggttttgtgatttgagtcagaaaagaaaaaaaaaactgtgcttgaatgtctccaaagaatttgtgagagaatctttaagaaaagtaaaatcttttaatgatttttattcatg

SEQ ID NO: 18071 - protein, 145 aa, Homo sapiens; identical to SEQ ID NO: 18069

SEQ ID NO: 18072 - DNA, 1844 bp, Homo sapiens
attcggggtgagggccgtccgcggcctcgctttcgcctcctccgagccgggccggcgatggccgcagctgtgaggcgagcagaagaatagaaggaaggtgataggatgtgatgatagaatttgtgatagccaagcaacaacttttcctaattcggcatgttaaaaaataagggtcactcatctaagaaagataacttggcagtcaatgcagttgctttacaagatcacattttacatgatcttcaacttcgaaatctttcagttgcagatcattctaagacacaagtacaaaagaaagagaacaaatctctaaaaagagatacaaaggcaataatagatactggacttaaaaaaactacacagtgccccaaactagaagactcagaaaaagaatatgttcttgatcccaaaccgccgccgttgactttggcacagaagttgggcctcattgggcctccaccacctccactgtcatcagatgaatgggagaaggtgaaacagcgctctctcctgcaaggggactccgtgcaaccatgccccatctgtaaagaagaattcgagcttcgtcctcaggtgctgctttcatgctcccatgtgttccacaaagcatgtcttcaggcttttgaaaagttcacaaataagaaaacctgtcctctctgtagaaagaaccagtatcaaacccgagtgatacacgatggggcccgcctgttcagaatcaagtgtgtgaccagaatccaagcctactggagaggatgtgttgttagaaagtggtacagaaacctgaggaaaacagtacctcccacagatgccaagttaagaaaaaaattctttgaaaaaaagttcacagaaatcagccaccgcatcctgtgctcatacaacaccaacattgaagagctctttgcagaaatcgatcagtgcttggccataaatcgaagtgttcttcagcagttggaagaaaaatgtggccatgagatcacagaagaggaatgggagaaaatccaagtgcagaatgaaacttccgcatgtttcgaagacccatgtctcggggcacatggttcgcatttcagtttaagtaactttctgctgtgatgaaactaacccgcgtggcctcttcccgtcctgtgtgccgcaggctctgcgccgggagacccacgagtgctccatctgcctggcccctctctccgctgctggcggtcagcgcgtgggtgcaggcaggcgttccagagagatggccctcctgtcctgctcacatgtgttccaccatgcgtgtctgctggcactagaggagttctccgtgggagacaggcctcctttccatgcctgtcctctctgccgctcctgctaccagaagaagattcttgaatgttgaattcatagtcaaggaaagttaggtaattctgaggaaaaaagtttaccatcattttggatgaactgcatgagttctgggttaagtactacaatgtaatctgtttcccagggaaataagctattggtagttgtaggaaatcttagtatattttaaaagctgacatcccacctaattttaatctttggtctctaaaaagtaaatttcaaatttatgagtttaatcacttcaaatatgaatagcaaaaaatgagagcttgcttacttctaaaaattgaggttaagatatagctagtgtctgaacgacactccttaaagtaagttccaaatgtaaaacactccttaagttccaaatgttttccgctaatagtctgtcctaaagcctttgccattcctaatactcgttttgtaataattgctgtatttctgtgtaataaaatataaaaataaaatattcagtggtattcaacatcaaaaaa

SEQ ID NO: 18073 - protein, 310 aa, Homo sapiens
MLKNKGHSSKKDNLAVNAVALQDHILHDLQLRNLSVADHSKTQVQKKENKSLKRDTKAIIDTGLKKTTQCPKLEDSEKEYVLDPKPPPLTLAQKLGLIGPPPPPLSSDEWEKVKQRSLLQGDSVQPCPICKEEFELRPQVLLSCSHVFHKACLQAFEKFTNKKTCPLCRKNQYQTRVIHDGARLFRIKCVTRIQAYWRGCVVRKWYRNLRKTVPPTDAKLRKKFFEKKFTEISHRILCSYNTNIEELFAEIDQCLAINRSVLQQLEEKCGHEITEEEWEKIQVQNETSACFEDPCLGAHGSHFSLSNFLL

SEQ ID NO: 18074 - DNA, 1064 bp, Homo sapiens
gtatattttgaatacatctgtcttcataaaatacaccatgtccaaaatctaaaagggccaattccaaattattccaccagctttgaagggaattgaagcaagaataacaagacagaagaatagaaggaaggtgataggatgtgatgatagaatttgtgatagccaagcaacaacttttcctaattcggcatgttaaaaaataagggtcactcatctaagaaagataacttggcagtcaatgcagttgctttacaagatcacattttacatgatcttcaacttcgaaatctttcagttgcagatcattctaagacacaagtacaaaagaaagagaacaaatctctaaaaagagatacaaaggcaataatagatactggacttaaaaaaactacacagtgccccaaactagaagactcagaaaaagaatatgttcttgatcccaaaccgccgccgttgactttggcacagaagttgggcctcattgggcctccaccacctccactgtcatcagatgaatgggagaaggtgaaacagcgctctctcctgcaaggggactccgtgcaaccatgccccatctgtaaagaagaattcgagcttcgtcctcaggtgtttagcatacgagggtgagctagagagctcctgggctgtttcctagggacgaggcccagagctggagcctaagattccaagcttcctttttccagtttcatcctcctgtgtgagcctcacacacttccattttgttttccattaattaaagtgtgtgaagagctaaacaccctcattaaatagttttgtttgtttactaactggtattctcaagtactaaagtttgtacaaaaggaatgtttctgttcaacaggccccatgcggctgtgcagacaactggggggcttcccaggagcagctgtgtcccagcgcgggaaggatgaaagcagagggactcttaagtggttttgtgatttgagtcagaaaagaaaaaaaaaactgtgcttgaatgtctccaaagaatttgtgagagaatctttaagaaaagtaaaatcttttaatgatttttattcatg

SEQ ID NO: 18075 - protein, 145 aa, Homo sapiens; identical to SEQ ID NO: 18069

SEQ ID NO: 18076 - DNA, 1753 bp, Homo sapiens
gtatattttgaatacatctgtcttcataaaatacaccatgtccaaaatctaaaagggccaattccaaattattccaccagctttgaagggaattgaagcaagaataacaagacagaagaatagaaggaaggtgataggatgtgatgatagaatttgtgatagccaagcaacaacttttcctaattcggcatgttaaaaaataagggtcactcatctaagaaagataacttggcagtcaatgcagttgctttacaagatcacattttacatgatcttcaacttcgaaatctttcagttgcagatcattctaagacacaagtacaaaagaaagagaacaaatctctaaaaagagatacaaaggcaataatagatactggacttaaaaaaactacacagtgccccaaactagaagactcagaaaaagaatatgttcttgatcccaaaccgccgccgttgactttggcacagaagttgggcctcattgggcctccaccacctccactgtcatcagatgaatgggagaaggtgaaacagcgctctctcctgcaaggggactccgtgcaaccatgccccatctgtaaagaagaattcgagcttcgtcctcaggtgctgctttcatgctcccatgtgttccacaaagcatgtcttcaggcttttgaaaagttcacaaataagaaaacctgtcctctctgtagaaagaaccagtatcaaacccgagtgatacacgatggggcccgcctgttcagaatcaagtgtgtgaccagaatccaagcctactggagaggatgtgttgttagaaagtggtacagaaacctgaggaaaacagtacctcccacagatgccaagttaagaaaaaaattctttgaaaaaaagttcacagaaatcagccaccgcatcctgtgctcatacaacaccaacattgaagagctctttgcagaaatcgatcagtgcttggccataaatcgaagtgttcttcagcagttggaagaaaaatgtggccatgagatcacagaagaggaatgggagaaaatccaagtgcaggctctgcgccgggagacccacgagtgctccatctgcctggcccctctctccgctgctggcggtcagcgcgtgggtgcaggcaggcgttccagagagatggccctcctgtcctgctcacatgtgttccaccatgcgtgtctgctggcactagaggagttctccgtgggagacaggcctcctttccatgcctgtcctctctgccgctcctgctaccagaagaagattcttgaatgttgaattcatagtcaaggaaagttaggtaattctgaggaaaaaagtttaccatcattttggatgaactgcatgagttctgggttaagtactacaatgtaatctgtttcccagggaaataagctattggtagttgtaggaaatcttagtatattttaaaagctgacatcccacctaattttaatctttggtctctaaaaagtaaatttcaaatttatgagtttaatcacttcaaatatgaatagcaaaaaatgagagcttgcttacttctaaaaattgaggttaagatatagctagtgtctgaacgacactccttaaagtaagttccaaatgtaaaacactccttaagttccaaatgttttccgctaatagtctgtcctaaagcctttgccattcctaatactcgttttgtaataattgctgtatttctgtgtaataaaatataaaaataaaatattcagtggtattcaacatcaaaaaa

SEQ ID NO: 18077 - protein, 362 aa, Homo sapiens; identical to SEQ ID NO: 2172

SEQ ID NO: 18078 - DNA, 742 bp, Homo sapiens
agatggtggtgatgaataaaataaatggctctccttaggagccttgaaaatgactatggtttctctgcactgtgagagcgacatgtgcagcacctgggcaggcgtgaggggtggacttactttgtggaacacatgggagcatgaaagcagcacctgttcatgaggaaacagaacgacgttgaagtttacaaaagagaagcagcatgtatccaacagttaaaatcctgaatgcttagaagatggggcatggttgcacggagtccccttgcaggagagagcgctgtttcaccttctcccattcatctgatgacagtggaggtggtggaggcccaatgaggcccaacttctgtgctaaagtaagacagcacaggacaggagttagagtgtcttttagcatatggcacccacctataactttaatgacaccatttgcaaacaaagattaaagaactacatatagatcacatactttatttcacaatagaagctgtccattggtatccacagggaatgtgttccaggacattccaaggatgctcaagtccctgatagaagatggtggagtatttgcatacaacccatgcatatcctcctgtatactgccagtcatctcgattaccaataattcctaatgcaagtgctatgtaaatagctgttatactatattgtttttaatctgtattatttttattatattgttgtattgttattttttattcatttattaaaattttgatctgtg

SEQ ID NO: 18079 - protein, 68 aa, Homo sapiens
MGHGCTESPCRRERCFTFSHSSDDSGGGGGPMRPNFCAKVRQHRTGVRVSFSIWHPPITLMTPFANKD

SEQ ID NO: 18080 - DNA, 831 bp, Homo sapiens
cagcttctattgtgaaataaacacagaagttgggcctcattgggcctccaccacctccactgtcatcagatgaatgggagaagaaagaaccagtatcaaacccgagtgatacacgatggggcccgcctgttcagaatcaagtgtgtgaccagaatccaagcctactggagaggatgtgttgttagaaagtggtacagaaacctgaggaaaacagtacctcccacagatgccaagttaagaaaaaaattctttgaaaaaaagacacaagactggaaaccagcttaatttttcccatctcctgggctatatgtaaatgaagacatctgctgcacatctcatagtaatgaaaatagaagctgcctataaaaataaagcccccacatgctaccattgtattgagtacctcgtggggtcatcacaatgagctttagagctaacttccatgtctacccttcctcttaaccactatttatgctttagttttacttttgggggacttatttaacaatttcccattccttgtccccatatgaaaaggacagtcctaccccatcagcctgtggcttcaggcaaacagcagcagctccgaggctgtcatatgaaagccatcacttcttcctggcagtgttggcctgagaagagctgtagcatttataatggcccagcacacagtaggtgctggaaattctgtatttattatcactattaactcctttcctagaatatggagatgagttactgtgtgttctgttcctgagagcagtgtctctgatcttcagagatcattcgtctcgggtgttcattctcaatttggtaaaggaccgccatgca

SEQ ID NO: 18081 - protein, 71 aa, Homo sapiens
MNGRRKNQYQTRVIHDGARLFRIKCVTRIQAYWRGCVVRKWYRNLRKTVPPTDAKLRKKFFEKKTQDWKPA

SEQ ID NO: 18082 - DNA, 568 bp, Homo sapiens
tcattgaggaaatgctttaattcctcttaaggaagaaaaaagtatgaattgttaataagtgtaaaaatgatatttggttacatagggtaagtggatagtaaaatataaattagactcaactgcatgaaaagtctatgcgaactgctttcatggactggcacttggagttgtgtactttgtgagccttcattgtaaagggtgtgctgaccagcccctctgggcagacacaggtgcaagggcccaggtgtgagcacccagccggcgtgcctgtctaggtgcatgtggaggccgctcgggtggttcgcgcctgctgcagggcacgcttcctgcagggagccgcgtggcctcttcccgtcctgtgtgccgcaggctctgcgccgggagacccacgagtgctccatctgcctggcccctctctccgctgctggcggtcagcgcgtgggtgcaggcaggcgttccagagagatggccctcctgtcctgctcacatgtgttccaccatgcgtgtctgctggcactagaggagttctccgtgggagacaggcctcctttccatgcctgtcctctct

SEQ ID NO: 18083 - protein, 95 aa, Homo sapiens
MWRPLGWFAPAAGHASCREPRGLFPSCVPQALRRETHECSICLAPLSAAGGQRVGAGRRSREMALLSCSHVFHHACLLALEEFSVGDRPPFHACP

SEQ ID NO: 18084 - DNA, 2281 bp, Homo sapiens
ttcataaacttcacttaccaaatacttcaagggattcagaaacagccaagccttctgtaaatgggcatcagaaagcactgtgagacgcacagacggcgtcttctgccaccaagagacccgagaactccagattcacgacattcctgtcccatgtagaagcatttccattcaaccgtggcccctcttcagaacctagacctatcagtgccatttttttttcataatctacgaagaacttggctatggctgatcttttttaaatttaactttctgatggaccctgtagtttccagttaagtgcagattccttacagacatatagaacagcgcattcttctgtagacatttgctcatgttggtaaatacaatcacccatatgaaaaaattgttttcacctgatatgaaaatgttagaaaaggcaaactccgggacttctaaagatttacttaaatcccattatgtactttattcagaatgtagaagctgacttgaaaggcatccttggtactaagtgaagcttattcagaaaatgcatttttcaaatgcaatggcaactgcttgtagatatcatttttgcagtgtatgttggagctgtaatggttgcaattatgtttcttatttccttaaaagcaaaaagcgtagtttctgatttatgttatagaatgatactgattagactttgagccaaggggaaaatactaaattcttttaaacctggagccttagagagccacaggaatatcttctgttgtacagtctaataagctgtggtaggaagtatcatgtaatcacagtttaatgacagtttatgtatatatataattcagtattccctctgataacatagttgccagtgtttaatacacttgtaacttggatttttaccttataggctatatgtatactcagttttttaaagcatttttttcagagatcacttaattccccatgcttctgcaatgcatataaaaactataaatgccgagtggtagaaactcctctttctcagcctcagtgatgacctcgtctgccagggacacaggttttcatcatttacaggctcttatgtgctagttttgttggtagcacgttatttaatgcataaaggcagaattcttacaagtttttttttttaatgtgaacatagatgcagcaccgactttttaaacttgaaaaaactggtataatgttaacttttaaaaataacatttggacacactagtaattgatttttgtttacagattgttttgtttacaaattgttagtctttgtttctatgagatacttttagtgtgactttttaaatgtcttagaaattaaaagttgtacaaaaagtgatttcatatttggtttataagcatttatatgtggggtttatttgttcttttgttttttccatcttaaatattatcatggctaaaacttaagggtatttatagtttaattccatttcagttttatagagggcagtaattattctgatgaatgttgaattaagaaatggatattttctttctctgttgtgcagttattggtagatcaatttcttataacccacaatgtagcatcaataattgatagcatgtattttatttaattacttgaattatttagacttgatttctctaattttttccataaaaggactgaacagcacctacttgtggtctggacagcttaacccagagttcctggaagaataaatgctgttagcatctggttaatttactggcagacagaagcctacttacagtggctttcaactttttgaccacagtaagaaataacccattacacacacacacacacacacactctctctctctctctctctctctctctgtctctcagatacgtataagcaaaaatttaacaagacagtacttgtttttcctaagtgtgcatgctggcatcttctgttttattatttttaaaaatactagacacagacactaagttactttgtggcctcctaatagatggcagacttcagtttgaaaagcatccctttggaatgtggtttaaaagaagaaataatacaaagacctttttggagttttttttttttttggtttttgaatattgtttaggtaaaaattattgctgcaaacacaactgaagcaaaagtactgtgtacgcaaattacttgttgcactgtagaaaatgtaatatcaggagaagttcctaaaactcacaaatatatacaaaatttcaaaacttggtgattgatccatatgtcttgaaggaatattaggcaataaacttaccttttcaagagaa

SEQ ID NO: 18085 - protein, 31 aa, Homo sapiens
MPSGRNSSFSASVMTSSARDTGFHHLQALMC

SEQ ID NO: 18086 - DNA, 5802 bp, Homo sapiens
agtcagagctgctcgtctgaggctgctgaggcgacggccggtgtcgtggtcgcggtacctgttccaacacggctcgcgggcccgtgccggctccggtccccggcgcggctgtccgagcccctgcggcgggcggacgatggtgtggcggagcacgcggacgcgggcggcgcggcggcgggcatgaaggaggatggaagggcaggacgaggtgtcggcgcgggagcagcacttccacagccaagtgcgggagtccacgatatgtttccttctttttgccattctctacgttgtttcctacttcatcatcacaagatacaagagaaaatcagatgaacaagaagatgaagatgccatcgtcaacaggatttcgttgtttttgagcacgttcactctcgcagtgtcagctggggctgttttgcttttacccttctcaatcatcagcaatgaaatcctgctttcttttcctcagaactactatattcagtggctaaatggctccctgattcatggtttgtggaatcttgcttcccttttttccaacctttgtttatttgtattgatgccctttgcctttttctttctggaatcagaaggctttgctggcctgaaaaagggaatccgagcccgcattttagagactttggtcatgcttcttcttcttgcgttactcattcttgggatagtgtgggtagcttcagcactcattgacaacgatgccgcaagcatggaatctttatatgatctctgggagttctatctaccctatttatattcctgtatatcattgatgggatgtttgttacttctcttgtgtacaccagttggcctttctcgtatgttcacagtgatgggtcagttgctagtgaagccaacaattcttgaagacctggatgaacaaatttatatcattaccttagaggaagaagcactccagagacgactaaatgggctgtcttcatcggtggaatacaacataatggagttggaacaagaacttgaaaatgtaaagactcttaagacaaaattagagaggcgaaaaaaggcttcagcatgggaaagaaatttggtgtatcccgctgttatggttctccttcttattgagacatccatctcggtcctcttggtggcttgtaatattctttgcctattggttgatgaaacagcaatgccaaaaggaacaagggggcctggaataggaaatgcctctctttctacgtttggttttgtgggagctgcgcttgaaatcattttgattttctatcttatggtgtcctctgttgtcggcttctatagccttcgattttttggaaactttactcccaagaaagatgacacaactatgacaaagatcattggaaattgtgtgtccatcttggttttgagctctgctctgcctgtgatgtcgagaacactgggaatcactagatttgatctacttggcgactttggaaggtttaattggctgggaaatttctatattgtattatcctacaatttgctttttgctattgtgacaacattgtgtctggtccgaaaattcacctctgcagttcgagaagaacttttcaaggccctagggcttcataaacttcacttaccaaatacttcaagggattcagaaacagccaagccttctgtaaatgggcatcagaaagcactgtgagacgcacagacggcgtcttctgccaccaagagacccgagaactccagattcacgacattcctgtcccatgtagaagcatttccattcaaccgtggcccctcttcagaacctagacctatcagtgccatttttttttcataatctacgaagaacttggctatggctgatcttttttaaatttaactttctgatggaccctgtagtttccagttaagtgcagattccttacagacatatagaacagcgcattcttctgtagacatttgctcatgttggtaaatacaatcacccatatgaaaaaattgttttcacctgatatgaaaatgttagaaaaggcaaactccgggacttctaaagatttacttaaatcccattatgtactttattcagaatgtagaagctgacttgaaaggcatccttggtactaagtgaagcttattcagaaaatgcatttttcaaatgcaatggcaactgcttgtagatatcatttttgcagtgtatgttggagctgtaatggttgcaattatgtttcttatttccttaaaagcaaaaagcgtagtttctgatttatgttatagaatgatactgattagactttgagccaaggggaaaatactaaattcttttaaacctggagccttagagagccacaggaatatcttctgttgtacagtctaataagctgtggtaggaagtatcatgtaatcacagtttaatgacagtttatgtatatatataattcagtattccctctgataacatagttgccagtgtttaatacacttgtaacttggatttttaccttataggctatatgtatactcagttttttaaagcatttttttcagagatcacttaattccccatgcttctgcaatgcatataaaaactataaatgccgagtggtagaaactcctctttcttcatagtcctcaggctttggttacatttgcatatgccatttgaagcctccagcttttaccagtttaacatccaaagttcacagcatcagcattcatggtgtaagaacagttttgcagtataacacgatctgataatcattcagttattaaattgtaaataattattgggatggtttcttggctttaagtccactgaataaaaactatgaaattgcactctgtgtcaaccatccactaggatagaataccgaaatctgtgcatgcaaaaataggagatgggcccatttgcacacaattcgtagttatgcagtctgctatataaatatgttcacatgcactgtgtgtatgaaaatagatggtctgtgttcagacaaaagtaaaacatttttttcaaattgttacatttaaaggttttctgggagaaatttatgaaacgcaggctgtgtctatttgacatcagaaatttccactttaaaccaaaataataagaaactttaatctgtatatttacaacctttgttgagtacacttcccccttatttatacgtctgcatttccttccgagcttcacatctttctaaaatgcagcttggttttaaaataaaagaacattcattttgtgattctaaacaagcttcagtaaataccaccagtatagtactggtgaatttctcagcataaaatcgacatacctaaaaagttaataaaattcagctcttttccaatttcattgttatgcctattgaagtattaattgccaggtttgatttttagtgaagcttggagtccatactttgagcagaccaagtgaagggaagaacagaaagaaactcaggagtagagtaatatcacttctcacttacaccactttcaggcacatccaaagagttcctagatacttggaaaatgtctgaaaatttttaagtaaaatactaaacttttcagtgtttagctcaactttttgttcatttggaagtttctctccatccgaggacttaagccagttttggatttgtaagccctgagtacaatacacttcctggaggcatcctcactgctgttgaagcaaaggatatgcatggggtggaaggacggcttcgaacctgggactcatatgccttgagaacaaatagattgttacagccttgggctgctgcgtaatcacggttcctcgaggctcttcctgagcacatgcccaagcatctgcctctggagagactgactccaaatgcaggtgcttccattggagctaggtcggaggctgctttatatgacgaactccagaaatggatgccagaatacggaggccaaacgttctgagtcctggtaaggacagtcgctctgggggtcctcattttactgcagttcctgcacgccagtgaaagagaggagatagaccctggaaggcagagctgcagatgctcatcatcaggtcaattctggagctacagttttgtttctgactggatagggatgcaccagtgactgtcacatcaagcagtccttttattctctctcctttagtatcgattttaaagggcattaggcactatggttccagagtttcttggggaaaacttgcagattcttattaattggttctgcaatacttaaataaattattttacaattataagttttcagattataacatttgtattaatttttactgattttccaagatacttcttagatttactatttacgtagctttatgtacattctctgtaaaaatagacctctaaatatgaggctttacatgaaatttgtacacacatacacactaatgttagctccttaaattgctgcactaaggtgctggttagtagagatggacggagcctctcgcgttttgctctcagatgtgttaaaggcgcacgtgtacctgctctcagcggcagtgcggcctccccatctgctgggtgcccatggccctccctgcagcctcagtgatgacctcgtctgccagggacacaggttttcatcatttacaggctcttatgtgctagttttgttggtagcacgttatttaatgcataaaggcagaattcttacaagtttttttttttaatgtgaacatagatgcagcaccgactttttaaacttgaaaaaactggtataatgttaacttttaaaaataacatttggacacactagtaattgatttttgtttacagattgttttgtttacaaattgttagtctttgtttctatgagatacttttagtgtgactttttaaatgtcttagaaattaaaagttgtacaaaaagtgatttcatatttggtttataagcatttatatgtggggtttatttgttcttttgttttttccatcttaaatattatcatggctaaaacttaagggtatttatagtttaattccatttcagttttatagagggcagtaattattctgatgaatgttgaattaagaaatggatattttctttctctgttgtgcagttattggtagatcaatttcttataacccacaatgtagcatcaataattgatagcatgtattttatttaattacttgaattatttagacttgatttctctaattttttccataaaaggactgaacagcacctacttgtggtctggacagcttaacccagagttcctggaagaataaatgctgttagcatctggttaatttactggcagacagaagcctacttacagtggctttcaactttttgaccacagtaagaaataacccattacacacacacacacacacacactctctctctctctctctctctctctctgtctctcagatacgtataagcaaaaatttaacaagacagtacttgtttttcctaagtgtgcatgctggcatcttctgttttattatttttaaaaatactagacacagacactaagttactttgtggcctcctaatagatggcagacttcagtttgaaaagcatccctttggaatgtggtttaaaagaagaaataatacaaagacctttttggagttttttttttttttggtttttgaatattgtttaggtaaaaattattgctgcaaacacaactgaagcaaaagtactgtgtacgcaaattacttgttgcactgtagaaaatgtaatatcaggagaagttcctaaaactcacaaatatatacaaaatttcaaaacttggtgattgatccatatgtcttgaaggaatattaggcaataaacttaccttttcaagagaa

SEQ ID NO: 18087 - protein, 490 aa, Homo sapiens; identical to SEQ ID NO: 2174

SEQ ID NO: 18088 - DNA, 5015 bp, Homo sapiens
agtcagagctgctcgtctgaggctgctgaggcgacggccggtgtcgtggtcgcggtacctgttccaacacggctcgcgggcccgtgccggctccggtccccggcgcggctgtccgagcccctgcggcgggcggacgatggtgtggcggagcacgcggacgcgggcggcgcggcggcgggcatgaaggaggatggaagggcaggacgaggtgtcggcgcgggagcagcacttccacagccaagtgcgggagtccacgatatgtttccttctttttgccattctctacgttgtttcctacttcatcatcacaagatacaagagaaaatcagatgaacaagaagatgaagatgccatcgtcaacaggatttcgttgtttttgagcacgttcactctcgcagtgtcagctggggctgttttgcttttacccttctcaatcatcagcaatgaaatcctgctttcttttcctcagaactactatattcagtggctaaatggctccctgattcatggtttgtggaatcttgcttcccttttttccaacctttgtttatttgtattgatgccctttgcctttttctttctggaatcagaaggctttgctggcctgaaaaagggaatccgagcccgcattttagagactttggtcatgcttcttcttcttgcgttactcattcttgggatagtgtgggtagcttcagcactcattgacaacgatgccgcaagcatggaatctttatatgatctctgggagttctatctaccctatttatattcctgtatatcattgatgggatgtttaaacttcacttaccaaatacttcaagggattcagaaacagccaagccttctgtaaatgggcatcagaaagcactgtgagacgcacagacggcgtcttctgccaccaagagacccgagaactccagattcacgacattcctgtcccatgtagaagcatttccattcaaccgtggcccctcttcagaacctagacctatcagtgccatttttttttcataatctacgaagaacttggctatggctgatcttttttaaatttaactttctgatggaccctgtagtttccagttaagtgcagattccttacagacatatagaacagcgcattcttctgtagacatttgctcatgttggtaaatacaatcacccatatgaaaaaattgttttcacctgatatgaaaatgttagaaaaggcaaactccgggacttctaaagatttacttaaatcccattatgtactttattcagaatgtagaagctgacttgaaaggcatccttggtactaagtgaagcttattcagaaaatgcatttttcaaatgcaatggcaactgcttgtagatatcatttttgcagtgtatgttggagctgtaatggttgcaattatgtttcttatttccttaaaagcaaaaagcgtagtttctgatttatgttatagaatgatactgattagactttgagccaaggggaaaatactaaattcttttaaacctggagccttagagagccacaggaatatcttctgttgtacagtctaataagctgtggtaggaagtatcatgtaatcacagtttaatgacagtttatgtatatatataattcagtattccctctgataacatagttgccagtgtttaatacacttgtaacttggatttttaccttataggctatatgtatactcagttttttaaagcatttttttcagagatcacttaattccccatgcttctgcaatgcatataaaaactataaatgccgagtggtagaaactcctctttcttcatagtcctcaggctttggttacatttgcatatgccatttgaagcctccagcttttaccagtttaacatccaaagttcacagcatcagcattcatggtgtaagaacagttttgcagtataacacgatctgataatcattcagttattaaattgtaaataattattgggatggtttcttggctttaagtccactgaataaaaactatgaaattgcactctgtgtcaaccatccactaggatagaataccgaaatctgtgcatgcaaaaataggagatgggcccatttgcacacaattcgtagttatgcagtctgctatataaatatgttcacatgcactgtgtgtatgaaaatagatggtctgtgttcagacaaaagtaaaacatttttttcaaattgttacatttaaaggttttctgggagaaatttatgaaacgcaggctgtgtctatttgacatcagaaatttccactttaaaccaaaataataagaaactttaatctgtatatttacaacctttgttgagtacacttcccccttatttatacgtctgcatttccttccgagcttcacatctttctaaaatgcagcttggttttaaaataaaagaacattcattttgtgattctaaacaagcttcagtaaataccaccagtatagtactggtgaatttctcagcataaaatcgacatacctaaaaagttaataaaattcagctcttttccaatttcattgttatgcctattgaagtattaattgccaggtttgatttttagtgaagcttggagtccatactttgagcagaccaagtgaagggaagaacagaaagaaactcaggagtagagtaatatcacttctcacttacaccactttcaggcacatccaaagagttcctagatacttggaaaatgtctgaaaatttttaagtaaaatactaaacttttcagtgtttagctcaactttttgttcatttggaagtttctctccatccgaggacttaagccagttttggatttgtaagccctgagtacaatacacttcctggaggcatcctcactgctgttgaagcaaaggatatgcatggggtggaaggacggcttcgaacctgggactcatatgccttgagaacaaatagattgttacagccttgggctgctgcgtaatcacggttcctcgaggctcttcctgagcacatgcccaagcatctgcctctggagagactgactccaaatgcaggtgcttccattggagctaggtcggaggctgctttatatgacgaactccagaaatggatgccagaatacggaggccaaacgttctgagtcctggtaaggacagtcgctctgggggtcctcattttactgcagttcctgcacgccagtgaaagagaggagatagaccctggaaggcagagctgcagatgctcatcatcaggtcaattctggagctacagttttgtttctgactggatagggatgcaccagtgactgtcacatcaagcagtccttttattctctctcctttagtatcgattttaaagggcattaggcactatggttccagagtttcttggggaaaacttgcagattcttattaattggttctgcaatacttaaataaattattttacaattataagttttcagattataacatttgtattaatttttactgattttccaagatacttcttagatttactatttacgtagctttatgtacattctctgtaaaaatagacctctaaatatgaggctttacatgaaatttgtacacacatacacactaatgttagctccttaaattgctgcactaaggtgctggttagtagagatggacggagcctctcgcgttttgctctcagatgtgttaaaggcgcacgtgtacctgctctcagcggcagtgcggcctccccatctgctgggtgcccatggccctccctgcagcctcagtgatgacctcgtctgccagggacacaggttttcatcatttacaggctcttatgtgctagttttgttggtagcacgttatttaatgcataaaggcagaattcttacaagtttttttttttaatgtgaacatagatgcagcaccgactttttaaacttgaaaaaactggtataatgttaacttttaaaaataacatttggacacactagtaattgatttttgtttacagattgttttgtttacaaattgttagtctttgtttctatgagatacttttagtgtgactttttaaatgtcttagaaattaaaagttgtacaaaaagtgatttcatatttggtttataagcatttatatgtggggtttatttgttcttttgttttttccatcttaaatattatcatggctaaaacttaagggtatttatagtttaattccatttcagttttatagagggcagtaattattctgatgaatgttgaattaagaaatggatattttctttctctgttgtgcagttattggtagatcaatttcttataacccacaatgtagcatcaataattgatagcatgtattttatttaattacttgaattatttagacttgatttctctaattttttccataaaaggactgaacagcacctacttgtggtctggacagcttaacccagagttcctggaagaataaatgctgttagcatctggttaatttactggcagacagaagcctacttacagtggctttcaactttttgaccacagtaagaaataacccattacacacacacacacacacacactctctctctctctctctctctctctctgtctctcagatacgtataagcaaaaatttaacaagacagtacttgtttttcctaagtgtgcatgctggcatcttctgttttattatttttaaaaatactagacacagacactaagttactttgtggcctcctaatagatggcagacttcagtttgaaaagcatccctttggaatgtggtttaaaagaagaaataatacaaagacctttttggagttttttttttttttggtttttgaatattgtttaggtaaaaattattgctgcaaacacaactgaagcaaaagtactgtgtacgcaaattacttgttgcactgtagaaaatgtaatatcaggagaagttcctaaaactcacaaatatatacaaaatttcaaaacttggtgattgatccatatgtcttgaaggaatattaggcaataaacttaccttttcaagagaa

SEQ ID NO: 18089 - protein, 220 aa, Homo sapiens
MEGQDEVSAREQHFHSQVRESTICFLLFAILYVVSYFIITRYKRKSDEQEDEDAIVNRISLFLSTFTLAVSAGAVLLLPFSIISNEILLSFPQNYYIQWLNGSLIHGLWNLASLFSNLCLFVLMPFAFFFLESEGFAGLKKGIRARILETLVMLLLLALLILGIVWVASALIDNDAASMESLYDLWEFYLPYLYSCISLMGCLNFTYQILQGIQKQPSLL

SEQ ID NO: 18090 - DNA, 1343 bp, Homo sapiens
ttcataaacttcacttaccaaatacttcaagggattcagaaacagccaagccttctgtaaatgggcatcagaaagcactgtgagacgcacagacggcgtcttctgccaccaagagacccgagaactccagattcacgacattcctgtcccatgtagaagcatttccattcaaccgtggcccctcttcagaacctagacctatcagtgccatttttttttcataatctacgaagaacttggctatggctgatcttttttaaatttaactttctgatggaccctgtagtttccagttaagtgcagattccttacagacatatagaacagcgcattcttctgtagacatttgctcatgttggtaaatacaatcacccatatgaaaaaattgttttcacctgatatgaaaatgttagaaaaggcaaactccgggacttctaaagatttacttaaatcccattatgtactttattcagaatgtagaagctgacttgaaaggcatccttggtactaagtgaagcttattcagaaaatgcatttttcaaatgcaatggcaactgcttgtagatatcatttttgcagtgtatgttggagctgtaatggttgcaattatgtttcttatttccttaaaagcaaaaagcgtagtttctgatttatgttatagaatgatactgattagactttgagccaaggggaaaatactaaattcttttaaacctggagccttagagagccacaggaatatcttctgttgtacagtctaataagctgtggtaggaagtatcatgtaatcacagtttaatgacagtttatgtatatatataattcagtattccctctgataacatagttgccagtgtttaatacacttgtaacttggatttttaccttataggctatatgtatactcagttttttaaagcatttttttcagagatcacttaattccccatgcttctgcaatgcatataaaaactataaatgccgagtggtagaaactcctctttctcagcctcagtgatgacctcgtctgccagggacacaggttttcatcatttacaggctcttatgtgctagttttgttggtagcacgttatttaatgcataaaggcagaattcttacaagtttttttttttaatgtgaacatagatgcagcaccgactttttaaacttgaaaaaactggtataatgttaacttttaaaaataacatttggacacactagtaattgatttttgtttacagattgttttgtttacaaattgttagtctttgtttctatgagatacttttagtgtgactttttaaatgtcttagaaattaaaagttgtacaaaaagtgatttc

SEQ ID NO: 18091 - protein, 31 aa, Homo sapiens; identical to SEQ ID NO: 18085

SEQ ID NO: 18092 - DNA, 4864 bp, Homo sapiens
agtcagagctgctcgtctgaggctgctgaggcgacggccggtgtcgtggtcgcggtacctgttccaacacggctcgcgggcccgtgccggctccggtccccggcgcggctgtccgagcccctgcggcgggcggacgatggtgtggcggagcacgcggacgcgggcggcgcggcggcgggcatgaaggaggatggaagggcaggacgaggtgtcggcgcgggagcagcacttccacagccaagtgcgggagtccacgatatgtttccttctttttgccattctctacgttgtttcctacttcatcatcacaagatacaagagaaaatcagatgaacaagaagatgaagatgccatcgtcaacaggatttcgttgtttttgagcacgttcactctcgcagtgtcagctggggctgttttgcttttacccttctcaatcatcagcaatgaaatcctgctttcttttcctcagaactactatattcagtggctaaatggctccctgattcatggtttgtggaatcttgcttcccttttttccaacctttgtttatttgtattgatgccctttgcctttttctttctggaatcagaaggctttgctggcctgaaaaagggaatccgagcccgcattttagagactttggtcatgcttcttcttcttgcgttactcattcttgggatagtgtgggtagcttcagcactcattgacaacgatgccgcaagcatggaatctttatatgatctctgggagttctatctaccctatttatattcctgtatatcattgatgggatgtttgttacttctcttgtgtacaccagttggcctttctcgtatgttcacagtgatgggtcagttgctagtgaagccaacaattcttgaagacctggatgaacaaatttatatcattaccttagaggaagaagcactccagagacgactaaatgggctgtcttcatcggtggaatacaacataatggagttggaacaagaacttgaaaatgtaaagactcttaagacaaaattagagaggcgaaaaaaggcttcagcatgggaaagaaatttggtgtatcccgctgttatggttctccttcttattgagacatccatctcggtcctcttggtggcttgtaatattctttgcctattggttgatgaaacagcaatgccaaaaggaacaagggggcctggaataggaaatgcctctctttctacgtttggttttgtgggagctgcgcttgaaatcattttgattttctatcttatggtgtcctctgttgtcggcttctatagccttcgattttttggaaactttactcccaagaaagatgacacaactatgacaaagatcattggaaattgtgtgtccatcttggttttgagctctgctctgcctgtgatgtcgagaacactgggaatcactagatttgatctacttggcgactttggaaggtttaattggctgggaaatttctatattgtattatcctacaatttgctttttgctattgtgacaacattgtgtctggtccgaaaattcacctctgcagttcgagaagaacttttcaaggccctagggcttcataaacttcacttaccaaatacttcaagggattcagaaacagccaagccttctgtaaatgggcatcagaaagcactgtgagacgcacagacggcgtcttctgccaccaagagacccgagaactccagattcacgacattcctgtcccatgtagaagcatttccattcaaccgtggcccctcttcagaacctagacctatcagtgccatttttttttcataatctacgaagaacttggctatggctgatcttttttaaatttaactttctgatggaccctgtagtttccagttaagtgcagattccttacagacatatagaacagcgcattcttctgtagacatttgctcatgttggtaaatacaatcacccatatgaaaaaattgttttcacctgatatgaaaatgttagaaaaggcaaactccgggacttctaaagatttacttaaatcccattatgtactttattcagaatgtagaagctgacttgaaaggcatccttggtactaagtgaagcttattcagaaaatgcatttttcaaatgcaatggcaactgcttgtagatatcatttttgcagtgtatgttggagctgtaatggttgcaattatgtttcttatttccttaaaagcaaaaagcgtagtttctgatttatgttatagaatgatactgattagactttgagccaaggggaaaatactaaattcttttaaacctggagccttagagagccacaggaatatcttctgttgtacagtctaataagctgtggtaggaagtatcatgtaatcacagtttaatgacagtttatgtatatatataattcagtattccctctgataacatagttgccagtgtttaatacacttgtaacttggatttttaccttataggctatatgtatactcagttttttaaagcatttttttcagagatcacttaattccccatgcttctgcaatgcatataaaaactataaatgccgagtggtagaaactcctctttcttcatagtcctcaggctttggttacatttgcatatgccatttgaagcctccagcttttaccagtttaacatccaaagttcacagcatcagcattcatggtgtaagaacagttttgcagtataacacgatctgataatcattcagttattaaattgtaaataattattgggatggtttcttggctttaagtccactgaataaaaactatgaaattgcactctgtgtcaaccatccactaggatagaataccgaaatctgtgcatgcaaaaataggagatgggcccatttgcacacaattcgtagttatgcagtctgctatataaatatgttcacatgcactgtgtgtatgaaaatagatggtctgtgttcagacaaaagtaaaacatttttttcaaattgttacatttaaaggttttctgggagaaatttatgaaacgcaggctgtgtctatttgacatcagaaatttccactttaaaccaaaataataagaaactttaatctgtatatttacaacctttgttgagtacacttcccccttatttatacgtctgcatttccttccgagcttcacatctttctaaaatgcagcttggttttaaaataaaagaacattcattttgtgattctaaacaagcttcagtaaataccaccagtatagtactggtgaatttctcagcataaaatcgacatacctaaaaagttaataaaattcagctcttttccaatttcattgttatgcctattgaagtattaattgccaggtttgatttttagtgaagcttggagtccatactttgagcagaccaagtgaagggaagaacagaaagaaactcaggagtagagtaatatcacttctcacttacaccactttcaggcacatccaaagagttcctagatacttggaaaatgtctgaaaatttttaagtaaaatactaaacttttcagtgtttagctcaactttttgttcatttggaagtttctctccatccgaggacttaagccagttttggatttgtaagccctgagtacaatacacttcctggaggcatcctcactgctgttgaagcaaaggatatgcatggggtggaaggacggcttcgaacctgggactcatatgccttgagaacaaatagattgttacagccttgggctgctgcgtaatcacggttcctcgaggctcttcctgagcacatgcccaagcatctgcctctggagagactgactccaaatgcaggtgcttccattggagctaggtcggaggctgctttatatgacgaactccagaaatggatgccagaatacggaggccaaacgttctgagtcctggtaaggacagtcgctctgggggtcctcattttactgcagttcctgcacgccagtgaaagagaggagatagaccctggaaggcagagctgcagatgctcatcatcaggtcaattctggagctacagttttgtttctgactggatagggatgcaccagtgactgtcacatcaagcagtccttttattctctctcctttagtatcgattttaaagggcattaggcactatggttccagagtttcttggggaaaacttgcagattcttattaattggttctgcaatacttaaataaattattttacaattataagttttcagattataacatttgtattaatttttactgattttccaagatacttcttagatttactatttacgtagctttatgtacattctctgtaaaaatagacctctaaatatgaggctttacatgaaatttgtacacacatacacactaatgttagctccttaaattgctgcactaaggtgctggttagtagagatggacggagcctctcgcgttttgctctcagatgtgttaaaggcgcacgtgtacctgctctcagcggcagtgcggcctccccatctgctgggtgcccatggccctccctgcagcctcagtgatgacctcgtctgccagggacacaggttttcatcatttacaggctcttatgtgctagttttgttggtagcacgttatttaatgcataaaggcagaattcttacaagtttttttttttaatgtgaacatagatgcagcaccgactttttaaacttgaaaaaactggtataatgttaacttttaaaaataacatttggacacactagtaattgatttttgtttacagattgttttgtttacaaattgttagtctttgtttctatgagatacttttagtgtgactttttaaatgtcttagaaattaaaagttgtacaaaaagtgatttc

SEQ ID NO: 18093 - protein, 490 aa, Homo sapiens; identical to SEQ ID NO: 2174

SEQ ID NO: 18094 - DNA, 4077 bp, Homo sapiens
agtcagagctgctcgtctgaggctgctgaggcgacggccggtgtcgtggtcgcggtacctgttccaacacggctcgcgggcccgtgccggctccggtccccggcgcggctgtccgagcccctgcggcgggcggacgatggtgtggcggagcacgcggacgcgggcggcgcggcggcgggcatgaaggaggatggaagggcaggacgaggtgtcggcgcgggagcagcacttccacagccaagtgcgggagtccacgatatgtttccttctttttgccattctctacgttgtttcctacttcatcatcacaagatacaagagaaaatcagatgaacaagaagatgaagatgccatcgtcaacaggatttcgttgtttttgagcacgttcactctcgcagtgtcagctggggctgttttgcttttacccttctcaatcatcagcaatgaaatcctgctttcttttcctcagaactactatattcagtggctaaatggctccctgattcatggtttgtggaatcttgcttcccttttttccaacctttgtttatttgtattgatgccctttgcctttttctttctggaatcagaaggctttgctggcctgaaaaagggaatccgagcccgcattttagagactttggtcatgcttcttcttcttgcgttactcattcttgggatagtgtgggtagcttcagcactcattgacaacgatgccgcaagcatggaatctttatatgatctctgggagttctatctaccctatttatattcctgtatatcattgatgggatgtttaaacttcacttaccaaatacttcaagggattcagaaacagccaagccttctgtaaatgggcatcagaaagcactgtgagacgcacagacggcgtcttctgccaccaagagacccgagaactccagattcacgacattcctgtcccatgtagaagcatttccattcaaccgtggcccctcttcagaacctagacctatcagtgccatttttttttcataatctacgaagaacttggctatggctgatcttttttaaatttaactttctgatggaccctgtagtttccagttaagtgcagattccttacagacatatagaacagcgcattcttctgtagacatttgctcatgttggtaaatacaatcacccatatgaaaaaattgttttcacctgatatgaaaatgttagaaaaggcaaactccgggacttctaaagatttacttaaatcccattatgtactttattcagaatgtagaagctgacttgaaaggcatccttggtactaagtgaagcttattcagaaaatgcatttttcaaatgcaatggcaactgcttgtagatatcatttttgcagtgtatgttggagctgtaatggttgcaattatgtttcttatttccttaaaagcaaaaagcgtagtttctgatttatgttatagaatgatactgattagactttgagccaaggggaaaatactaaattcttttaaacctggagccttagagagccacaggaatatcttctgttgtacagtctaataagctgtggtaggaagtatcatgtaatcacagtttaatgacagtttatgtatatatataattcagtattccctctgataacatagttgccagtgtttaatacacttgtaacttggatttttaccttataggctatatgtatactcagttttttaaagcatttttttcagagatcacttaattccccatgcttctgcaatgcatataaaaactataaatgccgagtggtagaaactcctctttcttcatagtcctcaggctttggttacatttgcatatgccatttgaagcctccagcttttaccagtttaacatccaaagttcacagcatcagcattcatggtgtaagaacagttttgcagtataacacgatctgataatcattcagttattaaattgtaaataattattgggatggtttcttggctttaagtccactgaataaaaactatgaaattgcactctgtgtcaaccatccactaggatagaataccgaaatctgtgcatgcaaaaataggagatgggcccatttgcacacaattcgtagttatgcagtctgctatataaatatgttcacatgcactgtgtgtatgaaaatagatggtctgtgttcagacaaaagtaaaacatttttttcaaattgttacatttaaaggttttctgggagaaatttatgaaacgcaggctgtgtctatttgacatcagaaatttccactttaaaccaaaataataagaaactttaatctgtatatttacaacctttgttgagtacacttcccccttatttatacgtctgcatttccttccgagcttcacatctttctaaaatgcagcttggttttaaaataaaagaacattcattttgtgattctaaacaagcttcagtaaataccaccagtatagtactggtgaatttctcagcataaaatcgacatacctaaaaagttaataaaattcagctcttttccaatttcattgttatgcctattgaagtattaattgccaggtttgatttttagtgaagcttggagtccatactttgagcagaccaagtgaagggaagaacagaaagaaactcaggagtagagtaatatcacttctcacttacaccactttcaggcacatccaaagagttcctagatacttggaaaatgtctgaaaatttttaagtaaaatactaaacttttcagtgtttagctcaactttttgttcatttggaagtttctctccatccgaggacttaagccagttttggatttgtaagccctgagtacaatacacttcctggaggcatcctcactgctgttgaagcaaaggatatgcatggggtggaaggacggcttcgaacctgggactcatatgccttgagaacaaatagattgttacagccttgggctgctgcgtaatcacggttcctcgaggctcttcctgagcacatgcccaagcatctgcctctggagagactgactccaaatgcaggtgcttccattggagctaggtcggaggctgctttatatgacgaactccagaaatggatgccagaatacggaggccaaacgttctgagtcctggtaaggacagtcgctctgggggtcctcattttactgcagttcctgcacgccagtgaaagagaggagatagaccctggaaggcagagctgcagatgctcatcatcaggtcaattctggagctacagttttgtttctgactggatagggatgcaccagtgactgtcacatcaagcagtccttttattctctctcctttagtatcgattttaaagggcattaggcactatggttccagagtttcttggggaaaacttgcagattcttattaattggttctgcaatacttaaataaattattttacaattataagttttcagattataacatttgtattaatttttactgattttccaagatacttcttagatttactatttacgtagctttatgtacattctctgtaaaaatagacctctaaatatgaggctttacatgaaatttgtacacacatacacactaatgttagctccttaaattgctgcactaaggtgctggttagtagagatggacggagcctctcgcgttttgctctcagatgtgttaaaggcgcacgtgtacctgctctcagcggcagtgcggcctccccatctgctgggtgcccatggccctccctgcagcctcagtgatgacctcgtctgccagggacacaggttttcatcatttacaggctcttatgtgctagttttgttggtagcacgttatttaatgcataaaggcagaattcttacaagtttttttttttaatgtgaacatagatgcagcaccgactttttaaacttgaaaaaactggtataatgttaacttttaaaaataacatttggacacactagtaattgatttttgtttacagattgttttgtttacaaattgttagtctttgtttctatgagatacttttagtgtgactttttaaatgtcttagaaattaaaagttgtacaaaaagtgatttc

SEQ ID NO: 18095 - protein, 220 aa, Homo sapiens; identical to SEQ ID NO: 18089

SEQ ID NO: 18096 - DNA, 4233 bp, Homo sapiens
agtcagagctgctcgtctgaggctgctgaggcgacggccggtgtcgtggtcgcggtacctgttccaacacggctcgcgggcccgtgccggctccggtccccggcgcggctgtccgagcccctgcggcgggcggacgatggtgtggcggagcacgcggacgcgggcggcgcggcggcgggcatgaaggaggatggaagggcaggacgaggtgtcggcgcgggagcagcacttccacagccaagtgcgggagtccacgatatgtttccttctttttgccattctctacgttgtttcctacttcatcatcacaagatacaagagaaaatcagatgaacaagaagatgaagatgccatcgtcaacaggatttcgttgtttttgagcacgttcactctcgcagtgtcagctggggctgttttgcttttacccttctcaatcatcagcaatgaaatcctgctttcttttcctcagaactactatattcagtggctaaatggctccctgattcatggtttgtggaatcttgcttcccttttttccaacctttgtttatttgtattgatgccctttgcctttttctttctggaatcagaaggctttgctggcctgaaaaagggaatccgagcccgcattttagagactttggtcatgcttcttcttcttgcgttactcattcttgggatagtgtgggtagcttcagcactcattgacaacgatgccgcaagcatggaatctttatatgatctctgggagttctatctaccctatttatattcctgtatatcattgatgggatgtttgttacttctcttgtgtacaccagttggcctttctcgtatgttcacagtgatgggtcagttgctagtgaagccaacaattcttgaagacctggatgaacaaatttatatcattaccttagaggaagaagcactccagagacgactaaatgggctgtcttcatcggtggaatacaacataatggagttggaacaagaacttgaaaatgtaaagactcttaagacaaaattagagaggcgaaaaaaggcttcagcatgggaaagaaatttggtgtatcccgctgttatggttctccttcttattgagacatccatctcggtcctcttggtggcttgtaatattctttgcctattggttgatgaaacagcaatgccaaaaggaacaagggggcctggaataggaaatgcctctctttctacgtttggttttgtgggagctgcgcttgaaatcattttgattttctatcttatggtgtcctctgttgtcggcttctatagccttcgattttttggaaactttactcccaagaaagatgacacaactatgacaaagatcattggaaattgtgtgtccatcttggttttgagctctgctctgcctgtgatgtcgagaacactgggaatcactagatttgatctacttggcgactttggaaggtttaattggctgggaaatttctatattgtattatcctacaatttgctttttgctattgtgacaacattgtgtctggtccgaaaattcacctctgcagttcgagaagaacttttcaaggccctagggcttcataaacttcacttaccaaatacttcaagggattcagaaacagccaagccttctgtaaatgggcatcagaaagcactgtgagacgcacagacggcgtcttctgccaccaagagacccgagaactccagattcacgacattcctgtcccatgtagaagcatttccattcaaccgtggcccctcttcagaacctagacctatcagtgccatttttttttcataatctacgaagaacttggctatggctgatcttttttaaatttaactttctgatggaccctgtagtttccagttaagtgcagattccttacagacatatagaacagcgcattcttctgtagacatttgctcatgttggtaaatacaatcacccatatgaaaaaattgttttcacctgatatgaaaatgttagaaaaggcaaactccgggacttctaaagatttacttaaatcccattatgtactttattcagaatgtagaagctgacttgaaaggcatccttggtactaagtgaagcttattcagaaaatgcatttttcaaatgcaatggcaactgcttgtagatatcatttttgcagtgtatgttggagctgtaatggttgcaattatgtttcttatttccttaaaagcaaaaagcgtagtttctgatttatgttatagaatgatactgattagactttgagccaaggggaaaatactaaattcttttaaacctggagccttagagagccacaggaatatcttctgttgtacagtctaataagctgtggtaggaagtatcatgtaatcacagtttaatgacagtttatgtatatatataattcagtattccctctgataacatagttgccagtgtttaatacacttgtaacttggatttttaccttataggctatatgtatactcagttttttaaagcatttttttcagagatcacttaattccccatgcttctgcaatgcatataaaaactataaatgccgagtggtagaaactcctctttcttcatagtcctcaggctttggttacatttgcatatgccatttgaagcctccagcttttaccagtttaacatccaaagttcacagcatcagcattcatggtgtaagaacagttttgcagtataacacgatctgataatcattcagttattaaattgtaaataattattgggatggtttcttggctttaagtccactgaataaaaactatgaaattgcactctgtgtcaaccatccactaggatagaataccgaaatctgtgcatgcaaaaataggagatgggcccatttgcacacaattcgtagttatgcagtctgctatataaatatgttcacatgcactgtgtgtatgaaaatagatggtctgtgttcagacaaaagtaaaacatttttttcaaattgttacatttaaaggttttctgggagaaatttatgaaacgcaggctgtgtctatttgacatcagaaatttccactttaaaccaaaataataagaaactttaatctgtatatttacaacctttgttgagtacacttcccccttatttatacgtctgcatttccttccgagcttcacatctttctaaaatgcagcttggttttaaaataaaagaacattcattttgtgattctaaacaagcttcagtaaataccaccagtatagtactggtgaatttctcagcataaaatcgacatacctaaaaagttaataaaattcagctcttttccaatttcattgttatgcctattgaagtattaattgccaggtttgatttttagtgaagcttggagtccatactttgagcagaccaagtgaagggaagaacagaaagaaactcaggagtagagtaatatcacttctcacttacaccactttcaggcacatccaaagagttcctagatacttggaaaatgtctgaaaatttttaagtaaaatactaaacttttcagtgtttagctcaactttttgttcatttggaagtttctctccatccgaggacttaagccagttttggatttgtaagccctgagtacaatacacttcctggaggcatcctcactgctgttgaagcaaaggatatgcatggggtggaaggacggcttcgaacctgggactcatatgccttgagaacaaatagattgttacagccttgggctgctgcgtaatcacggttcctcgaggctcttcctgagcacatgcccaagcatctgcctctggagagactgactccaaatgcaggtgcttccattggagctaggtcggaggctgctttatatgacgaactccagaaatggatgccagaatacggaggccaaacgttctgagtcctggtaaggacagtcgctctgggggtcctcattttactgcagttcctgcacgccagtgaaagagaggagatagaccctggaaggcagagctgcagatgctcatcatcaggtcaattctggagctacagttttgtttctgactggatagggatgcaccagtgactgtcacatcaagcagtccttttattctctctcctttagtatcgattttaaagggcattaggcactatggttccagagtttcttggggaaaacttgcagattcttattaattggttctgcaatacttaaataaattattttacaattataagttttcagatt

SEQ ID NO: 18097 - protein, 490 aa, Homo sapiens; identical to SEQ ID NO: 2174

SEQ ID NO: 18098 - DNA, 3446 bp, Homo sapiens
agtcagagctgctcgtctgaggctgctgaggcgacggccggtgtcgtggtcgcggtacctgttccaacacggctcgcgggcccgtgccggctccggtccccggcgcggctgtccgagcccctgcggcgggcggacgatggtgtggcggagcacgcggacgcgggcggcgcggcggcgggcatgaaggaggatggaagggcaggacgaggtgtcggcgcgggagcagcacttccacagccaagtgcgggagtccacgatatgtttccttctttttgccattctctacgttgtttcctacttcatcatcacaagatacaagagaaaatcagatgaacaagaagatgaagatgccatcgtcaacaggatttcgttgtttttgagcacgttcactctcgcagtgtcagctggggctgttttgcttttacccttctcaatcatcagcaatgaaatcctgctttcttttcctcagaactactatattcagtggctaaatggctccctgattcatggtttgtggaatcttgcttcccttttttccaacctttgtttatttgtattgatgccctttgcctttttctttctggaatcagaaggctttgctggcctgaaaaagggaatccgagcccgcattttagagactttggtcatgcttcttcttcttgcgttactcattcttgggatagtgtgggtagcttcagcactcattgacaacgatgccgcaagcatggaatctttatatgatctctgggagttctatctaccctatttatattcctgtatatcattgatgggatgtttaaacttcacttaccaaatacttcaagggattcagaaacagccaagccttctgtaaatgggcatcagaaagcactgtgagacgcacagacggcgtcttctgccaccaagagacccgagaactccagattcacgacattcctgtcccatgtagaagcatttccattcaaccgtggcccctcttcagaacctagacctatcagtgccatttttttttcataatctacgaagaacttggctatggctgatcttttttaaatttaactttctgatggaccctgtagtttccagttaagtgcagattccttacagacatatagaacagcgcattcttctgtagacatttgctcatgttggtaaatacaatcacccatatgaaaaaattgttttcacctgatatgaaaatgttagaaaaggcaaactccgggacttctaaagatttacttaaatcccattatgtactttattcagaatgtagaagctgacttgaaaggcatccttggtactaagtgaagcttattcagaaaatgcatttttcaaatgcaatggcaactgcttgtagatatcatttttgcagtgtatgttggagctgtaatggttgcaattatgtttcttatttccttaaaagcaaaaagcgtagtttctgatttatgttatagaatgatactgattagactttgagccaaggggaaaatactaaattcttttaaacctggagccttagagagccacaggaatatcttctgttgtacagtctaataagctgtggtaggaagtatcatgtaatcacagtttaatgacagtttatgtatatatataattcagtattccctctgataacatagttgccagtgtttaatacacttgtaacttggatttttaccttataggctatatgtatactcagttttttaaagcatttttttcagagatcacttaattccccatgcttctgcaatgcatataaaaactataaatgccgagtggtagaaactcctctttcttcatagtcctcaggctttggttacatttgcatatgccatttgaagcctccagcttttaccagtttaacatccaaagttcacagcatcagcattcatggtgtaagaacagttttgcagtataacacgatctgataatcattcagttattaaattgtaaataattattgggatggtttcttggctttaagtccactgaataaaaactatgaaattgcactctgtgtcaaccatccactaggatagaataccgaaatctgtgcatgcaaaaataggagatgggcccatttgcacacaattcgtagttatgcagtctgctatataaatatgttcacatgcactgtgtgtatgaaaatagatggtctgtgttcagacaaaagtaaaacatttttttcaaattgttacatttaaaggttttctgggagaaatttatgaaacgcaggctgtgtctatttgacatcagaaatttccactttaaaccaaaataataagaaactttaatctgtatatttacaacctttgttgagtacacttcccccttatttatacgtctgcatttccttccgagcttcacatctttctaaaatgcagcttggttttaaaataaaagaacattcattttgtgattctaaacaagcttcagtaaataccaccagtatagtactggtgaatttctcagcataaaatcgacatacctaaaaagttaataaaattcagctcttttccaatttcattgttatgcctattgaagtattaattgccaggtttgatttttagtgaagcttggagtccatactttgagcagaccaagtgaagggaagaacagaaagaaactcaggagtagagtaatatcacttctcacttacaccactttcaggcacatccaaagagttcctagatacttggaaaatgtctgaaaatttttaagtaaaatactaaacttttcagtgtttagctcaactttttgttcatttggaagtttctctccatccgaggacttaagccagttttggatttgtaagccctgagtacaatacacttcctggaggcatcctcactgctgttgaagcaaaggatatgcatggggtggaaggacggcttcgaacctgggactcatatgccttgagaacaaatagattgttacagccttgggctgctgcgtaatcacggttcctcgaggctcttcctgagcacatgcccaagcatctgcctctggagagactgactccaaatgcaggtgcttccattggagctaggtcggaggctgctttatatgacgaactccagaaatggatgccagaatacggaggccaaacgttctgagtcctggtaaggacagtcgctctgggggtcctcattttactgcagttcctgcacgccagtgaaagagaggagatagaccctggaaggcagagctgcagatgctcatcatcaggtcaattctggagctacagttttgtttctgactggatagggatgcaccagtgactgtcacatcaagcagtccttttattctctctcctttagtatcgattttaaagggcattaggcactatggttccagagtttcttggggaaaacttgcagattcttattaattggttctgcaatacttaaataaattattttacaattataagttttcagatt

SEQ ID NO: 18099 - protein, 220 aa, Homo sapiens; identical to SEQ ID NO: 18089

SEQ ID NO: 18100 - DNA, 3652 bp, Homo sapiens
agtcagagctgctcgtctgaggctgctgaggcgacggccggtgtcgtggtcgcggtacctgttccaacacggctcgcgggcccgtgccggctccggtccccggcgcggctgtccgagcccctgcggcgggcggacgatggtgtggcggagcacgcggacgcgggcggcgcggcggcgggcatgaaggaggatggaagggcaggacgaggtgtcggcgcgggagcagcacttccacagccaagtgcgggagtccacgatatgtttccttctttttgccattctctacgttgtttcctacttcatcatcacaagatacaagagaaaatcagatgaacaagaagatgaagatgccatcgtcaacaggatttcgttgtttttgagcacgttcactctcgcagtgtcagctggggctgttttgcttttacccttctcaatcatcagcaatgaaatcctgctttcttttcctcagaactactatattcagtggctaaatggctccctgattcatggtttgtggaatcttgcttcccttttttccaacctttgtttatttgtattgatgccctttgcctttttctttctggaatcagaaggctttgctggcctgaaaaagggaatccgagcccgcattttagagactttggtcatgcttcttcttcttgcgttactcattcttgggatagtgtgggtagcttcagcactcattgacaacgatgccgcaagcatggaatctttatatgatctctgggagttctatctaccctatttatattcctgtatatcattgatgggatgtttgttacttctcttgtgtacaccagttggcctttctcgtatgttcacagtgatgggtcagttgctagtgaagccaacaattcttgaagacctggatgaacaaatttatatcattaccttagaggaagaagcactccagagacgactaaatgtgggaatgctttgtgcgggaaatccagaagttgcaacaggaagacaagtgccagaagaacaagctggacagctacttttgggaaaatggattcaggagggaggagacatgatagcaaacccacggctgtcttcatcggtggaatacaacataatggagttggaacaagaacttgaaaatgtaaagactcttaagacaaaattagagaggcgaaaaaaggcttcagcatgggaaagaaatttggtgtatcccgctgttatggttctccttcttattgagacatccatctcggtcctcttggtggcttgtaatattctttgcctattggttgatgaaacagcaatgccaaaaggaacaagggggcctggaataggaaatgcctctctttctacgtttggttttgtgggagctgcgcttgaaatcattttgattttctatcttatggtgtcctctgttgtcggcttctatagccttcgattttttggaaactttactcccaagaaagatgacacaactatgacaaagatcattggaaattgtgtgtccatcttggttttgagctctgctctgcctgtgatgtcgagaacactgggaatcactagatttgatctacttggcgactttggaaggtttaattggctgggaaatttctatattgtattatcctacaatttgctttttgctattgtgacaacattgtgtctggtccgaaaattcacctctgcagttcgagaagaacttttcaaggccctagggcttcataaacttcacttaccaaatacttcaagggattcagaaacagccaagccttctgtaaatgggcatcagaaagcactgtgagacgcacagacggcgtcttctgccaccaagagacccgagaactccagattcacgacattcctgtcccatgtagaagcatttccattcaaccgtggcccctcttcagaacctagacctatcagtgccatttttttttcataatctacgaagaacttggctatggctgatcttttttaaatttaactttctgatggaccctgtagtttccagttaagtgcagattccttacagacatatagaacagcgcattcttctgtagacatttgctcatgttggtaaatacaatcacccatatgaaaaaattgttttcacctgatatgaaaatgttagaaaaggcaaactccgggacttctaaagatttacttaaatcccattatgtactttattcagaatgtagaagctgacttgaaaggcatccttggtactaagtgaagcttattcagaaaatgcatttttcaaatgcaatggcaactgcttgtagatatcatttttgcagtgtatgttggagctgtaatggttgcaattatgtttcttatttccttaaaagcaaaaagcgtagtttctgatttatgttatagaatgatactgattagactttgagccaaggggaaaatactaaattcttttaaacctggagccttagagagccacaggaatatcttctgttgtacagtctaataagctgtggtaggaagtatcatgtaatcacagtttaatgacagtttatgtatatatataattcagtattccctctgataacatagttgccagtgtttaatacacttgtaacttggatttttaccttataggctatatgtatactcagttttttaaagcatttttttcagagatcacttaattccccatgcttctgcaatgcatataaaaactataaatgccgagtggtagaaactcctctttcttcatagtcctcaggctttggttacatttgcatatgccatttgaagcctccagcttttaccagtttaacatccaaagttcacagcatcagcattcatggtgtaagaacagttttgcagtataacacgatctgataatcattcagttattaaattgtaaataattattgggatggtttcttggctttaagtccactgaataaaaactatgaaattgcactctgtgtcaaccatccactaggatagaataccgaaatctgtgcatgcaaaaataggagatgggcccatttgcacacaattcgtagttatgcagtctgctatataaatatgttcacatgcactgtgtgtatgaaaatagatggtctgtgttcagacaaaagtaaaacatttttttcaaattgttacatttaaaggttttctgggagaaatttatgaaacgcaggctgtgtctatttgacatcagaaatttccactttaaaccaaaataataagaaactttaatctgtatatttacaacctttgttgagtacacttcccccttatttatacgtctgcatttccttccgagcttcacatctttctaaaatgcagcttggttttaaaataaaagaacattcattttgtgattctaaacaagcttcagtaaataccaccagtatagtactggtgaatttctcagcataaaatcgacatacctaaaaagttaataaaattcagctcttttccaatttcattgttatgcctattgaagtattaattgccaggtttgatttttagtgaagcttggagtccatactttgagcagaccaagtgaagggaagaacagaaagaaactcaggagtagagtaatatcacttctcacttacaccactttcaggcacatccaaagagttcctagatacttggaaaatgtctgaaaatttttaagtaaaatactaaacttttc

SEQ ID NO: 18101 - protein, 531 aa, Homo sapiens
MEGQDEVSAREQHFHSQVRESTICFLLFAILYVVSYFIITRYKRKSDEQEDEDAIVNRISLFLSTFTLAVSAGAVLLLPFSIISNEILLSFPQNYYIQWLNGSLIHGLWNLASLFSNLCLFVLMPFAFFFLESEGFAGLKKGIRARILETLVMLLLLALLILGIVWVASALIDNDAASMESLYDLWEFYLPYLYSCISLMGCLLLLLCTPVGLSRMFTVMGQLLVKPTILEDLDEQIYIITLEEEALQRRLNVGMLCAGNPEVATGRQVPEEQAGQLLLGKWIQEGGDMIANPRLSSSVEYNIMELEQELENVKTLKTKLERRKKASAWERNLVYPAVMVLLLIETSISVLLVACNILCLLVDETAMPKGTRGPGIGNASLSTFGFVGAALEIILIFYLMVSSVVGFYSLRFFGNFTPKKDDTTMTKIIGNCVSILVLSSALPVMSRTLGITRFDLLGDFGRFNWLGNFYIVLSYNLLFAIVTTLCLVRKFTSAVREELFKALGLHKLHLPNTSRDSETAKPSVNGHQKAL

SEQ ID NO: 18102 - DNA, 2801 bp, Homo sapiens
agtcagagctgctcgtctgaggctgctgaggcgacggccggtgtcgtggtcgcggtacctgttccaacacggctcgcgggcccgtgccggctccggtccccggcgcggctgtccgagcccctgcggcgggcggacgatggtgtggcggagcacgcggacgcgggcggcgcggcggcgggcatgaaggaggatggaagggcaggacgaggtgtcggcgcgggagcagcacttccacagccaagtgcgggagtccacgatatgtttccttctttttgccattctctacgttgtttcctacttcatcatcacaagatacaagagaaaatcagatgaacaagaagatgaagatgccatcgtcaacaggatttcgttgtttttgagcacgttcactctcgcagtgtcagctggggctgttttgcttttacccttctcaatcatcagcaatgaaatcctgctttcttttcctcagaactactatattcagtggctaaatggctccctgattcatggtttgtggaatcttgcttcccttttttccaacctttgtttatttgtattgatgccctttgcctttttctttctggaatcagaaggctttgctggcctgaaaaagggaatccgagcccgcattttagagactttggtcatgcttcttcttcttgcgttactcattcttgggatagtgtgggtagcttcagcactcattgacaacgatgccgcaagcatggaatctttatatgatctctgggagttctatctaccctatttatattcctgtatatcattgatgggatgtttgttacttctcttgtgtacaccagttggcctttctcgtatgttcacagtgatgggtcagttgctagtgaagccaacaattcttgaagacctggatgaacaaatttatatcattaccttagaggaagaagcactccagagacgactaaatgggctgtcttcatcggtggaatacaacataatggagttggaacaagaacttgaaaatgtaaagactcttaagacaaaattagagaggcgaaaaaaggcttcagcatgggaaagaaatttggtgtatcccgctgttatggttctccttcttattgagacatccatctcggtcctcttggtggcttgtaatattctttgcctattggttgatgaaacagcaatgccaaaaggaacaagggggcctggaataggaaatgcctctctttctacgtttggttttgtgggagctgcgcttgaaatcattttgattttctatcttatggtgtcctctgttgtcggcttctatagccttcgattttttggaaactttactcccaagaaagatgacacaactatgacaaagatcattggaaattgtgtgtccatcttggttttgagctctgctctgcctgtgatgtcgagaacactgggaatcactagatttgatctacttggcgactttggaaggtttaattggctgggaaatttctatattgtattatcctacaatttgctttttgctattgtgacaacattgtgtctggtccgaaaattcacctctgcagttcgagaagaacttttcaaggccctagggcttcataaacttcacttaccaaatacttcaagggattcagaaacagccaagccttctgtaaatgggcatcagaaagcactgtgagacgcacagacggcgtcttctgccaccaagagacccgagaactccagattcacgacattcctgtcccatgtagaagcatttccattcaaccgtggcccctcttcagaacctagacctatcagtgccatttttttttcataatctacgaagaacttggctatggctgatcttttttaaatttaactttctgatggaccctgtagtttccagttaagtgcagattccttacagacatatagaacagcgcattcttctgtagacatttgctcatgttggtaaatacaatcacccatatgaaaaaattgttttcacctgatatgaaaatgttagaaaaggcaaactccgggacttctaaagatttacttaaatcccattatgtactttattcagaatgtagaagctgacttgaaaggcatccttggtactaagtgaagcttattcagaaaatgcatttttcaaatgcaatggcaactgcttgtagatatcatttttgcagtgtatgttggagctgtaatggttgcaattatgtttcttatttccttaaaagcaaaaagcgtagtttctgatttatgttatagaatgatactgattagactttgagccaaggggaaaatactaaattcttttaaacctggagccttagagagccacaggaatatcttctgttgtacagtctaataagctgtggtaggaagtatcatgtaatcacagtttaatgacagtttatgtatatatataattcagtattccctctgataacatagttgccagtgtttaatacacttgtaacttggatttttaccttataggctatatgtatactcagttttttaaagcatttttttcagagatcacttaattccccatgcttctgcaatgcatataaaaactataaatgccgagtggtagaaactcctctttcttcatagtcctcaggctttggttacatttgcatatgccatttgaagcctccagcttttaccagtttaacatccaaagttcacagcatcagcattcatggtgtaagaacagttttgcagtataacacgatctgataatcattcagttattaaattgtaaataattattgggatggtttcttggctttaagtccactgaataaaaactatgaaattgc

SEQ ID NO: 18103 - protein, 490 aa, Homo sapiens; identical to SEQ ID NO: 2174

SEQ ID NO: 18104 - DNA, 2014 bp, Homo sapiens
agtcagagctgctcgtctgaggctgctgaggcgacggccggtgtcgtggtcgcggtacctgttccaacacggctcgcgggcccgtgccggctccggtccccggcgcggctgtccgagcccctgcggcgggcggacgatggtgtggcggagcacgcggacgcgggcggcgcggcggcgggcatgaaggaggatggaagggcaggacgaggtgtcggcgcgggagcagcacttccacagccaagtgcgggagtccacgatatgtttccttctttttgccattctctacgttgtttcctacttcatcatcacaagatacaagagaaaatcagatgaacaagaagatgaagatgccatcgtcaacaggatttcgttgtttttgagcacgttcactctcgcagtgtcagctggggctgttttgcttttacccttctcaatcatcagcaatgaaatcctgctttcttttcctcagaactactatattcagtggctaaatggctccctgattcatggtttgtggaatcttgcttcccttttttccaacctttgtttatttgtattgatgccctttgcctttttctttctggaatcagaaggctttgctggcctgaaaaagggaatccgagcccgcattttagagactttggtcatgcttcttcttcttgcgttactcattcttgggatagtgtgggtagcttcagcactcattgacaacgatgccgcaagcatggaatctttatatgatctctgggagttctatctaccctatttatattcctgtatatcattgatgggatgtttaaacttcacttaccaaatacttcaagggattcagaaacagccaagccttctgtaaatgggcatcagaaagcactgtgagacgcacagacggcgtcttctgccaccaagagacccgagaactccagattcacgacattcctgtcccatgtagaagcatttccattcaaccgtggcccctcttcagaacctagacctatcagtgccatttttttttcataatctacgaagaacttggctatggctgatcttttttaaatttaactttctgatggaccctgtagtttccagttaagtgcagattccttacagacatatagaacagcgcattcttctgtagacatttgctcatgttggtaaatacaatcacccatatgaaaaaattgttttcacctgatatgaaaatgttagaaaaggcaaactccgggacttctaaagatttacttaaatcccattatgtactttattcagaatgtagaagctgacttgaaaggcatccttggtactaagtgaagcttattcagaaaatgcatttttcaaatgcaatggcaactgcttgtagatatcatttttgcagtgtatgttggagctgtaatggttgcaattatgtttcttatttccttaaaagcaaaaagcgtagtttctgatttatgttatagaatgatactgattagactttgagccaaggggaaaatactaaattcttttaaacctggagccttagagagccacaggaatatcttctgttgtacagtctaataagctgtggtaggaagtatcatgtaatcacagtttaatgacagtttatgtatatatataattcagtattccctctgataacatagttgccagtgtttaatacacttgtaacttggatttttaccttataggctatatgtatactcagttttttaaagcatttttttcagagatcacttaattccccatgcttctgcaatgcatataaaaactataaatgccgagtggtagaaactcctctttcttcatagtcctcaggctttggttacatttgcatatgccatttgaagcctccagcttttaccagtttaacatccaaagttcacagcatcagcattcatggtgtaagaacagttttgcagtataacacgatctgataatcattcagttattaaattgtaaataattattgggatggtttcttggctttaagtccactgaataaaaactatgaaattgc

SEQ ID NO: 18105 - protein, 220 aa, Homo sapiens; identical to SEQ ID NO: 18089

SEQ ID NO: 18106 - DNA, 2921 bp, Homo sapiens
gctgaggcgacggccggtgtcgtggtcgcggtacctgttccaacacggctcgcgggcccgtgccggctccggtccccggcgcggctgtccgagcccctgcggcgggcggacgatggtgtggcggagcacgcggacgcgggcggcgcggcggcgggcatgaaggaggatggaagggcaggacgaggtgtcggcgcgggagcagcacttccacagccaagtgcgggagtccacgatatgtttccttctttttgccattctctacgttgtttcctacttcatcatcacaagatacaagagaaaatcaggatctccttctgtcccctaggccggagagcagtggggcaatcatggctgactgtagcctcgacctcctgggctcaagtgattctccaacctcagcctcctgagtatcctgcactacagatgaacaagaagatgaagatgccatcgtcaacaggatttcgttgtttttgagcacgttcactctcgcagtgtcagctggggctgttttgcttttacccttctcaatcatcagcaatgaaatcctgctttcttttcctcagaactactatattcagtggctaaatggctccctgattcatggtttgtggaatcttgcttcccttttttccaacctttgtttatttgtattgatgccctttgcctttttctttctggaatcagaaggctttgctggcctgaaaaaggagggcaagatgtccaggcaaaaccttgtttaaatgttcatcaccatagaaacatgacagcttctccatagagcttttggaatccgagcccgcattttagagactttggtcatgcttcttcttcttgcgttactcattcttgggatagtgtgggtagcttcagcactcattgacaacgatgccgcaagcatggaatctttatatgatctctgggagttctatctaccctatttatattcctgtatatcattgatgggatgtttgttacttctcttgtgtacaccagttggcctttctcgtatgttcacagtgatgggtcagttgctagtgaagccaacaattcttgaagacctggatgaacaaatttatatcattaccttagaggaagaagcactccagagacgactaaatgggctgtcttcatcggtggaatacaacataatggagttggaacaagaacttgaaaatgtaaagactcttaagacaaaattagagaggcgaaaaaaggcttcagcatgggaaagaaatttggtgtatcccgctgttatggttctccttcttattgagacatccatctcggtcctcttggtggcttgtaatattctttgcctattggttgatgaaacagcaatgccaaaaggaacaagggggcctggaataggaaatgcctctctttctacgtttggttttgtgggagctgcgcttgaaatcattttgattttctatcttatggtgtcctctgttgtcggcttctatagccttcgattttttggaaactttactcccaagaaagatgacacaactatgacaaagatcattggaaattgtgtgtccatcttggttttgagctctgctctgcctgtgatgtcgagaacactgggaatcactagatttgatctacttggcgactttggaaggtttaattggctgggaaatttctatattgtattatcctacaatttgctttttgctattgtgacaacattgtgtctggtccgaaaattcacctctgcagttcgagaagaacttttcaaggccctagggcttcataaacttcacttaccaaatacttcaagggattcagaaacagccaagccttctgtaaatgggcatcagaaagcactgtgagacgcacagacggcgtcttctgccaccaagagacccgagaactccagattcacgacattcctgtcccatgtagaagcatttccattcaaccgtggcccctcttcagaacctagacctatcagtgccatttttttttcataatctacgaagaacttggctatggctgatcttttttaaatttaactttctgatggaccctgtagtttccagttaagtgcagattccttacagacatatagaacagcgcattcttctgtagacatttgctcatgttggtaaatacaatcacccatatgaaaaaattgttttcacctgatatgaaaatgttagaaaaggcaaactccgggacttctaaagatttacttaaatcccattatgtactttattcagaatgtagaagctgacttgaaaggcatccttggtactaagtgaagcttattcagaaaatgcatttttcaaatgcaatggcaactgcttgtagatatcatttttgcagtgtatgttggagctgtaatggttgcaattatgtttcttatttccttaaaagcaaaaagcgtagtttctgatttatgttatagaatgatactgattagactttgagccaaggggaaaatactaaattcttttaaacctggagccttagagagccacaggaatatcttctgttgtacagtctaataagctgtggtaggaagtatcatgtaatcacagtttaatgacagtttatgtatatatataattcagtattccctctgataacatagttgccagtgtttaatacacttgtaacttggatttttaccttataggctatatgtatactcagttttttaaagcatttttttcagagatcacttaattccccatgcttctgcaatgcatataaaaactataaatgccgagtggtagaaactcctctttcttcatagtcctcaggctttggttacatttgcatatgccatttgaagcctccagcttttaccagtttaacatccaaagttcacagcatcagcattcatggtgtaagaacagttttgcagtataacacgatctgataatcattcagttattaaattgtaaataatt

SEQ ID NO: 18107 - protein, 338 aa, Homo sapiens
MLLLLALLILGIVWVASALIDNDAASMESLYDLWEFYLPYLYSCISLMGCLLLLLCTPVGLSRMFTVMGQLLVKPTILEDLDEQIYIITLEEEALQRRLNGLSSSVEYNIMELEQELENVKTLKTKLERRKKASAWERNLVYPAVMVLLLIETSISVLLVACNILCLLVDETAMPKGTRGPGIGNASLSTFGFVGAALEIILIFYLMVSSVVGFYSLRFFGNFTPKKDDTTMTKIIGNCVSILVLSSALPVMSRTLGITRFDLLGDFGRFNWLGNFYIVLSYNLLFAIVTTLCLVRKFTSAVREELFKALGLHKLHLPNTSRDSETAKPSVNGHQKAL

SEQ ID NO: 18108 - DNA, 2749 bp, Homo sapiens
agtcagagctgctcgtctgaggctgctgaggcgacggccggtgtcgtggtcgcggtacctgttccaacacggctcgcgggcccgtgccggctccggtccccggcgcggctgtccgagcccctgcggcgggcggacgatggtgtggcggagcacgcggacgcgggcggcgcggcggcgggcatgaaggaggatggaagggcaggacgaggtgtcggcgcgggagcagcacttccacagccaagtgcgggagtccacgatatgtttccttctttttgccattctctacgttgtttcctacttcatcatcacaagatacaagagaaaatcagatgaacaagaagatgaagatgccatcgtcaacaggatttcgttgtttttgagcacgttcactctcgcagtgtcagctggggctgttttgcttttacccttctcaatcatcagcaatgaaatcctgctttcttttcctcagaactactatattcagtggctaaatggctccctgattcatggtttgtggaatcttgcttcccttttttccaacctttgtttatttgtattgatgccctttgcctttttctttctggaatcagaaggctttgctggcctgaaaaagggaatccgagcccgcattttagagactttggtcatgcttcttcttcttgcgttactcattcttgggatagtgtgggtagcttcagcactcattgacaacgatgccgcaagcatggaatctttatatgatctctgggagttctatctaccctatttatattcctgtatatcattgatgggatgtttgttacttctcttgtgtacaccagttggcctttctcgtatgttcacagtgatgggtcagttgctagtgaagccaacaattcttgaagacctggatgaacaaatttatatcattaccttagaggaagaagcactccagagacgactaaatgggctgtcttcatcggtggaatacaacataatggagttggaacaagaacttgaaaatgtaaagactcttaagacaaaattagagaggcgaaaaaaggcttcagcatgggaaagaaatttggtgtatcccgctgttatggttctccttcttattgagacatccatctcggtcctcttggtggcttgtaatattctttgcctattggttgatgaaacagcaatgccaaaaggaacaagggggcctggaataggaaatgcctctctttctacgtttggttttgtgggagctgcgcttgaaatcattttgattttctatcttatggtgtcctctgttgtcggcttctatagccttcgattttttggaaactttactcccaagaaagatgacacaactatgacaaagatcattggaaattgtgtgtccatcttggttttgagctctgctctgcctgtgatgtcgagaacactgggaatcactagatttgatctacttggcgactttggaaggtttaattggctgggaaatttctatattgtattatcctacaatttgctttttgctattgtgacaacattgtgtctggtccgaaaattcacctctgcagttcgagaagaacttttcaaggccctagggcttcataaacttcacttaccaaatacttcaagggattcagaaacagccaagccttctgtaaatgggcatcagaaagcactgtgagacgcacagacggcgtcttctgccaccaagagacccgagaactccagattcacgacattcctgtcccatgtagaagcatttccattcaaccgtggcccctcttcagaacctagacctatcagtgccatttttttttcataatctacgaagaacttggctatggctgatcttttttaaatttaactttctgatggaccctgtagtttccagttaagtgcagattccttacagacatatagaacagcgcattcttctgtagacatttgctcatgttggtaaatacaatcacccatatgaaaaaattgttttcacctgatatgaaaatgttagaaaaggcaaactccgggacttctaaagatttacttaaatcccattatgtactttattcagaatgtagaagctgacttgaaaggcatccttggtactaagtgaagcttattcagaaaatgcatttttcaaatgcaatggcaactgcttgtagatatcatttttgcagtgtatgttggagctgtaatggttgcaattatgtttcttatttccttaaaagcaaaaagcgtagtttctgatttatgttatagaatgatactgattagactttgagccaaggggaaaatactaaattcttttaaacctggagccttagagagccacaggaatatcttctgttgtacagtctaataagctgtggtaggaagtatcatgtaatcacagtttaatgacagtttatgtatatatataattcagtattccctctgataacatagttgccagtgtttaatacacttgtaacttggatttttaccttataggctatatgtatactcagttttttaaagcatttttttcagagatcacttaattccccatgcttctgcaatgcatataaaaactataaatgccgagtggtagaaactcctctttcttcatagtcctcaggctttggttacatttgcatatgccatttgaagcctccagcttttaccagtttaacatccaaagttcacagcatcagcattcatggtgtaagaacagttttgcagtataacacgatctgataatcattcagttattaaattgtaaataatt

SEQ ID NO: 18109 - protein, 490 aa, Homo sapiens; identical to SEQ ID NO: 2174

SEQ ID NO: 18110 - DNA, 1962 bp, Homo sapiens
agtcagagctgctcgtctgaggctgctgaggcgacggccggtgtcgtggtcgcggtacctgttccaacacggctcgcgggcccgtgccggctccggtccccggcgcggctgtccgagcccctgcggcgggcggacgatggtgtggcggagcacgcggacgcgggcggcgcggcggcgggcatgaaggaggatggaagggcaggacgaggtgtcggcgcgggagcagcacttccacagccaagtgcgggagtccacgatatgtttccttctttttgccattctctacgttgtttcctacttcatcatcacaagatacaagagaaaatcagatgaacaagaagatgaagatgccatcgtcaacaggatttcgttgtttttgagcacgttcactctcgcagtgtcagctggggctgttttgcttttacccttctcaatcatcagcaatgaaatcctgctttcttttcctcagaactactatattcagtggctaaatggctccctgattcatggtttgtggaatcttgcttcccttttttccaacctttgtttatttgtattgatgccctttgcctttttctttctggaatcagaaggctttgctggcctgaaaaagggaatccgagcccgcattttagagactttggtcatgcttcttcttcttgcgttactcattcttgggatagtgtgggtagcttcagcactcattgacaacgatgccgcaagcatggaatctttatatgatctctgggagttctatctaccctatttatattcctgtatatcattgatgggatgtttaaacttcacttaccaaatacttcaagggattcagaaacagccaagccttctgtaaatgggcatcagaaagcactgtgagacgcacagacggcgtcttctgccaccaagagacccgagaactccagattcacgacattcctgtcccatgtagaagcatttccattcaaccgtggcccctcttcagaacctagacctatcagtgccatttttttttcataatctacgaagaacttggctatggctgatcttttttaaatttaactttctgatggaccctgtagtttccagttaagtgcagattccttacagacatatagaacagcgcattcttctgtagacatttgctcatgttggtaaatacaatcacccatatgaaaaaattgttttcacctgatatgaaaatgttagaaaaggcaaactccgggacttctaaagatttacttaaatcccattatgtactttattcagaatgtagaagctgacttgaaaggcatccttggtactaagtgaagcttattcagaaaatgcatttttcaaatgcaatggcaactgcttgtagatatcatttttgcagtgtatgttggagctgtaatggttgcaattatgtttcttatttccttaaaagcaaaaagcgtagtttctgatttatgttatagaatgatactgattagactttgagccaaggggaaaatactaaattcttttaaacctggagccttagagagccacaggaatatcttctgttgtacagtctaataagctgtggtaggaagtatcatgtaatcacagtttaatgacagtttatgtatatatataattcagtattccctctgataacatagttgccagtgtttaatacacttgtaacttggatttttaccttataggctatatgtatactcagttttttaaagcatttttttcagagatcacttaattccccatgcttctgcaatgcatataaaaactataaatgccgagtggtagaaactcctctttcttcatagtcctcaggctttggttacatttgcatatgccatttgaagcctccagcttttaccagtttaacatccaaagttcacagcatcagcattcatggtgtaagaacagttttgcagtataacacgatctgataatcattcagttattaaattgtaaataatt

SEQ ID NO: 18111 - protein, 220 aa, Homo sapiens; identical to SEQ ID NO: 18089

SEQ ID NO: 18112 - DNA, 646 bp, Homo sapiens
agagctgctcgtctgaggctgctgaggcgacggccggtgtcgtggtcgcggtacctgttccaacacggctcgcgggcccgtgccggctccggtccccggcgcggctgtccgagcccctgcggcgggcggacgatggtgtggcggagcacgcggacgcgggcggcgcggcggcgggcatgaaggaggatggaagggcaggacgaggtgtcggcgcgggagcagcacttccacagccaagtgcgggagtccacgatatgtttccttctttttgccattctctacgttgtttcctacttcatcatcacaagatacaagagaaaatcagatgaacaagaagatgaagatgccatcgtcaacaggatttcgtttgtggaatcttgcttcccttttttccaacctttgtttatttgtattgatgccctttgcctttttctttctggaatcagaaggctttgctggcctgaaaaagggaatccgagcccgcattttagagactttggtcatgcttcttcttcttgcgttactcattcttgggatagtgtgggtagcttcagcactcattgacaacgatgccgcaagcatggaatctttatatgatctctgggagttctatctaccctatttatattcctgtatatcattgatg

SEQ ID NO: 18113 - protein, 125 aa, Homo sapiens
MEGQDEVSAREQHFHSQVRESTICFLLFAILYVVSYFIITRYKRKSDEQEDEDAIVNRISFVESCFPFFQPLFICIDALCLFLSGIRRLCWPEKGNPSPHFRDFGHASSSCVTHSWDSVGSFSTH

SEQ ID NO: 18114 - DNA, 2205 bp, Homo sapiens
cccgccctcccttagtcagagctgctcgtctgaggctgctgaggcgacggccggtgtcgtggtcgcggtacctgttccaacacggctcgcgggcccgtgccggctccggtccccggcgcggctgtccgagcccctgcggcgggcggacgatggtgtggcggagcacgcggacgcgggcggcgcggcggcgggcatgaaggaggatggaagggcaggacgaggtgtcggcgcgggagcagcacttccacagccaagtgcgggagtccacgatatgtttccttctttttgccattctctacgttgtttcctacttcatcatcacaagatacaagagaaaatcagatgaacaagaagatgaagatgccatcgtcaacaggatttcgttgtttttgagcacgttcactctcgcagtgtcagctggggctgttttgcttttacccttctcaatcatcagcaatgaaatcctgctttcttttcctcagaactactatattcagtggctaaatggctccctgattcatgtagagactggtttcaccgtgttagccaggatggtctcgatctcctgaccttgtgatccgcccgcctcagcctcccaaagtgctgggattacaggcgtgagccaccgtgcccggctgcatgtgtgtattatatatagcatatgcagtttatacctttaaaacctttaatattatattgtgttttccataccttttatgttcttcaaaaccatttttagtggtgtaacctgagccatgtatttagcaatatattaagctagtggttttcaaaggctatttcgtcattttaaagggtggaaccatttatccctccagtgacttgctacctgcatttttttcagatttgcaatagaaaacagctgagttgttcctcaggcaccaaacccaccctgtcctctttgtgaaacatttcacttcaccagtaaactgttgttgagcatctagaggatttttaaattttcattattatttgggtttctgacaatttctttacatggaaattagaatgaaaattattaggctaatgagtattaattgctaaactgttttctagaattacttgtttatattctcttgatagaccatgaaggtgcctcttgtttttagccataaacttaataacagtgaatattagtatctttaaaatcttttccattttcatgggtagaaggtagtttctcattattgtaatgttaatttaaaaaatttttagtcagataggacattttaattttaatttataaaatatagaaaaatatctaatacatatatcattttatttttatttatttattttattattataatttttttgagatgaagtgttgctctgttgcccaggctggagtgcagtggcgcagtcttggctcactgcaacctctacctcccgggttcaagcgattctcctgcctcagcttcctgaggagcggggactacaggtgtgtgccaccacgcccagatcatttttatatttttagtagagacagggggtttcaccatgttggccaggctggcctcaaactcctgacctcaagtgatccaccctcttcggcctctgaaatgctgggattacaggcatgagccaccgtgcccagcccatgtatattttatttgattaatgtcctttgcccttttttgtggttgttgcttttttcatattgaatttatgatctctttgtttgaacacatcagcttttcatttcaattttttacatgtttttctgattgttattttgctttttaatattaattgcttttttccagaatttgaatattttttataatatttggtttttctttttctcttggtgtctctaattgtttttgtgtttagaagattgtttcccaccctgagatatgacagctagttgtcccaataccattaattgaatattcttttctgtactgattttttatgcttcattttcagtaagctaaatattatattagcgtttgtttctgggctcaggtatgcaggttttggagtcagatagacctgggcttgaatttcaaatctgtctgaaacccttagcaaccttgagcatattgtttacgctttcagagtctcagtcttttatctataaaatgaccatatcaaggtctagtttatagaattattatatgtagtaagtggaatatatgtatagtataaagtacctagtctattgcctggtggccaagagta

SEQ ID NO: 18115 - protein, 121 aa, Homo sapiens
MEGQDEVSAREQHFHSQVRESTICFLLFAILYVVSYFIITRYKRKSDEQEDEDAIVNRISLFLSTFTLAVSAGAVLLLPFSIISNEILLSFPQNYYIQWLNGSLIHVETGFTVLARMVSIS

SEQ ID NO: 18116 - DNA, 644 bp, Homo sapiens
agtcagagctgctcgtctgaggctgctgaggcgacggccggtgtcgtggtcgcggtacctgttccaacacggctcgcgggcccgtgccggctccggtccccggcgcggctgtccgagcccctgcggcgggcggacgatggtgtggcggagcacgcggacgcgggcggcgcggcggcgggcatgaaggaggatggaagggcaggacgaggtgtcggcgcgggagcagcacttccacagccaagtgcgggagtccacgatatgtttccttctttttgccattctctacgttgtttcctacttcatcatcacaagatacaagagaaaatcagatgaacaagaagatgaagatgccatcgtcaacaggatttcgtatgtattttaaagttcagttgttctgtttctgattctgaagtcatcaattctcaaaatccaattctaatttttggatagaagtatggaaaatattcacccagcacattacaatagctttatcatattaattttagaaagcacatgtaagcaaatatgtgtggataatccaatctcctattggaatttgcatatttaaggagctgacagattttatcctcaggggattaaatgaggaaatggccttaatttaattgcttggtcataagaaagaa

SEQ ID NO: 18117 - protein, 63 aa, Homo sapiens
MEGQDEVSAREQHFHSQVRESTICFLLFAILYVVSYFIITRYKRKSDEQEDEDAIVNRISYVF

SEQ ID NO: 18118 - DNA, 3357 bp, Homo sapiens
gcgtttcgaaagatggcggcgtccaggagcgcgggagaggccggcccgggcggctcccagggacgcgtggtccgcatgaagcgcagaggcgggcgcgggccgcgccgcggtcctgctggcggtggggagaaggccctgaagaggctgaagctagcggtggaggagttcgtgcacgcgacttcggaaggcgaggctcccgggggttgcgaggggcgcggcgccccggtgagctttcgcccgggagggagaaaaagccgtaaggaactgaggaaggagaagcggcacctgcggaaagcacgccggctgcagaggacggcgggccccgaacagggtcccggcctgggaggccgaagcggagccgaagaagccagcggtcaccggcaggacacggaggagcgcgcccgcccagcccctagtcgggacccctcgcctcccaggaagccgcggccgtcccgggtcaaggccaaggccacggccgccaccgcaaagaccagaccctccgcagccgccaccgccgctgcccggaaacgggcgcttttagcggcgaacgaggaggaggaccgagagatccgaaagctggagcgttgcctcggtttgaacaagcgcaaaaagaaggacggcagcagctccgtgccgctgagctttgcacgcgacggtcttgactatattctgggagccctggagtctgggaaaaatagcggcttgtacgacagcagtggtgaggaggaggaagatgccggacagacactccccgaaagtgacttagagagtgactcccaggacgaaagtgaggaggaggaggagggagacgtagaaaaggaaaagaaggcgcaggaagcagaagcgcagagcgaggacgacgacgaggatacagaagaggaacagggggaagaaaaggaaaagggagcgcaggagaaaaggagggggaagagagtccgttttgcagaagatgaagaaaagagtgaaaattcctcggaggacggtgacataacggataagagtctttgtggaagtggtgaaaagtacatcccacctcatgtgaggcaagctgaggagacagtggacttcaagaaaaaggaagaactagaaaggctgaagaaacatgtaaaaggtctacttaacaggttgagtgaacccaacatggcttccatcagtgggcagctggaggaactgtacatggcccacagcagaaaggacatgaatgacaccctgacctccgctctcatgggtgcctgcgtcactgcctcggccatgcccagcagactgatgatggagcatgttctcttagtcagcatccttcaccacacagttggaatcgaggtcggtgcccactttctggaggcagtggtgaggaagttcgatgccatctataaatacggaagcgaagggaaagagtgtgacaacctgttcaccgtcattgcccatttatacaacttccacgtggtacagtctctcctcatcttcgacattttgaaaaaactgattggaactttcaccgaaaaagatattgaactgatcttgttaatgctgaaaaacgtgggtttttcattgaggaaagatgatgctttatcacttaaggaattgatcactgaagcccagaccaaagccagcggggcaggcagcgagtttcaggaccagaccaggattcggtttatgctagagacgatgttggccctgaagaacaatgacatgcgcaaaattccaggctatgaccccgagcccgtggagaagctgaggaaactgcagagagctttggtccgcaacgccggctcaggttctgagacgcagcttcgcgtctcctgggacagtgtcttgagtgcggagcagacgggtcgctggtggattgtggggtccgcctggagtggggccccgatgatcgacaacagtcaccatacgcacctgcagaagcagcttgtggggacggtcagttcaaagatcctagaactcgcccggaagcagaggatgaacacagacatccggagaaacatattctgcacaataatgacaagtgaagattttttggatgcttttgaaaagcttctgaagcttggacttaaggatcagcaggagagagaaatcattcacgttctcatggattgctgccttcaagagaaaacttacaatcccttctatgctttcctggctagcaaattctgtgaatatgaaaggagatttcagatgactttccagttcagcatatgggacaaatttcgggacttggaaaacttgccagctacgaatttctctaatttggttcatctggtggcccacttgttgaagacaaaatcgctttccctttccatcttaaaggtagttgaattcagtgaattggacaaacccagagtccgttttttacgaaaagtattaagtatcctattaatggaaacagaagttgaagacctcagtttaattttcacaagagtatctgacaacccaaagctgggggtgttacgtgagggtttgaagcttttcatcagccacttcttgctaaagaacgcacaggcccacagaagcgccgacgaagccaacgtgctgagagagaaagctgaccttgcaacgaagtgtctgcaaggaaaagcttccctgagaatgtagtcagggaaggaaggagggcaggtggccctttgactgtaaaatgtccttggtaaacccaaaggcttattctgttgcctgcgtgtgaatgtttggtagagctatatcattgtctgttaatgtattatattttgagattttttttgatctaaggttttattgtttgtatttcaagccattttcaaataactatcttgggggtgagaggagaaggagggagggaaaaggggtcaggcacactggacagggttctctaagcagtgaggctggtgtgtatgattgtcttaaaattttttaatagatatggccgagcgtgatggctcacccctgtaatcccagcactttgtgaggccaaggtgggcggatcacttgaggccaggaatttgaaaccagcctgggcaaaaccctgtctctactaaaaatataaaaattagccaggcatgatggcacatgctggtaatagcagctactgaggtggctgaggcacaagaattgcttggaccctggaggtagaggctgcagtgagccaagattgtaccactgtactccagcctgggctggacagtgagacttttgacagtgagactgtcaaaaaaaaaaaaaaaattaatagataaaacaggccactagagggtgcagttataaagaaattgatgaggtttttacctttttaaaatattggttagaagttcaaaaaccatcccttaaaggtgattgtttttttgagacagagtcttgctctgtcacccagagtggagtgcagtg

SEQ ID NO: 18119 - protein, 860 aa, Homo sapiens; identical to SEQ ID NO: 2176

SEQ ID NO: 18120 - DNA, 1137 bp, Homo sapiens
aatttttactctaattaactatattacaaatcattgaaaaagttggctaaatcagtgtaactttatttttctccatgtcctgaccattaggtagttgaattcagtgaattggacaaacccagagtccgttttttacgaaaagtattaagtatcctattaatggaaacagaagttgaagacctcagtttaattttcacaagagtatctgacaacccaaagctgggggtgttacgtgagggtttgaagcttttcatcagccacttcttgctaaagaacgcacaggcccacagaagcgccgacgaagccaacgtgctgagagagaaagctgaccttgcaacgaagtgtctgcaaggaaaagcttccctgagaatgtagtcagggaaggaaggagggcaggtggccctttgactgtaaaatgtccttggtaaacccaaaggcttattctgttgcctgcgtgtgaatgtttggtagagctatatcattgtctgttaatgtattatattttgagattttttttgatctaaggttttattgtttgtatttcaagccattttcaaataactatcttgggggtgagaggagaaggagggagggaaaaggggtcaggcacactggacagggttctctaagcagtgaggctggtgtgtatgattgtcttaaaattttttaatagatatggccgagcgtgatggctcacccctgtaatcccagcactttgtgaggccaaggtgggcggatcacttgaggccaggaatttgaaaccagcctgggcaaaaccctgtctctactaaaaatataaaaattagccaggcatgatggcacatgctggtaatagcagctactgaggtggctgaggcacaagaattgcttggaccctggaggtagaggctgcagtgagccaagattgtaccactgtactccagcctgggctggacagtgagacttttgacagtgagactgtcaaaaaaaaaaaaaaaattaatagataaaacaggccactagagggtgcagttataaagaaattgatgaggtttttacctttttaaaatattggttagaagttcaaaaaccatcccttaaaggtgattgtttttttgagacagagtcttgctctgtcacccagagtggagtgcagtg

SEQ ID NO: 18121 - protein, 71 aa, Homo sapiens [sequence omitted]

SEQ ID NO: 18122 - DNA, 1266 bp, Homo sapiens
cacgccaccacgcccggctaatttttgtattttagtagagatgggtttcaccatgttggcaaggctggtcttgaactcctgacctcaggtgatacacccatctcggcctcccaaagtgctgggattacaggcttgagccaccacgcccagcttaaatgtgattcttgatactgttttaagtatttaggttgcaattaactttggcaaagtcagtcgacataagccctgtggatatggccttatgtacactgtaatgcagacaggtgcttttcatcattcatgtaacattctcacacagttgaggatattcatctcctcaccaattccagattgtaaatgtaccatcttaaacaactctgaggtcaccaaacagtagttatttgactgttaataggtgctacttgcttgcaaggatttggagatgtaaacatgaagaaaatatagttactgcctgcaaagaattaacatccgtctagtgggagaaacaaacacaccccactcactaagtatggaaaactgattctgggaggaagcagaaatgtccctagataacagcatgtattgcagatacccaaatgtttattgttttctcagcccttcaattttgcttttctctctcaaatgctacagactcaatttaaatcttacctttgattgttgaaaaaagtcactaagatgtgaatacagaatagacattgagaggttatatatgtccaaaactcatctgtccagcagtcaccgtcctcttcagagtggtcacgttgggcagatgggcacaggtgctggtgatgcctctcctgggcaaaacgccccatttgtggcactttcagatactatttatttactttttaagagagagacaggctcactctgtcacccattgcactccagcctgggaacaagagtgaaactctcaaaagcagaaacaaaaacccaacatatatgggctgttagatagtaattgtaatttcgtataaatagtaaatgagtacatcttgattaaaagctatgaattcagaattgcttttaaatatatagggggttttttgaaatttattacagtgcaattgaaaatacacttaaaatactgcaggatgcttagtgctcagtgttatgtatgaacttgtggactttacaatgcaggttgagaactgctaatgtatagaatgactaaacagctgtctttcagggtatcatttttaaaggtataaggaacaaactttaatgtattgaaatgcataaataaaatttattttttatattttg

SEQ ID NO: 18123 - protein, 82 aa, Homo sapiens
MSKTHLSSSHRPLQSGHVGQMGTGAGDASPGQNAPFVALSDTIYLLFKRETGSLCHPLHSSLGTRVKLSKAETKTQHIWAVR

SEQ ID NO: 18124 - DNA, 672 bp, Homo sapiens
ggatttagaatagtccataaatttgagggttcgagaagattgactccaatgttggaagaagttctgctgtgggtaaaatgctatcagacagcatttcatactacagagaaacctggcatgaaaggaagagtcaatcaatgtgacaaacttcattgttgtcttattttaagaaattgcagccaggcatggcgactcatgcctgtaatcccacctcccgagtagctgggattacaggcacctgccaccacgcccagctaatttttgtatttttagtagagacgggatttcaccatgttggccaggctggtctcgaactcctgacctcaagttatccgcctgccttggcctcccaaagtgttgggattataggcgtgagccaccgcacccagccctcatgtgaactattttaacagtgtcaactgttaaaataaaaggaaaaaaggaacactcattccttcacacacacaggggtggaggcacagttccggaagtgcatcttgtgtgatatacccgctgtctctgagctctgtgttgagtgctctgtgggtgcggcaggacacctgggccagtgcagcacgtccccgcaagctccccagcctacactccgctgcctaggtgtgaggctcgaacacctccaaaacttgatttatcagtgttatttccaccattgct

SEQ ID NO: 18125 - protein, 74 aa, Homo sapiens
MATHACNPTSRVAGITGTCHHAQLIFVFLVETGFHHVGQAGLELLTSSYPPALASQSVGIIGVSHRTQPSCELF

SEQ ID NO: 18126 - DNA, 2117 bp, Homo sapiens
ggacgcggggaagcactcgcgtgggagtttgtgcgagcgcggcccggggcggggcccgcacggaggaggcgccgggaccatggtcaccctcggctgagtttccggcggcgactttgattattggcaaataaccaccataacaataccgagcccccgggcttgcaccgcacgcactgactccgcgagcccgcacacggccgcgtcgcccgccaccgggccctgagcgccagccccaaacgagccgatggaaaaatccaaaaatttccgcatcgacgccctgctggcggtggaccccccacgagccgcctctgcgcagagcgcgccgctggccttggtcacgtcgctcgccgccgccgcatctggcaccggaggtggcggcggcggcggcggggcgagcggcgggactagcggcagctgcagccccgcgtcctcggagccgccggctgcgcccgccgaccgcctgcgcgccgagagcccgtcgccgccgcgcctgctggccgcgcactgcgcgctgctgcccaagccgggcttcctgggcgcgggcggcggcggcggcggcacgggcggcgggcacggggggccccaccaccacgcgcatccgggcgcagcggccgctgccgccgccgccgccgccgccgccgccgctgggggcctggcgctggggctgcaccctgggggcgcgcagggcggcgcgggcctcccggcgcaggcggcgctctacggccacccggtctacggctactccgcggcggcggcggcggctgcgctggcgggccagcacccggcgctctcctactcgtacccgcaggtgcaaggcgcgcaccccgcgcaccccgccgaccccatcaagctgggcgccggcaccttccagctggaccagtggctgcgcgcgtccaccgcgggcatgatcctgcctaagatgcccgacttcaactcccaggcgcagtcgaacctcctggggaagtgccgccggccgcgcaccgccttcaccagccagcagctgctggagctggagcaccagttcaagctcaacaagtacctgtcgcggcccaagcgcttcgaggtggccacctcgctcatgctcaccgagacccaggtgaagatttggttccagaaccggcggatgaaatggaaacgcagcaaaaaggccaaagagcaggcggcgcaggaagcggagaaacagaagggcggcggcgggggcgcggggaagggcggcgcggaggagccgggagccgaggagctgctggggccgccagcgcccggagacaagggcagcggacgccgcctgcgggacttgagggacagtgaccccgaggaggacgaggacgaggacgacgaggaccatttcccctacagcaacggcgccagcgtccacgccgcctcctccgactgctcctcggaggacgactcgccgcccccgcggcccagccaccagcccgcgccccagtaggagccccgcggcccagcaggtgcggcgcgcacggagcgccccggccggcggcttctcccggaggccccggcgcccgcacccacccggcccggccccgagagcaggctcgaccgccgccccatggacccctcgcccaggccggggctggagggattcggccgcggctccggtcctgggcgcttcccttttaagcaagggcgcctcacctgctcttcaagaaacagcgagagggagacccagggggctgaaacttgaactctggttcttttaaaattaattttggttggtgttgggggaggcgcgagtgcgtgtgagaagaaccgacccaccccgcgcaaggggaagcctcctgtctcccctttccccgcgtccgagaaggcggaaacccacagtgttacctgacttatgaaacttgaaaccgcctctggagccgccattctgcagagtatttggaaaaagaaaaaagggtttatgcttacgtctctggggtcggggggattatgtcacgagcgttcaaactgctggaaatctcaaaactgtactgtctttatttttgtatattgtatttatatataaaaagaaacgtctacgtatgcatgctaaattattatttagcttctcccatcgcccacgatggaatgtaaaataaattggttttgtactggat

SEQ ID NO: 18127 - protein, 401 aa, Homo sapiens; identical to SEQ ID NO: 2178

SEQ ID NO: 18128 - DNA, 1260 bp, Homo sapiens
cccggtctacggctactccgcggcggcggcggcggctgcgctggcgggccagcacccggcgctctcctactcgtacccgcaggtgcaaggcgcgcaccccgcgcaccccgccgaccccatcaagctgggcgccggcaccttccagctggaccactggagcaccagttcaagctcaacaagtacctgtcgcggcccaagcgcttcgaggtggccacctcgctcatgctcaccgagacccaggtgaagatttggttccagaaccggcggatgaaatggaaacgcagcaaaaaggccaaagagcaggcggcgcaggaagcggagaaacagaagggcggcggcgggggcgcggggaagggcggcgcggaggagccgggagccgaggagctgctggggccgccagcgcccggagacaagggcagcggacgccgcctgcgggacttgagggacagtgaccccgaggaggacgaggacgaggacgacgaggaccatttcccctacagcaacggcgccagcgtccacgccgcctcctccgactgctcctcggaggacgactcgccgcccccgcggcccagccaccagcccgcgccccagtaggagccccgcggcccagcaggtgcggcgcgcacggagcgccccggccggcggcttctcccggaggccccggcgcccgcacccacccggcccggccccgagagcaggctcgaccgccgccccatggacccctcgcccaggccggggctggagggattcggccgcggctccggtcctgggcgcttcccttttaagcaagggcgcctcacctgctcttcaagaaacagcgagagggagacccagggggctgaaacttgaactctggttcttttaaaattaattttggttggtgttgggggaggcgcgagtgcgtgtgagaagaaccgacccaccccgcgcaaggggaagcctcctgtctcccctttccccgcgtccgagaaggcggaaacccacagtgttacctgacttatgaaacttgaaaccgcctctggagccgccattctgcagagtatttggaaaaagaaaaaagggtttatgcttacgtctctggggtcggggggattatgtcacgagcgttcaaactgctggaaatctcaaaactgtactgtctttatttttgtatattgtatttatatataaaaagaaacgtctacgtatgcatgctaaattattatttagcttctcccatcgcccacgatggaatgtaaaataaattggttttgtactgga

SEQ ID NO: 18129 - protein, 123 aa, Homo sapiens [sequence omitted]

SEQ ID NO: 18130 - DNA, 348 bp, Homo sapiens
acccgaagctactgaatcggcgctctgggcaccttagatgaacccgtgcgcccgccgtctgaaccgtcgaggcgcagcgctagatgcctcagaccgcccgtgggtcacaagtgcaaaggagacgtctgagtgtccctgttaaacagggcccatcgcaggaggcttcctctccacaggagccggctttggtagcagtggattgacccagaggcaagaggagaactgaggccagtcgggggccaggaagggaggttccgggaagcccaggagttgaaggctgcagtgagcgagactgcacccctgcactgtaccctgggtgacacagcaagaccccatctctcaataaat

SEQ ID NO: 18131 - protein, 39 aa, Homo sapiens
MPQTARGSQVQRRRLSVPVKQGPSQEASSPQEPALVAVD

SEQ ID NO: 18132 - DNA, 991 bp, Homo sapiens
ggcggggacaccaacggggagtggatactccgaggctcaacctggggcctctgcccgccctcccctgggtgcggagccggacggcgggcactggcaacccccgggcccctggagagccccgcggcggcccaagacccgctcccgagacacgtgggcccctccggacttggttggtccctggagccagctgcgcgcgtcctctccggcctccttgtcggcgctggagtgggtccacgtctgccttgcggagcgcggtggttccacgctcctgagcgcccacgctgcgcagacctggccgctctgcgaggcgacggcagcgcactgaagaccgtggtgtttcccaagccctccctgctctcgggcctccagggcgcagcaggggagggttttgtccccgtggccaaagctctgcaggtcgaaccttatctgctatgggaaggccccgcattttcagattcacgcagggccctctgcagactgttggcagaaaaaaggtagccaccaaacacatgcataagctggacttttcccagaatgctgcagcagaactaccctccagatagacactagcctgcgggccacagtgctacgtgagtcttgcaaagaggagatctttatggcgaggctgagagcactgcctgcatgctttaccagagcccagcctccagcctccacggaaaatgtgttttggaatcaacactctttgcaaaggctccacactgctttctggtagcattggcctgggcgcccaggcactcctttagaacccacctgttccccccacccaccctagtgggaggaggagagggttacactgacagataccggcagctctgcaacccgggaacaacgcagacaacatacaactcgacagagtcacagaaggtggcgtccatcgcgcctggatggtgactactgccctgcgggctgctgggtgggtgaaacacacagggaagaagcacaaatacacacacagatgtggctcagggac

SEQ ID NO: 18133 - protein, 43 aa, Homo sapiens
MGRPRIFRFTQGPLQTVGRKKVATKHMHKLDFSQNAAAELPSR

SEQ ID NO: 18134 - DNA, 1156 bp, Homo sapiens
ggcggggacaccaacggggagtggatactccgaggctcaacctggggcctctgcccgccctcccctgggtgcggagccggacggcgggcactggcaacccccgggcccctggagagccccgcggcggcccaagacccgctcccgagacacgtgggcccctccggacttggttggtccctggagccagctgcgcgcgtcctctccggcctccttgtcggcgctggagtgggtccacgtctgccttgcggagcgcggtggttccacgctcctgagcgcccacgctgcgcagacctggccgctctgcgaggcgacggcagcgcactgaagaccgtggtgtttcccaagccctccctgctctcgggcctccagggcgcagcaggggagggttttgtccccgtggccaaagctctgcaggtcgaaccttatctgctatgggaaggccccgcattttcagattcacgcagggccctctgcagactgttggcagaaaaaaggtagccaccaaacacatgcataagctggacttttcccagaatgctgcagcagaactaccctccagatagacactagcctgcgggccacagtgctacgtgagtcttgcaaagaggagatctttatggcgaggctgagagcactgcctgcatgctttaccagagcccagcctccagcctccacggaaaatgtgttttggaatcaacactctttgcaaaggctccacactgctttctggtagcattggcctgggcgcccaggcactcctttagaacccacctgttccccccacccaccctagtgggaggaggagagggttacactgacagataccggcagctctgcaacccgggaacaacgcagacaacatacaactcgacagagtcacagaaggtggcgtccatcgcgcctggatggtgactactgccctgcgggctgctgggtgggtgaaacacacagggaagaagcacaaatacacacacagatgtggctcagggacatttgaatgcttcagtgtgtgaattttttagcgcattctgactcgaaattatggctgaatagtggcgcactaatgtccaagtccatgttcgataatggcaggaagtctgcactaattggtctatttagtagttgctgaggtggcaaaagctgcagctgctggtgg

SEQ ID NO: 18135 - protein, 43 aa, Homo sapiens; identical to SEQ ID NO: 18133

SEQ ID NO: 18136 - DNA, 430 bp, Homo sapiens
ctgggcttgctcacacttgacccagaagcctgagatgtggcatttctgaagtgtccaatttatgaagttgaaaactggggcaagctcatctgtttgtgcaatgttgattgccaacggttaatcaccaagggtaagtggaagaaatcattcctgttcatttgcaaatggaaatcaaatgaggactgtgccgaaatgcatcagcattttcacttccaactgcaaggatttcagaagacagctgaccttgggctgcctggcaggcacgggcctggcgccgatacttctgctcagagtgcctgtgctttttggtgcatgcatcaagtcctgaagtaatagccccacgtatcagatgtgtaatggatttctctccatgctgcgggattcattaccatgatttatggctgttttaatgtacacagccttcttaaac

SEQ ID NO: 18137 - protein, 50 aa, Homo sapiens
MRTVPKCISIFTSNCKDFRRQLTLGCLAGTGLAPILLLRVPVLFGACIKS

SEQ ID NO: 18138 - DNA, 789 bp, Homo sapiens
gtggtttgctgcacctattaacccatcctgttttgcctggcattctgcagaagcattgctgtatcttaccagacaggaatacagagtcgcagtgcacgctctgcggggagccggaaggcagaacatgacggagatgcgcaggaatggcaaagtacgaggggaaaacagacagtgggatatggtgaaaccgtgacggttggtgaatgagactttgatccaatgacattaaagcagatgagccacccaaaactaatatacagtgtctactgcagaagacgtgtgctcttcaccagtctgtggaccaggaaacgagccgctggggatctcagtcgcaagggtgctcaggtggccttggtgcagacactcacagctctcagactgcagagtgtgccggtcctcggagaaggggtgtccttcagggcagtgcttctctggctgatgccacagactggctagtggatggccagactcatcacactgacacccctgttcacctaaaccagatacaaccccttcctgatgcatctgttggtgccaaatcttttttttttttttgtagctttttattattaaaacagtcactgcaattatcaggagtcgtctaatgtacagtgactgctattcctattgctggtgagtgagaatattaataccatctgtagtagtgagacagcaaatatttcccgcctcacaggtgccctggtattttagtgcagaaaatattcttacagttccctggaaagcacgctttataaactcttacacattttcaaaataaagattttttaa

SEQ ID NO: 18139 - protein, 78 aa, Homo sapiens [sequence omitted]

SEQ ID NO: 18140 - DNA, 432 bp, Homo sapiens
aggttttgcctggcattctgcagaagcattgctgtatcttaccagacaggaatacagggcctctgaagagcaccggcagcttccttcttagcagaggagaaaatctctgccatctcgtgctcgcctacctcgactcgccagacgccctggagcagaggaggagcagtggtcggcagcggccagccgtgcaggtgccacacctgatggtccacctgggagaaccaggcaggaagccggaaaggtgcggtacctttgttcctaccaagaagatacagacagcccaactaaatccttgaaatgcagcgtggcgtgaaaatggagcggcattttagttaacgagggtctggatgccattcacaggaatgcagtttctacagggttctgctttgcagagacctctcctgataataataataaatttactcagaacaa

SEQ ID NO: 18141 - protein, 30 aa, Homo sapiens
MVHLGEPGRKPERCGTFVPTKKIQTAQLNP

SEQ ID NO: 18142 - DNA, 1167 bp, Homo sapiens
ttcagcagtcactttaactaaaaagtctttgctatttgagattttatcttcttgtctgttaaaaaactgtttggcaccttaatttgcatgaatcgatttccagtcgctcaaatccagtttgtgcaatgacaagctggtgtggctgaaacggcagttgctcaagagcattagaacagccttcaccatgtgggtttacatggacagcacggtcagcagacagtgagacgggcgcttgtccactcgtctgacaccgtggggccataggaggcagcgactgagaaggtcagtcccattaaaaatgccctttggctcatctggaagctgtatctctggtcatgcaccatgccagccacgccagccacgccagcattatcacggcatgtgctttaaaatcatgcagacgttgttctagagtgagtgtgaacagctttcacacttgggcactgtgccggttcccatgctggctttcccacatgcacacaggtggctggcacgcagctctgcacctcttactgttgggagctcagaagcctctctctgtggtggtttttcatctcgggataattgaacccagctgggaagtaccaggaccagagaatctctgctgcataatatcaccaccccgtggcaactcacaaagcaagattttcaccgagaatcgcacatagaaataatttcacatctgcttctggaaagattttcaccgagaatcgcacatagaaagaattccacatctgcttctggagcacatttccctctaaagagaggggcagagcgacttcaccgtctgtcgtcatctggtggtggaaaccacttctaggtttgaagagtcgcagtgcacgctctgcggggagccggaagggagagatggggagagatgatcccaacgtgtgactctaaaagccgaatactaaaggcttctgtatactcagggtcacagaagctcaaccgtgtccattggaaaggctcttactcgtaatttaaaacacaaaaatgaaaaaaagatacagacagcccaactaaatccttgaaatgcagcgtggcgtgaaaatggagcggcattttagttaacgagggtctggatgccattcacaggaatgcagtttctacagggttctgctttgcagagacctctcctgataataataataaatttactcagaacaa

SEQ ID NO: 18143 - protein, 110 aa, Homo sapiens
MHHASHASHASIITACALKSCRRCSRVSVNSFHTWALCRFPCWLSHMHTGGWHAALHLLLLGAQKPLSVVVFHLGIIEPSWEVPGPENLCCIISPPRGNSQSKIFTENRT

SEQ ID NO: 18144 - DNA, 644 bp, Homo sapiens
atggtttctagcctggccgaggcgtttgctgactctgtctcatttaatccttgggctgctccaggaaatcgccgcctgcaaccccgcttggcagaggaagaagctgtcgctccctgggctgggcctctgaagagcaccggcagcttccttcttagcagaggagaaaatctctgccatctcgtgctcgcctacctcgactcgccagacgccctggagcagaggaggagcagtggtcggcagcggccagccgtgcaggtgccacacctgatggtccacctgggagaaccaggcaggaagccggaaagagtcgcagtgcacgctctgcggggagccggaagggagagatggggagagatgatcccaacgtgtgactctaaaagccgaatactaaaggcttctgtatactcagggtcacagaagctcaaccgtgtccattggaaaggctcttactcgtaatttaaaacacaaaaatgaaaaaaagatacagacagcccaactaaatccttgaaatgcagcgtggcgtgaaaatggagcggcattttagttaacgagggtctggatgccattcacaggaatgcagtttctacagggttctgctttgcagagacctctcctgataataataataaatttactcagaacaa

SEQ ID NO: 18145 - protein, 151 aa, Homo sapiens
MVSSLAEAFADSVSFNPWAAPGNRRLQPRLAEEEAVAPWAGPLKSTGSFLLSRGENLCHLVLAYLDSPDALEQRRSSGRQRPAVQVPHLMVHLGEPGRKPERVAVHALRGAGRERWGEMIPTCDSKSRILKASVYSGSQKLNRVHWKGSYS

SEQ ID NO: 18146 - DNA, 537 bp, Homo sapiens
gggctcccgaatgagacatcctgtgttgatcgcagccgtctcccagcatgtggagcaacactaggaccgtggtagatgttcagtcatgttcgctgaaggaagaagggagtgaatgaatgtcttctctgaggatagctgagcatccgtgcatccgtctggccatgagaacttggttgcgctcacatgaggatcctgagcagagtcgcagtgcacgctctgcggggagccggaagggagagatggggagagatgatcccaacgtgtgactctaaaagccgaatactaaaggcttctgtatactcagggtcacagaagctcaaccgtgtccattggaaaggctcttactcgtaatttaaaacacaaaaatgaaaaaaagatacagacagcccaactaaatccttgaaatgcagcgtggcgtgaaaatggagcggcattttagttaacgagggtctggatgccattcacaggaatgcagtttctacagggttctgctttgcagagacctctcctgataataataataaatttactcagaac

SEQ ID NO: 18147 - protein, 55 aa, Homo sapiens
MRILSRVAVHALRGAGRERWGEMIPTCDSKSRILKASVYSGSQKLNRVHWKGSYS

SEQ ID NO: 18148 - DNA, 394 bp, Homo sapiens
gaaaaagagtcagccttggggaactcgggacacagccaaccccaggaatgtgcctttgggtcagagcccagcccagctctgcttccacagggagagatggggagagatgatcccaacgtgtgactctaaaagccgaatactaaaggcttctgtatactcagggtcacagaagctcaaccgtgtccattggaaaggctcttactcgtaatttaaaacacaaaaatgaaaaaaagatacagacagcccaactaaatccttgaaatgcagcgtggcgtgaaaatggagcggcattttagttaacgagggtctggatgccattcacaggaatgcagtttctacagggttctgctttgcagagacctctcctgataataataataaatttactcagaac

SEQ ID NO: 18149 - protein, 33 aa, Homo sapiens
MIPTCDSKSRILKASVYSGSQKLNRVHWKGSYS

SEQ ID NO: 18150 - DNA, 3008 bp, Homo sapiens
ggactcacgtaaaatgctgagtccagtcccgggtatggagcagggctcgggaacctacagaaaataccgagtccggtcccaggtatggagcagagctcgggaactcacataaaatactgagtccagtcccgggtatggagcagagctcgagaattcacagaaacttccgagtccagtcccaggtatgaagcagagctcgggaactcacagaaaattccgagtccggtcccaggtgtggagcagagctcgggaactcacagaaaattccgagtccggtcccaggtgtggagcagagctcgggaactcacagaaaatgctgagtccggtcccaggtatggagcagagctcgggaactcacagaaaattccgagtccggtcccaggtatggagcagagctcgggaactcacagaaaatgccgagtcccgtcccaggtatggagcaaggctcaggaacttatagagcttctgcttccctttcccttcccagctacaggcacccttttcccccagcacacacaggttggaaaagagtttaagaacagaatgcctagttgttagtaatccatcacgacacctgacttaattaccaaagattattttaatggccgtgcatactactctcctagaacttctgtccttcctcccccctccctgggaccttggcagaacccttgcggcaaatgtcgtgttgtgttgagggggcctcccgcgctgcctctgctgtggtcacagcccttcctggaggcatgaggaaatggagccggccgtggctctgctgccgtgggaaggggaggggtgctgtggcgagaacaagcccagagcctccttcaaacatcagaggcctcctgacatcctctgcaggactcatcccaacctggaatcatctccaacttgtttatttgtaaaacgtgaagcttatgttgggcccttccttatcctccaccctctcccagagtccatcaggcagggacgcccatgcacaggcaggatcgggaccatcaagattgtgacagcaagaaaaagagtgaaagtgttcgtgtcacacacttgatgtccagcatgaacctcagacctatcttgagctgatcatcttcaaaaaaaacttcattaaaaaaaaaaaagtggaggttggagagtgttctaaatctcaaagcccatcagttgctgttgagagcagaacttgcagcagagatgagcttttccatgcctcctaggccccggagctcgagcatgatgcccaggcagaggcctctcatggaggagacagcagcttccatggaagggtgggacgtggtgctgtcaggacagggtcctgcaggagggctcaggtccagctcccacgtcaggtatcgatgggagaaggacctcaaactcagaggatccacagcactggcggagccagaaggacttggctaaccatgggacacagccacgctgcctatgagaaatggcatggcctcttccatggccagagggcggggggcagacagttctgttactcagctgcagaggccgcacagccaggagctggaagccacgtggggccagacagggacgcgttccgcatgtgagggtggtgagccccaccagatgagcacagagtggacaccgagccacagggaggacgctgagctcggttcatgcagcaggctgtagggtttatctacgcggcctcactggctggaaatacttgcttagataataagacaaggatgaaatcatacatggaaaatgaacagaactgcaacatgccacacacaccgtggttttaggggccgctctcgctgttcctgtgctgtgtccctggatgtgaggcccgtcctgttcatggtgcagtctcagaaaacacgagggatgccaccatccccgtctcctaggccgacgtccaggaagctgcagcttagatgtcaaggaggtgaacctcaaagctggactctgggttctcaccaaaaactggccccctcgcctccaactccgatttgtgctgggtgctgaccccacacacgacagggtgtgcttcgcgccgggactgaacagggacaggagggacggtcagtacttgacaagtacgaagcatggctctacgcccccaggtgcttcacagaggcaagatggcattcacctcctgttatgcatctggggagggcagagccgtgtttcagccgtgcaaacgccagcgtagggagggaaaacacatctggtaaaatccagtccagggcccctttcctacccttcccctcagtcccctggagggtccaagtacccactccaggggccagcccacgtgtatgtgtgtgtatatatatatatgtgagtgcatctacacactgtacacatatgcacactttgcacacagacacacacgtataacggtgctattggctttgaacattgctaggggctgaattttgtttccctgacaaatcgatatgctgaacccaatgcccagtgtggctgtgtttgaagtgaggatgtaatgaaggtaaactgaggtaatgagagggggacactgatctgaatggatcagggtctttcaggaagagacaccagcctgtctccctgaggacacagtgagcaggtggccaggaagaggccctccccaggagccaggtctgcccacgccttgatcagcctccagaacggtgactggggataactcactacctggaggtccatgtcattctcatcgctgtgattgcattcttgccgcattgctgtaaaaacgtttcctctccccaacttcacgaaaaccacgcagcaaagagggagaagaggaacagcgcttgccgggaacctgctctgtgctgggaacctgctctgtgccaggcacaatctgagggtctcagcccacctgcaccacgaaagggagtcagaaacccgggggccgcatttcatccaccccaactccaccctgcaaagcacccttccgaaaatcaacactcgggaaaggtttacaggcatcaggcgaacagcaggtaaagccaaaataaaaggattgttggcagaca

SEQ ID NO: 18151 - protein, 98 aa, Homo sapiens [sequence omitted]

SEQ ID NO: 18152 - DNA, 1965 bp, Homo sapiens
atggctttgcaaaggagccaacccattgtgtatgcggtggagcgtgttgatggattcagcaccagccagtatcagtccccacctcacgttggctgcttccccatccatgtcctgcttgtgcctttggaatcttgtggcatcatctcaggaagaaataaaaacatccccgactacttcatgctcttgtggcgtggaaaggccgcgcgggtcctgagtgtgcgtggaaaggccgtgcgggtcctgagtgtgcgtggaaaggccgtgcgggtcctgagcatgtgtggaacggccgtgcgggtcctgagcgtgcgtggaaaggccgtgcgggtcctgagcgtgcgtggaaaggccgtgcgggtcctgacagtgtgtggaaaggccgcgtgggtcctgactgtgcgtggaaaggccgcgcgggtcctgactgtgcgtggaaaggccgcgcgggtcctgagtgtgcgtggaaaggccgtgcgggtcctgactgtgcgtggaaaggccgcgcgggtcctgactgtgcgtggaaaggccgtgcgggtcctgacagtgcgtggaaaggccgtgcgggtcctgagtgtgcgtggaaaggccgcgcgggtcctgactgtgcgtggaaaggccgcgcgggtcctgactgtgcgtggaaaggccgtgcgggtcctgactgtgcgtggaaaggccgtgcgggtcctgagtgtgcgtggaaaggccgtgcgggtcctgagtgtgcgtggaaaggccgtgcgggtcctgagtgtgtgtggaaaggccgcgcgggtcctgagcgtgcgtggaaaggccgtgcgggtcctgagtgtgcgtggaaaggccatgcgggtcctgagtgtgcgtggaaaggccgtgcgggtcctgacagtgtgtggaaaggccgcgcgggtcctgactgtgcgtggaaaggccgtgcgggtcctgactgtgtgtggaaaggccgtgcgggtcctgagtgtgtgtggaaaggccgtgcgggtcctgagtgtgcgtggaaaggccgtgcgggtcctgactgtgtgtggaacggccgtgcgggtcctgactgtgtgtggaaaggccgtgcagatcctgagtgtgtgtggaaacaccgtgcgggtcctgactgtgtgtggaaaggccgtgcagatcctgagtgtgtgtggaaacaccgtgcgggtcctgactgtgtgtggaaaggccgtgcagatcctgagtgtgtgtggaaacaccgtgcgggtcctgactgtgtgtggaaaggccgtgcgggtcctgactgtgtgtggaacggccgtgcgggtcctgactgtgtgtggaaaggccgtgcgggtcctgagtgtgtgtggaaaggccgtgcgggtcctgagtgtggaacggccgacgtgcgcgtcctgcgtgtggcgtggaaaggccgtgcgggtcctgagtgtgcgtggaaaggccgtgcgggtcctgactgtgtgtggaacggccgtgtgggtcctgactgtgcgtggaaaggccatgcgggtcctgagtgtgtgtggaaaggccgtgcgggtcctgactatgtgtggaaaggccgtgcgggtcctgactgtgtgtggaaaggacgtgcgcgtcctgcgtgtggcgtggaaaggccatgcgggtcctgagtgtgcgtggaaaggccgtgcaggtcctgactgtgtttggaaaggccgtgcgggtcctgactgtggaaaggccgtgcgcgtcctgactgtgtgtggaaaggccgtgcgggtcctgagtgtgtgtggaaacgccgtgcgggtcctgactgtgtgtggaaaggccgtgcggatcctgactgtgtgtggaaaggccgtgcgggtcctgagtgtgtgtggaacggccgtgcgggtcctgactgtgtgtggaaaggccgtgcgggtcctgagtgtgtgtggaacggccgtgcgggtcctgactgtgtgtggaaaggccgtgcgggtcctgagtgtgtgtggatag

SEQ ID NO: 18153 - protein, 654 aa, Homo sapiens
MALQRSQPIVYAVERVDGFSTSQYQSPPHVGCFPIHVLLVPLESCGIISGRNKNIPDYFMLLWRGKAARVLSVRGKAVRVLSVRGKAVRVLSMCGTAVRVLSVRGKAVRVLSVRGKAVRVLTVCGKAAWVLTVRGKAARVLTVRGKAARVLSVRGKAVRVLTVRGKAARVLTVRGKAVRVLTVRGKAVRVLSVRGKAARVLTVRGKAARVLTVRGKAVRVLTVRGKAVRVLSVRGKAVRVLSVRGKAVRVLSVCGKAARVLSVRGKAVRVLSVRGKAMRVLSVRGKAVRVLTVCGKAARVLTVRGKAVRVLTVCGKAVRVLSVCGKAVRVLSVRGKAVRVLTVCGTAVRVLTVCGKAVQILSVCGNTVRVLTVCGKAVQILSVCGNTVRVLTVCGKAVQILSVCGNTVRVLTVCGKAVRVLTVCGTAVRVLTVCGKAVRVLSVCGKAVRVLSVERPTCASCVWRGKAVRVLSVRGKAVRVLTVCGTAVWVLTVRGKAMRVLSVCGKAVRVLTMCGKAVRVLTVCGKDVRVLRVAWKGHAGPECAWKGRAGPDCVWKGRAGPDCGKAVRVLTVCGKAVRVLSVCGNAVRVLTVCGKAVRILTVCGKAVRVLSVCGTAVRVLTVCGKAVRVLSVCGTAVRVLTVCGKAVRVLSVCG

SEQ ID NO: 18154 - DNA, 435 bp, Homo sapiens
gcgtccaccaactaggagcttaatcaacacaacgctgtggcctctccagctcagggacgtgcctttcccgtgtcttcttctcacacacaaacgtagcctgcaaggaagacttaagaggccaattaaaaataaaggtcacggcgcatggtgaggagttgctgttcgtaaccgacggaaaaggcttcatacgtgaacacggctggacaagcaaccagaacaggtgcttccccaggatgtccagaaacaagcagagaccgtgaaggacatttaacctcaccaccaattccatgtgtgcccatgaaaacaagattccattgttggctgacagattggcaaagattaatactagccaatgttagcaaagacatgaaaaaatgggccgttacggttcctgcttacttattaaacatttctgtgggccagtttggcaatttg

SEQ ID NO: 18155 - protein, 45 aa, Homo sapiens
MKTRFHCWLTDWQRLILANVSKDMKKWAVTVPAYLLNISVGQFGN

SEQ ID NO: 18156 - DNA, 5598 bp, Homo sapiens
ggggtcgcgggggacgcgggggacgcgggggacggcggggaacggcgggggacggcggggaacagcgggggacggcggggaacagcgggggacggcggggaacagcaggggactgcgggtcgcgtcctggccgccgaggagctccttcccttaacagagctgagagaggcatctggagctgcagcatggaccagcgagagcccctgcctcccgctcctgcagaaaatgaaatgaaatatgataccaataataatgaagaggaagagggagaacagttcgattttgacagtggagatgaaatcccagaagcggacagacaggccccatccgcccctgagacaggaggtgctggagccagtgaagcccctgcacccacaggaggtgaggatggagctggagcagaaaccaccccagtggcagagcctactaagctggtgctcccgatgaaagtcaacccatattctgtcatcgacatcacgccattccaggaggaccagccgcccacccccgtgcccagcgctgaggaggagaatgtgggtctccatgtgccctgcgggtacttggtgcctgtaccctgcggctatgcggtgccctccaacctgcccctcctgctgcccgcctactccagcccggtcatcatctgcgccacgtccctggacgaagaagaaacaccagaagtcacagaagatcgccagcccaattctctgagttccgaggagcctccaaccagtgaagatcaagtcggtcgagaggacagcgcacttgcccgctgggccgcagacccggccaacacagcctggatggagaatccagaggaagcaatttacgatgacgttccaagggaaaactcagactctgaaccagatgaaatgatttatgatgatgttgagaatggggatgaaggtggaaacagctccttggaatacggatggagttcgagtgaatttgaaagttacgaagagcagagtgactcggagtgcaagaatgggattcccaggtccttcctgcgcagcaaccacaaaaagcaactttctcatgacctaacccgtttaaaggagcactatgagaaaaagatgagagatttgatggcaagcacggtgggcgtggtggagattcagcagctcaggcagaagcatgaactgaagatgcagaagctcgtgaaggccgcgaaggacggcaccaaggacgggctggagaggaccagggcagccgtgaagaggggccgctccttcatcaggaccaagtctctcatcgcacaggatcacagatcttctcttgaggaagaacagaatttgttcattgatgttgactgcaagcacccggaagccatcttgaccccgatgcccgagggtttatctcagcagcaggttgtaagaagatatatactgggttcagttgtcgacagtgaaaagaactacgtagatgctcttaagaggattttggagcaatatgagaagccgctgtctgagatggagccaaaggttctgagtgagaggaagctgaagacggtgttctaccgagtcaaagagatcctgcagtgccactcgctatttcagatcgcgctggccagccgcgtttccgagtgggactccgtggaaatgataggcgatgtcttcgtggcttcgttttctaagtccatggtgctggatgcatacagtgaatatgtgaacaatttcagcacagccgtggcagtcctcaagaaaacatgtgccacaaagcccgcttttcttgaatttttaaagcaggaacaggaggccagccccgatcgaaccacgctctacagcctgatgatgaagcccatccagaggttcccacagttcatcctcctgctccaggacatgctgaagaacacctccaaaggccaccccgacaggctgcctcttcagatggccctgacagagctcgaaacactagcagagaagttaaatgaaagaaagagagatgctgatcaacgctgtgaagtgaagcaaatagccaaagccataaacgaaagatacctgaacaagcttctcagcagtggaagccgatacctcattcgatcagatgatatgatagaaacagtttacaacgacagaggagagattgttaaaaccaaagaacgccgagtcttcatgttaaatgatgtgttaatgtgtgccaccgtcagctcacgcccctctcatgacagccgtgtgatgagcagccagaggtacttgctgaagtggagcgttccactgggacatgtggacgccatcgagtatggcagcagcgcaggcacgggcgagcacagcaggcaccttgccgttcacccgccggagagcctggccgtggttgctaacgcgaaaccaaacaaagtttacatggggccaggacaactgtatcaagatttacaaaacttgttgcatgacttaaatgtaattggccaaatcactcagctgataggaaaccttaaaggaaactatcagaacttaaaccagtcagtagcccatgactggacatcaggtttacaaaggcttattttgaagaaagaagatgaaatcagagctgcggactgctgcagaattcagttacagcttcccgggaagcaggacaaatctgggcgaccgacgttctttacagctgtgttcaatacgttcacccctgccatcaaggagtcctgggtcaacagcttacagatggccaagctcgccctagaagaggagaaccacatgggctggttctgtgtggaagacgatgggaatcacattaaaaaggagaagcatcctctcctcgtcggacacatgcccgtgatggtggccaagcagcaggagttcaagattgaatgtgctgcttataaccctgaaccttacctaaataatgaaagccagccagattcattttccacggcacatggtttcctgtggatcggaagttgcacccatcaaatgggtcagattgccatcgtctcgtttcaaaattccactcccaaagtcattgagtgcttcaacgtggaatctcgcatcctgtgcatgctgtacgttcccgtcgaggagaagcgcagagagcctggggcacccccggaccccgagaccccggccgtgagagcttctgatgtccccacgatctgtgtagggacggaggagggaagcatttccatttataaaagcagtcaaggctccaagaaagtgagacttcagcactttttcactcctgagaagtccacagtcatgagcctggcttgcacgtctcagagcctgtacgctggcctggtcaacggggcagtcgccagctacgccagagccccagatggatcctgggattcagaacctcaaaaagtgatcaagttaggcgtcctaccagttagaagtctactcatgatggaagacacgttgtgggcggcttccggaggtcaagtcttcatcatcagtgtggagactcatgctgtagagggtcagctggaggcccaccaggaggaaggcatggtgatctcccacatggccgtgtccggcgtcgggatctggattgccttcacctcagggtccacgctccgcctttttcacacggaaactctcaagcacctgcaggacatcaacatcgccacccctgttcacaacatgctgccagggcaccagcggctgtcggtgacgagcctgctcgtctgccacggattgctgatggtcggcaccagcctgggagtcctcgtggccctgccggtcccacgtctgcaagggattcccaaagtgaccggaagaggcatggtctcctaccatgcacacaacagtcctgtcaaattcatcgtcctggccacggctctgcacgagaaagacaaggacaaatccagggacagcctggctcctggccccgagcctcaggacgaagaccagaaggacgcacttccgagtggaggagctggttcatctctgagccagggtgaccctgacgcagccatctggttgggagattcgctgggatcgatgactcagaaaagcgacctgtcctcctcatctgggtccctgagcttgtctcacggctccagctctctagagcacagatcagaggacagcaccatctatgatctcctgaaggatcctgtctcgctgagaagcaaagcacgccgggccaagaaagccaaggccagctcggcgctggtggtctgtggagggcagggccaccgccgggtgcacaggaaggcccggcagccccaccaggaagagctggcgccgaccgtcatggtctggcagatccctctgctgaatatataagcaggacggccgccttctgctgtcagaatttgcaatcaagggtgacttctcagctaatcctacagcctgagtggttaagctgtgtctacactggttgggaataaattaaaaacagtatttgggggagaaacgtgcaatagcgtaatggtggtgtccctgccaattccttccttctcttctgtacagcagaagtaattacaagcacttctcacgaaggcagaagactgatgcaattttcgagtaattgagtgcagttctgggaaaataccacattctttttgactgctgtagtccatatgtgaatactaaatgttaaacttcatcagcgtcagacctattgtatcatattagagaatttgcagactaagaatttatgagaaaatatatgtattcagtagtgcaggcatttattaacaattcttaaaagttttacctgattcagattcacgacttttatttatattctatatttttgaatttcagagtaaaatttgttaacaattttaaaagccaggtaacacctaccagtccagttagcatgatttgctttcagaagtgagctgggttttccaaagtggtataatgtgtgtactgtatattttaacaaagtaatatttttgtattgcatttttctattaaaaaattaacagttaatgtttcagtcaatgtattatctgtagcatttcacaaataatgtttgctttgaaccaaaatgctcagtgcctatcaacatttggactcaagcatcaacaccaaattattcctcccttctcgtataaatagagtgactatccacaggagaaaagtgtgtgctttagtattagaggagataggcagagaagtcttgcttagttccttcgtgcagcttcttgcccctgttgacgtggaatgctgtgtctgctttagcacgcacgctccgaatgactcctggtgctaggccatgctggctgctgtcactgagcgggactcaggccaagaggcgtgacctcgggccagcctgtctgttgtgcagacgcctcctctgcagaacgcatcagtttctattctgcagttgcagagccagccccgcgtgagaacgtgcataatgagtgcacaccatcatgtcaaggtgcatacttagtgagcgccatcctgctgaacgtgtatttcagtgtttcacttactggacggataacaagaaaaaaatcctaacacaggcaggcaccagaaataaatgtctcagcactttacagatgactaaaaatgttaattttatgacttagccaaatatgttctaggttgcatatatcccccatgtgaaagtgatttcttcccaagcttctcaaactgttagctgctgtctgacttcatcaataaagtatttttattttaaaatgca

SEQ ID NO: 18157 - protein, 1344 aa, Homo sapiens; identical to SEQ ID NO: 2180

SEQ ID NO: 18158 - DNA, 8192 bp, Homo sapiens
ttccccaaattgatggacataaacccatatgcttatctcagcatgtgtttaaaaagcacttgctgagattcagtgaccatccaacattaaaaactgctgatagaaggaaactcacttagctgaattaaggacgtgttcttaaaatctaccgccaacgtaatggggaggagctcacggcgttcgttaatttattcattccgcaaatatgttttgggcagttacataccgaatagtagatggaggtgtgcctgctgtcatggagatagggtgatttcatcctgttgatcaggaaaactcctaggtgcttgcaggtaaatgtgccacaaagaaagtgaggaccaaaggttagttgatgtaaaaacaagtttgaaatgcattttggggtaatttatccggtcgcttcgggcattcctcgcggaaggcgtggtctggtgactcagaagccaacacactgcgggagtccagccgtcggccccctgccgtgtggcgaggcccagtgtgtcccctttgtaaggacagcacaagcaggagttaatggaccggccatccatagcggtggtggggcagggagccagtttccgaaagaaactcacgccgccgcaggagggccctgtgggatgctctgtgcagagctgttgtgcggaccgggagacgggaaagcctggtggctgcaggagggcaccgtgcagaagtatccagtaaaccacccacagcacggcagcagaaaaacgaggaaattatatgtgtgtatgtttataagaactcagaagcaatggtgagcaaaaagcaaaagcaagaggagaaagtcacagtgtgctggcatcaagttgcattgagaggagcccgcggggtagtgcacccgcatttcctcgttgcgttgagaggcgcccgcggggtagtgcacccgcatttcctcgtttgagaggcgcccgcggggtagtgcacccgcatttcctagttgccttgagaggtgccgcggggtagtgcacccgcatttcctagttgccttgagaggtgcccgcggggtagtgcacccgcatttcctagttgccttgagaggtgccgcggggtagtgcacccgcatttcctcgtttcattgagcggtgcccgcggggtagtgcactcgcatttcctagttgccttgagaggtgccgcggggtagtgcacccacatttcttcactcgtttagagttcggggctctcagaacacagggagaatatgggagaattccttactagatgttacagaggccacacagggccacttttttcttttttttttattgtgtcaggtatacgtaaatattcctttcggtcagttcagcacgtaggactgagtggcattaggtacgctcactgtacagccaatgcctccataggccactttttaaatacgcggggctaagggccaacgacaagattgtcatcgaggacaataagtcgatggcgctgcctggtcactggcttggtcagaaaacacatgccagggtgactggatttaacgttcaattttagaaccacaaatctgccagcccaggcattcaagaggaagtgagtaattcactgaattgatggttagcaagacccttcaaagtccttggaagttccgtgtttgctgggggtcacaacagcaattgcgtttctaaaacattgaaaaccacccgtttttcacacatctgaatagcctgagttctaacagacctaagtaaaggcgtccaaacgtgcctgatcctgtggctgggtcccaggagccttaacaaggcattgagagagctggattgattgattagactcttgccaactgctgtgcggaatacagaaaatgcagctccagctctcaaagggctgaaaatctaattgaggtgaaaaaggtaacatgtgtgaaaaccatgtctgtgtagacttgttttgtatggaccagaaaagttggaagtccagagatggatgcgaggaaataggggatggagtttccttataacctctggagggacagtccagatacataccggggtgtgtagcgggtggaggttctaagacaggctggaggaacagtgcagacacacaccagggtgtgtagggggtagaggttctaagacagtctggagggagagtgcagacacacaccggggtgtgtaagcagtggaggttctaagacaggctggaggaacagtggagacacacaccagggcgtgtagggggtagaggttctaagacaggctggaggaacagtggagacacacaccacggcgtgtagggggtagaggttctaagacagtctggtgggagagtgcagacacacccggggccgtgtagggggtacaggttctaagacagtctggtgggagagtgcagacacacacggggctgtgtcggggatagaggttctaagacagtctggtgggagagtgcagacacacaccagggcgtgtagggggtggaggttctaagacaggctggaggaacagtggagacacacactggggagcgtaggggtgcttttctctgagtcccctagtacatggtagaggctgtagaccctccgctcttgggcacgtgggtaggctctcaggatgactcttggctcttgggcatgtgggtgagctctcaggatgatgcccagccccaaatttcaggcaattgtgcaaggacttgacccattcatccgctgagctgagttgctgagactgctgggtgcccgggtggtgatcattgtccgtggcacacagaacacactgcagcttctgcaaagtgagctcatttcacgcattttatggctttgccaggctgctgttgacctgccagaacttttaatcagacatttggaggacctgttttgtagtcagtggagaaatattacaaggatagggtaatttgaaatatctaaggattgtaagtgacaagttcatgtctaattttgcatttccagtgaaagcaagtgttggctttgaatgttacttatgtgctgagatgtgtatattcctcagtgcttaattactaaggatttttaaggccaagttttgttacagtgaatgactgtggatgcataaagaataaatttaatatttttaaggcatggagattatttgtatctaagaaaccaggtaaaataaagaaacatttatgcttgtgtgactgataaaagagttagagagacactcatattctgggagtttgaagaatgtcattttcattctctaaaagtcttgttagtgtcacagcattgaaaatttaaaaatccgtgtgtattttcttgctagtgctggtacttgaatatctgtatcatccacctatccatccacctacccatatttctataatccaccgtccatcgacatgcctatcatctgtccaccatttctctctgtctaattttcaaaacatcctgtaagtttatataaaggaagatttttcttcttgtgaagttctctaaggctgacaagttacctggcatgactgtggcggatgcccatagccaggtggtcctcggggtacagatggggcaggggcacttgtgagaaacacctgaagtgcttttccccagcctccccggccctgcccgggtggtggaggcgctgcacggtgccttccatggagcaagcccggggctccgcagggtcctcagcatgattcagatttccttccacccccagctctagatgatttggtaaaaccacaaacaggcacaaaacagcccacatggaattctaaagttttaatttcattttggaatttatgcactcagatgaaatgatttatgatgatgttgagaatggggatgaaggtggaaacagctccttggaatacggatggagttcgagtgaatttgaaagttacgaagagcagagtgactcggagtgcaagaatgggattcccaggtccttcctgcgcagcaaccacaaaaagcaactttctcatgacctaacccgtttaaaggagcactatgagaaaaagatgagagatttgatggcaagcacggtgggcgtggtggagattcagcagctcaggcagaagcatgaactgaagatgcagaagctcgtgaaggccgcgaaggacggcaccaaggacgggctggagaggaccagggcagccgtgaagaggggccgctccttcatcaggaccaagtctctcatcgcacaggatcacagatcttctcttgaggaagaacagaatttgttcattgatgttgactgcaagcacccggaagccatcttgaccccgatgcccgagggtttatctcagcagcaggttgtaagaagatatatactgggttcagttgtcgacagtgaaaagaactacgtagatgctcttaagaggattttggagcaatatgagaagccgctgtctgagatggagccaaaggttctgagtgagaggaagctgaagacggtgttctaccgagtcaaagagatcctgcagtgccactcgctatttcagatcgcgctggccagccgcgtttccgagtgggactccgtggaaatgataggcgatgtcttcgtggcttcgttttctaagtccatggtgctggatgcatacagtgaatatgtgaacaatttcagcacagccgtggcagtcctcaagaaaacatgtgccacaaagcccgcttttcttgaatttttaaagcaggaacaggaggccagccccgatcgaaccacgctctacagcctgatgatgaagcccatccagaggttcccacagttcatcctcctgctccaggacatgctgaagaacacctccaaaggccaccccgacaggctgcctcttcagatggccctgacagagctcgaaacactagcagagaagttaaatgaaagaaagagagatgctgatcaacgctgtgaagtgaagcaaatagccaaagccataaacgaaagatacctgaacaagcttctcagcagtggaagccgatacctcattcgatcagatgatatgatagaaacagtttacaacgacagaggagagattgttaaaaccaaagaacgccgagtcttcatgttaaatgatgtgttaatgtgtgccaccgtcagctcacgcccctctcatgacagccgtgtgatgagcagccagaggtacttgctgaagtggagcgttccactgggacatgtggacgccatcgagtatggcagcagcgcaggcacgggcgagcacagcaggcaccttgccgttcacccgccggagagcctggccgtggttgctaacgcgaaaccaaacaaagtttacatggggccaggacaactgtatcaagatttacaaaacttgttgcatgacttaaatgtaattggccaaatcactcagctgataggaaaccttaaaggaaactatcagaacttaaaccagtcagtagcccatgactggacatcaggtttacaaaggcttattttgaagaaagaagatgaaatcagagctgcggactgctgcagaattcagttacagcttcccgggaagcaggacaaatctgggcgaccgacgttctttacagctgtgttcaatacgttcacccctgccatcaaggagtcctgggtcaacagcttacagatggccaagctcgccctagaagaggagaaccacatgggctggttctgtgtggaagacgatgggaatcacattaaaaaggagaagcatcctctcctcgtcggacacatgcccgtgatggtggccaagcagcaggagttcaagattgaatgtgctgcttataaccctgaaccttacctaaataatgaaagccagccagattcattttccacggcacatggtttcctgtggatcggaagttgcacccatcaaatgggtcagattgccatcgtctcgtttcaaaattccactcccaaagtcattgagtgcttcaacgtggaatctcgcatcctgtgcatgctgtacgttcccgtcgaggagaagcgcagagagcctggggcacccccggaccccgagaccccggccgtgagagcttctgatgtccccacgatctgtgtagggacggaggagggaagcatttccatttataaaagcagtcaaggctccaagaaagtgagacttcagcactttttcactcctgagaagtccacagtcatgagcctggcttgcacgtctcagagcctgtacgctggcctggtcaacggggcagtcgccagctacgccagagccccagatggatcctgggattcagaacctcaaaaagtgatcaagttaggcgtcctaccagttagaagtctactcatgatggaagacacgttgtgggcggcttccggaggtcaagtcttcatcatcagtgtggagactcatgctgtagagggtcagctggaggcccaccaggaggaaggcatggtgatctcccacatggccgtgtccggcgtcgggatctggattgccttcacctcagggtccacgctccgcctttttcacacggaaactctcaagcacctgcaggacatcaacatcgccacccctgttcacaacatgctgccagggcaccagcggctgtcggtgacgagcctgctcgtctgccacggattgctgatggtcggcaccagcctgggagtcctcgtggccctgccggtcccacgtctgcaagggattcccaaagtgaccggaagaggcatggtctcctaccatgcacacaacagtcctgtcaaattcatcgtcctggccacggctctgcacgagaaagacaaggacaaatccagggacagcctggctcctggccccgagcctcaggacgaagaccagaaggacgcacttccgagtggaggagctggttcatctctgagccagggtgaccctgacgcagccatctggttgggagattcgctgggatcgatgactcagaaaagcgacctgtcctcctcatctgggtccctgagcttgtctcacggctccagctctctagagcacagatcagaggacagcaccatctatgatctcctgaaggatcctgtctcgctgagaagcaaagcacgccgggccaagaaagccaaggccagctcggcgctggtggtctgtggagggcagggccaccgccgggtgcacaggaaggcccggcagccccaccaggaagagctggcgccgaccgtcatggtctggcagatccctctgctgaatatataagcaggacggccgccttctgctgtcagaatttgcaatcaagggtgacttctcagctaatcctacagcctgagtggttaagctgtgtctacactggttgggaataaattaaaaacagtatttgggggagaaacgtgcaatagcgtaatggtggtgtccctgccaattccttccttctcttctgtacagcagaagtaattacaagcacttctcacgaaggcagaagactgatgcaattttcgagtaattgagtgcagttctgggaaaataccacattctttttgactgctgtagtccatatgtgaatactaaatgttaaacttcatcagcgtcagacctattgtatcatattagagaatttgcagactaagaatttatgagaaaatatatgtattcagtagtgcaggcatttattaacaattcttaaaagttttacctgattcagattcacgacttttatttatattctatatttttgaatttcagagtaaaatttgttaacaattttaaaagccaggtaacacctaccagtccagttagcatgatttgctttcagaagtgagctgggttttccaaagtggtataatgtgtgtactgtatattttaacaaagtaatatttttgtattgcatttttctattaaaaaattaacagttaatgtttcagtcaatgtattatctgtagcatttcacaaataatgtttgctttgaaccaaaatgctcagtgcctatcaacatttggactcaagcatcaacaccaaattattcctcccttctcgtataaatagagtgactatccacaggagaaaagtgtgtgctttagtattagaggagataggcagagaagtcttgcttagttccttcgtgcagcttcttgcccctgttgacgtggaatgctgtgtctgctttagcacgcacgctccgaatgactcctggtgctaggccatgctggctgctgtcactgagcgggactcaggccaagaggcgtgacctcgggccagcctgtctgttgtgcagacgcctcctctgcagaacgcatcagtttctattctgcagttgcagagccagccccgcgtgagaacgtgcataatgagtgcac

SEQ ID NO: 18159 - protein, 1121 aa, Homo sapiens
MHSDEMIYDDVENGDEGGNSSLEYGWSSSEFESYEEQSDSECKNGIPRSFLRSNHKKQLSHDLTRLKEHYEKKMRDLMASTVGVVEIQQLRQKHELKMQKLVKAAKDGTKDGLERTRAAVKRGRSFIRTKSLIAQDHRSSLEEEQNLFIDVDCKHPEAILTPMPEGLSQQQVVRRYILGSVVDSEKNYVDALKRILEQYEKPLSEMEPKVLSERKLKTVFYRVKEILQCHSLFQIALASRVSEWDSVEMIGDVFVASFSKSMVLDAYSEYVNNFSTAVAVLKKTCATKPAFLEFLKQEQEASPDRTTLYSLMMKPIQRFPQFILLLQDMLKNTSKGHPDRLPLQMALTELETLAEKLNERKRDADQRCEVKQIAKAINERYLNKLLSSGSRYLIRSDDMIETVYNDRGEIVKTKERRVFMLNDVLMCATVSSRPSHDSRVMSSQRYLLKWSVPLGHVDAIEYGSSAGTGEHSRHLAVHPPESLAVVANAKPNKVYMGPGQLYQDLQNLLHDLNVIGQITQLIGNLKGNYQNLNQSVAHDWTSGLQRLILKKEDEIRAADCCRIQLQLPGKQDKSGRPTFFTAVFNTFTPAIKESWVNSLQMAKLALEEENHMGWFCVEDDGNHIKKEKHPLLVGHMPVMVAKQQEFKIECAAYNPEPYLNNESQPDSFSTAHGFLWIGSCTHQMGQIAIVSFQNSTPKVIECFNVESRILCMLYVPVEEKRREPGAPPDPETPAVRASDVPTICVGTEEGSISIYKSSQGSKKVRLQHFFTPEKSTVMSLACTSQSLYAGLVNGAVASYARAPDGSWDSEPQKVIKLGVLPVRSLLMMEDTLWAASGGQVFIISVETHAVEGQLEAHQEEGMVISHMAVSGVGIWIAFTSGSTLRLFHTETLKHLQDINIATPVHNMLPGHQRLSVTSLLVCHGLLMVGTSLGVLVALPVPRLQGIPKVTGRGMVSYHAHNSPVKFIVLATALHEKDKDKSRDSLAPGPEPQDEDQKDALPSGGAGSSLSQGDPDAAIWLGDSLGSMTQKSDLSSSSGSLSLSHGSSSLEHRSEDSTIYDLLKDPVSLRSKARRAKKAKASSALVVCGGQGHRRVHRKARQPHQEELAPTVMVWQIPLLNI

SEQ ID NO: 18160 - DNA, 3848 bp, Homo sapiens
tgtagtcagtggagaaatattacaaggatagggtaatttgaaatatctaaggattgtaagtgacaagttcatgtctaattttgcatttccagtgaaagcaagtgttggctttgaatgttacttatgtgctgagatgtgtatattcctcagtgcttaattactaaggatttttaaggccaagttttgttacagtgaatgactgtggatgcataaagaataaatttaatatttttaaggcatggagattatttgtatctaagaaaccaggtaaaataaagaaacatttatgcttgtgtgactgataaaagagttagagagacactcatattctgggagtttgaagaatgtcattttcattctctaaaagtcttgttagtgtcacagcattgaaaatttaaaaatccgtgtgtattttcttgctagtgctggtacttgaatatctgtatcatccacctatccatccacctacccatatttctataatccaccgtccatcgacatgcctatcatctgtccaccatttctctctgtctaattttcaaaacatcctgtaagtttatataaaggaagatttttcttcttgtgaagttctctaaggctgacaagttacctggcatgactgtggcggatgcccatagccaggtggtcctcggggtacagatggggcaggggcacttgtgagaaacacctgaagtgcttttccccagcctccccggccctgcccgggtggtggaggcgctgcacggtgccttccatggagcaagcccggggctccgcagggtcctcagcatgattcagatttccttccacccccagctctagatgatttggtaaaaccacaaacaggcacaaaacagcccacatggaattctaaagttttaatttcattttggaatttatgcactcagatgaaatgatttatgatgatgttgagaatggggatgaaggtggaaacagctccttggaatacggatggagttcgagtgaatttgaaagttacgaagagcagagtgactcggagtgcaagaatgggattcccaggtccttcctgcgcagcaaccacaaaaagcaaatgcagaagctcgtgaaggccgcgaaggacggcaccaaggacgggctggagaggaccagggcagccgtgaagaggggccgctccttcatcaggaccaagtctctcatcgcacaggatcacagatcttctcttgaggaagaacagaatttgttcattgatgttgactgcaagcacccggaagccatcttgaccccgatgcccgagggtttatctcagcagcaggttgtaagaagatatatactgggttcagttgtcgacagtgaaaagaactacgtagatgctcttaagaggattttggagcaatatgagaagccgctgtctgagatggagccaaaggttctgagtgagaggaagctgaagacggtgttctaccgagtcaaagagatcctgcagtgccactcgctatttcagatcgcgctggccagccgcgtttccgagtgggactccgtggaaatgataggcgatgtcttcgtggcttcgttttctaagtccatggtgctggatgcatacagtgaatatgtgaacaatttcagcacagccgtggcagtcctcaagaaaacatgtgccacaaagcccgcttttcttgaatttttaaagcaggaacaggaggccagccccgatcgaaccacgctctacagcctgatgatgaagcccatccagaggttcccacagttcatcctcctgctccaggacatgctgaagaacacctccaaaggccaccccgacaggctgcctcttcagatggccctgacagagctcgaaacactagcagagaagttaaatgaaagaaagagagatgctgatcaacgctgtgaagtgaagcaaatagccaaagccataaacgaaagatacctgaacaagcttctcagcagtggaagccgatacctcattcgatcagatgatatgatagaaacagtttacaacgacagaggagagattgttaaaaccaaagaacgccgagtcttcatgttaaatgatgtgttaatgtgtgccaccgtcagctcacgcccctctcatgacagccgtgtgatgagcagccagaggtacttgctgaagtggagcgttccactgggacatgtggacgccatcgagtatggcagcagcgcaggcacgggcgagcacagcaggcaccttgccgttcacccgccggagagcctggccgtggttgctaacgcgaaaccaaacaaagtttacatggggccaggacaactgtatcaagatttacaaaacttgttgcatgacttaaatgtaattggccaaatcactcagctgataggaaaccttaaaggaaactatcagaacttaaaccagtcagtagcccatgactggacatcaggtttacaaaggcttattttgaagaaagaagatgaaatcagagctgcggactgctgcagaattcagttacagcttcccgggaagcaggacaaatctgggcgaccgacgttctttacagctgtgttcaatacgttcacccctgccatcaaggagtcctgggtcaacagcttacagatggccaagctcgccctagaagaggagaaccacatgggctggttctgtgtggaagacgatgggaatcacattaaaaaggagaagcatcctctcctcgtcggacacatgcccgtgatggtggccaagcagcaggagttcaagattgaatgtgctgcttataaccctgaaccttacctaaataatgaaagccagccagattcattttccacggcacatggtttcctgtgggtaagatgtgtttatttggttttggtacaagttcacagagaatcaacgttcatggtcggtgtgatgagagactgagatgtgaattgctcagtagagagttggcggtggcgtatcccagagtgtacttagaaacatgaaaacttctttgaaagggagctgatcacttttggaaaagatttacagttcttaggaatgcaaatatttgtttcttttccttttcatctaaaacatttaccagataaagttgagtccagagacaactaactaataagagaataattttaatatgtttttccattttggtgtcaacattgcatggattttttttcttgttccaagactggctttttccagtggaaacttagcagttaaaattaatttgttccaaatgaaatattgcatctgaaattaggctggaattgcagtagacgttcctggttcttgcaaaccagaggacattcttgaagctgtgtggtcccaggctctcccctctctggtttcctgtgttccctccctgcagcctcagactcgccctccagggctccactgtgcttttccaaactctcatcctttcctcccaggcgtcctgtgcagcacgccactgcctctcacttctcacatccacagctcctgcttggtcagtgttcctagttgagtgtcagaaattgaacaacccaattagctggtatttcatttgtaccaacctatgaatggaggagtagccttaattcccttgggggcttccacttctaagagaactgttttccgtccaggtaggcagacctgtcatggctgaagcttcatcacctggcctggtcatagcccccaggccctgtaggcaggacaggggcttggcagattggcatccttcccacaaaagcatgaaagtaggatgtctgtatgtagcgacaacaaatacaagaataaggagagtttaacaacattctcaaagttggtggaaaagaaaaagaatcaatgaaaacatcaccctaaaccagctagtgctttctgtttacagggatcagaccccttcccactt

SEQ ID NO: 18161 - protein, 661 aa, Homo sapiens
MHSDEMIYDDVENGDEGGNSSLEYGWSSSEFESYEEQSDSECKNGIPRSFLRSNHKKQMQKLVKAAKDGTKDGLERTRAAVKRGRSFIRTKSLIAQDHRSSLEEEQNLFIDVDCKHPEAILTPMPEGLSQQQVVRRYILGSVVDSEKNYVDALKRILEQYEKPLSEMEPKVLSERKLKTVFYRVKEILQCHSLFQIALASRVSEWDSVEMIGDVFVASFSKSMVLDAYSEYVNNFSTAVAVLKKTCATKPAFLEFLKQEQEASPDRTTLYSLMMKPIQRFPQFILLLQDMLKNTSKGHPDRLPLQMALTELETLAEKLNERKRDADQRCEVKQIAKAINERYLNKLLSSGSRYLIRSDDMIETVYNDRGEIVKTKERRVFMLNDVLMCATVSSRPSHDSRVMSSQRYLLKWSVPLGHVDAIEYGSSAGTGEHSRHLAVHPPESLAVVANAKPNKVYMGPGQLYQDLQNLLHDLNVIGQITQLIGNLKGNYQNLNQSVAHDWTSGLQRLILKKEDEIRAADCCRIQLQLPGKQDKSGRPTFFTAVFNTFTPAIKESWVNSLQMAKLALEEENHMGWFCVEDDGNHIKKEKHPLLVGHMPVMVAKQQEFKIECAAYNPEPYLNNESQPDSFSTAHGFLWVRCVYLVLVQVHRESTFMVGVMRD

SEQ ID NO: 18162 - DNA, 1352 bp, Homo sapiens
tggagctgttctgtgggtaataaactgttctgtcaagtgatgaagctgttctctgggtgatggagctgttccatggatgatggagctgttccttgggtgatggagctgttccatgggtgatggagctgttccatgggtgatggagctgttctgtccagtgatggagctgttccgtgggtgatggagctattctgtgggtgataaactgttctgtcgagtgatggagctgttctatgggtgatgagctgttctgtggatgatggagctgttctgtgggtgataaactgttctgtcaagtgacagagctgttctgtgggtgatgagctgttctgtcagtgatggagctgttctatggtgatggagctgttctatgggtgatggagctgttctgtgggtgatggagctgttctgtgggtgatgagctgttctgtcagtgatggagctgtgctgtggatgatggagctgctctgtgggtgatgagctgttctgtcagtgatggagctgttctgtggatgatggagctgttctatgggtgatggagctgttctatgggtgatggagctgttctgtgggtgatgagctgttctgtcagtgatggagctgttctgtggatgatggagctgttctatgggtgatggagctgttccgtgggtgatggagctgttctgtgggtgatggagctgttctgtgggtgatggagctgttctgtgggtgatggagctgttctgtgtgccctggagttctccctcaggcttactgcggagatgttcacgtgcatttatacatgtgtgaaaatatatagagccgcacaccaaaaatagaagggtcaatttgattggatgataattgtgaagatcatattttaaaagaagtcaactaattaataaagttaacattgcacttataattttatttactcatttatttattaattttgatacaaggccttgtttggatgcccaggctggagtgcagtggcacaattatagctcactgcagccttgacttccttggctcgagcgatcttcctacttcagcctcccaagtatttgggactacaggcgcgcatcacaatgcctggctaattttttttttaaactctatgtttttggtttttaaaactatgttgcccaggctggtcttgaattcttggcctttagcagtcctctcaccttgtgctcccaaagtgctgacattataggcatcagttaccacaaccagcctatacttgtgttacaaggttgtgtttatagagtttatcatcaaagtttgcgaatgaaagcaaatatgtgtgttatgaaacattttaaattataagcattctgtaaggataaataaagttgcgatgtgta

SEQ ID NO: 18163 - protein, 81 aa, Homo sapiens
MPRLECSGTIIAHCSLDFLGSSDLPTSASQVFGTTGAHHNAWLIFFLNSMFLVFKTMLPRLVLNSWPLAVLSPCAPKVLTL

SEQ ID NO: 18164 - DNA, 2250 bp, Homo sapiens
gctggattatctgcctaggaaccaagtcacaagtcagtgatgcagactcctttgcaattggtcagctggaggcccaccaggaggaaggcatggtgatctcccacatggccgtgtccggcgtcgggatctggattgccttcacctcagggtccacgctccgcctttttcacacggaaactctcaagcacctgcaggacatcaacatcgccacccctgttcacaacatgctgccagggcaccagcggctgtcggtgacgagcctgctcgtctgccacggattgctgatggtcggcaccagcctgggagtcctcgtggccctgccggtcccacgtctgcaagggattcccaaagtgaccggaagaggcatggtctcctaccatgcacacaacagtcctgtcaaattcatcgtcctggccacggctctgcacgagaaagacaaggacaaatccagggacagcctggctcctggccccgagcctcaggacgaagaccagaaggacgcacttccgagtggaggagctggttcatctctgagccagggtgaccctgacgcagccatctggttgggagattcgctgggatcgatgactcagaaaagcgacctgtcctcctcatctgggtccctgagcttgtctcacggctccagctctctagagcacagatcagaggacagcaccatctatgatctcctgaaggatcctgtctcgctgagaagcaaagcacgccgggccaagaaagccaaggccagctcggcgctggtggtctgtggagggcagggccaccgccgggtgcacaggaaggcccggcagccccaccaggaagagctggcgccgaccgtcatggtctggcagatccctctgctgaatatataagcaggacggccgccttctgctgtcagaatttgcaatcaagggtgacttctcagctaatcctacagcctgagtggttaagctgtgtctacactggttgggaataaattaaaaacagtatttgggggagaaacgtgcaatagcgtaatggtggtgtccctgccaattccttccttctcttctgtacagcagaagtaattacaagcacttctcacgaaggcagaagactgatgcaattttcgagtaattgagtgcagttctgggaaaataccacattctttttgactgctgtagtccatatgtgaatactaaatgttaaacttcatcagcgtcagacctattgtatcatattagagaatttgcagactaagaatttatgagaaaatatatgtattcagtagtgcaggcatttattaacaattcttaaaagttttacctgattcagattcacgacttttatttatattctatatttttgaatttcagagtaaaatttgttaacaattttaaaagccaggtaacacctaccagtccagttagcatgatttgctttcagaagtgagctgggttttccaaagtggtataatgtgtgtactgtatattttaacaaagtaatatttttgtattgcatttttctattaaaaaattaacagttaatgtttcagtcaatgtattatctgtagcatttcacaaataatgtttgctttgaaccaaaatgctcagtgcctatcaacatttggactcaagcatcaacaccaaattattcctcccttctcgtataaatagagtgactatccacaggagaaaagtgtgtgctttagtattagaggagataggcagagaagtcttgcttagttccttcgtgcagcttcttgcccctgttgacgtggaatgctgtgtctgctttagcacgcacgctccgaatgactcctggtgctaggccatgctggctgctgtcactgagcgggactcaggccaagaggcgtgacctcgggccagcctgtctgttgtgcagacgcctcctctgcagaacgcatcagtttctattctgcagttgcagagccagccccgcgtgagaacgtgcataatgagtgcacaccatcatgtcaaggtgcatacttagtgagcgccatcctgctgaacgtgtatttcagtgtttcacttactggacggataacaagaaaaaaatcctaacacaggcaggcaccagaaataaatgtctcagcactttacagatgactaaaaatgttaattttatgacttagccaaatatgttctaggttgcatatatcccccatgtgaaagtgatttcttcccaagcttctcaaactgttagctgctgtctgacttcatcaataaagtatttttattttaaaatgca

SEQ ID NO: 18165 - protein, 260 aa, Homo sapiens
MVISHMAVSGVGIWIAFTSGSTLRLFHTETLKHLQDINIATPVHNMLPGHQRLSVTSLLVCHGLLMVGTSLGVLVALPVPRLQGIPKVTGRGMVSYHAHNSPVKFIVLATALHEKDKDKSRDSLAPGPEPQDEDQKDALPSGGAGSSLSQGDPDAAIWLGDSLGSMTQKSDLSSSSGSLSLSHGSSSLEHRSEDSTIYDLLKDPVSLRSKARRAKKAKASSALVVCGGQGHRRVHRKARQPHQEELAPTVMVWQIPLLNI

SEQ ID NO: 18166 - DNA, 2519 bp, Homo sapiens
atctgtagctaaggccctggcttttctccttctatttggaattcacttctgaaaaccatttagctcacgttctttcacataagctacatcagattcaacacagactaacagttgatgaaggtctgtgattaacatacacattcgttagagcggtcgttacctttctaagttataaaggagtagagtttacagcgagtgagttcacggcgcctcagcttttaggttgtgagcagttgcagtaggttacatcaccaggcagatgtttcctgctctgtcccgcatgttcaaaggaggatatttttgatgggaaagtgctgagacacatggtaaattgcgcctttctgagtctccaccgagcgaatacagagcctccaggaactatgtgaccaaataaaatggccaaaatttccattagaaaaaaaaagacaaaaaacgtgtaacttttctgaagaccatggactacaccgtaagggaattcagtaaatgaaaccggactcaagatgggcaccagcggctgtcggtgacgagcctgctcgtctgccacggattgctgatggtcggcaccagcctgggagtcctcgtggccctgccggtcccacgtctgcaagggattcccaaagtgaccggaagaggcatggtctcctaccatgcacacaacagtcctgtcaaattcatcgtcctggccacggctctgcacgagaaagacaaggacaaatccagggacagcctggctcctggccccgagcctcaggacgaagaccagaaggacgcacttccgagtggaggagctggttcatctctgagccagggtgaccctgacgcagccatctggttgggagattcgctgggatcgatgactcagaaaagcgacctgtcctcctcatctgggtccctgagcttgtctcacggctccagctctctagagcacagatcagaggacagcaccatctatgatctcctgaaggatcctgtctcgctgagaagcaaagcacgccgggccaagaaagccaaggccagctcggcgctggtggtctgtggagggcagggccaccgccgggtgcacaggaaggcccggcagccccaccaggaagagctggcgccgaccgtcatggtctggcagatccctctgctgaatatataagcaggacggccgccttctgctgtcagaatttgcaatcaagggtgacttctcagctaatcctacagcctgagtggttaagctgtgtctacactggttgggaataaattaaaaacagtatttgggggagaaacgtgcaatagcgtaatggtggtgtccctgccaattccttccttctcttctgtacagcagaagtaattacaagcacttctcacgaaggcagaagactgatgcaattttcgagtaattgagtgcagttctgggaaaataccacattctttttgactgctgtagtccatatgtgaatactaaatgttaaacttcatcagcgtcagacctattgtatcatattagagaatttgcagactaagaatttatgagaaaatatatgtattcagtagtgcaggcatttattaacaattcttaaaagttttacctgattcagattcacgacttttatttatattctatatttttgaatttcagagtaaaatttgttaacaattttaaaagccaggtaacacctaccagtccagttagcatgatttgctttcagaagtgagctgggttttccaaagtggtataatgtgtgtactgtatattttaacaaagtaatatttttgtattgcatttttctattaaaaaattaacagttaatgtttcagtcaatgtattatctgtagcatttcacaaataatgtttgctttgaaccaaaatgctcagtgcctatcaacatttggactcaagcatcaacaccaaattattcctcccttctcgtataaatagagtgactatccacaggagaaaagtgtgtgctttagtattagaggagataggcagagaagtcttgcttagttccttcgtgcagcttcttgcccctgttgacgtggaatgctgtgtctgctttagcacgcacgctccgaatgactcctggtgctaggccatgctggctgctgtcactgagcgggactcaggccaagaggcgtgacctcgggccagcctgtctgttgtgcagacgcctcctctgcagaacgcatcagtttctattctgcagttgcagagccagccccgcgtgagaacgtgcataatgagtgcacaccatcatgtcaaggtgcatacttagtgagcgccatcctgctgaacgtgtatttcagtgtttcacttactggacggataacaagaaaaaaatcctaacacaggcaggcaccagaaataaatgtctcagcactttacagatgactaaaaatgttaattttatgacttagccaaatatgttctaggttgcatatatcccccatgtgaaagtgatttcttcccaagcttctcaaactgttagctgctgtctgacttcatcaataaagtatttttattttaaaatgca

SEQ ID NO: 18167 - protein, 195 aa, Homo sapiens [sequence omitted]

SEQ ID NO: 18168 - DNA, 5987 bp, Homo sapiens
caggctagagtgcagtggcgtaatctcagctcactgcagcctcactctcctgggctcaagcgatcctcccacctcagcacccccagtagctctgactacatgtgcatgccaccatgcccagctaatttttgttttttttgtagagacagggtcttgctatgctactcaggccggtcttaaactcctgggctcaagcgatcagcttgcctcgacctcccaagatcctaggattataggtgtgagcgagccaccatgcctggccttaaaatttttttaacaactacctgtaagcactcaggacttaaaaagtattttgactaatatttaaaattttaaagtttttaaaaatttcttttattcatagaaattaaaagaaaacaaatagtctcttattttttaaaggagggtaattctgaaactaatattttctatcaactacggctggtgatggtaaagttctatatattaatgttactttttcatatatatctctcttaaatgacactttggctttcgttctctcaatgtttatctctggggaaaatgtgattaagataatcagtattttagtatatatcaaaagttctaatataagttttcctcatagtttttaacagagtttgcatagctctattcttaaatgtaggactgccattgccttttggtggtaattcacaaattattgtttttttttaagagtataaaatttgaggtgccattacaagaaattctcactgaaaatgttgagaatatatttcttaatgtagaaaagaaaagtaatttaagctgcttttactcaatcacaaaagaatttgcatatgtatttcttaattactggagaagactttatataattttgattgattactagtcaaaactctacaaaacatttaggtaattctgagaaagtaaaaaaaaaatttagttgaaaacattatgaattcacaagcagaaacagaaaggtgccaaagagctggtgatactgacttttgctaataaacacctaccaggacagatcagtcggaaaaggtgtggcagcagcaagtaaacaggaatccccaaatgcccctacctcttctccattccagattacaaagcacctgctataatgtactagagtttagtgatttcatattagaaacattataaatacatcttaaagagtctataggaaatatacatataaaatcatagtatattttaaaatagtttaaaaactaaaaattaggtataagcatatctatcaacatcaaacatcaatttttctccacatcagttgggttttgtacccacctaatgacatagtcaaagcccaccataaacccaacttacttatacactgacgttagagatacacacacacagatatatatatacactcatacaaacatatgtaactgttaacaaacatacaaacacacacatccgttgagtcttcacagaaaaaaaggcacagtggctgacaaagcatcttttcatagatatttgtgtctgcaaagtgtttcaatgtggaaaaataatttttcactgaattctgcttcaaattgagcacagtgggcataacagttttagctgcctatcacattctaaacaagtttcttggtttcgttacagtaaaagatttgagtgttcatatataacaattgttcacatttcctgtgtgaagggtctattcttgattgggtatagaatcaaacgggttttcagcgtactgtgacaacagcaaggatttatgagcatgcctacagtccctaccaaaatacccgagcctgtgcttatccaactccttctctccagtaaaccacgcagcttgagagaaaattctgggcttcagattttaccatgtgcaccctggaagttgtggaatgtccgtaatgagttctgtgtcatggatgctataacgctagcagccagaaacccaggctttctacctgtttctttgatgtttaatcacaataaactcctggctatacaaaaccatcgcaacttgctttttaatggcatcaataaaatagctcatttcttggaagacccatgaggaaaacgaatgttttccttgtcttgggattacacgggccagctagcatgcctggtaatgttcaccatgctgtcctgggaaatgtcacccagcctcatccaatgaactatttaatgatttgtacgagaaatagttcatgagaagcaaatacactgcaaataaacagtccactattagggaatcctaaaaagtaaaatatgacaattagagaatcttacatgtaaaaatttgtttactcatttacaagggttaactgtgtttatatagctttaattcaatttgattctttttagtttccagttttaaataatcatgttttttaaaccaaaatgtttgattccccaatcactgatgggttattgtataacactggagcttgtattattaggcttagtgtagtcatttgaaagcaaatggaataaaaagtgctacacaatttatggggtagggggagaaaaatattcctaaatgtttccaaaggaaacatcagaggcaaattagatccaaagcccttaaattgggccatttgccatttaacaatggaacaggccgttcctatcagaacagggggattttctcttcttctatcccttcatctttccctctttgcatgatgctgctgtagccccctcatctctaagacaagacaaaagaaacagagaaacaaagaagtgaactctgggcctgacgaggttaagaaaaaaactaaactgtgattaagtaagtaatggaaaaaggaggaatcattccactagttgtgtggtctgggagagtctgttggcttattttaagtcactttttagaaaaggatgcttggggtctacttattcaagcattggtctaactctttgatcttcaaacatattctcattacggccactccatgagctttctggccctggtgactatcttcactttttaatttaaagggtcccaagtatatcacagtgcctctcttaagtccctgactggggatacgtcattcacagcaagtgaagacctcgtattttaggaccactgtttgcaaaggagacaaaagttcaaaaggatgccaactagtggcatggaatgccactcctggcctgtgtagtgcagcagaagcagacacccctgttggctgaagtttgagcaaactgtcatacctcacaggaaaaaaaatttgcattaaacccactgttggcattcacaacttattgaaaagtctctttccttatcccctcatcttacccctaaccagtgacagacaccatgatgagtaactgcatttttggcatcccctaaactgacattaatgaagtcaaacaaggtaaagctactagtatttccccaactgcagggggcatagatgaaacctctttacattcagtgatttccctctatttcagtatgtgcagtatatgccaccgattaatgacgacactggaaaaatgtaacacaataatagtaaaacaccagctaacttgtaacactcatgttcccaagcatatacatagatacatacatacacacatacatacacactcccactgtttgggggctattcatcactgatgaatgaaacttccactcaggaggtttccccgtgcacataattcaccatctgaggagatgctgtccagatgagtaagtataaattagggtgaactatgtatgcagcaaacccatgacaacccagcatgctgatgacatcccgttacggtttactcagtgtaggatatgtatgctaagacgatgaccagctctgctcctgcaagtgttagaattcacttgtcttttcatggaatatgaaaggtgaactgagatttcttgggtgatggtcatttgcttgaatggcagatttttcttctgctgctgcatgaacgttgtctggataagcatcttcttcattgttttcatctctcagatgaccctccaggctgtgtctaatgccataagaaaagtaaatcaggaagccaattgccatccaaatgctgaatctgacccaagtgtctgcacttaactggaccatcaagtaaatgttcaccaagatgctgaacgctggcaaaaatggtaagaatggaaccatgaaggctactttttgctgattctggggcagcctccagatggtgagaacgatggcaacgaagagaacaagaaacagcgcgaggagagcgaggctccaggcctccagcctggtgatggcatgaactccgtaagtggtcaagacactcaggcccaacacgaggaaagctaggaatcctaccagaaagctcacgagagaagctgactgctgtgttggcagaagggaggggcagaagagggtccgcatgctgaagccctgtctctgcagcatggtgacctgggactcactcttcgaggttaccctgggagacgatcccagaccatctttctcaggagaacatttgggctggtcgtaagataagccaggctggtacctgaggatgagaacacaggctgccaccagagagtaggccatgagtgtgccaatggacatcatgtccacaagcgccttcaggtcaaacagaaaggccatcaaagcagaaatgacccctgcagtcaacgtggcagcaactggtgactgcctcttactcactctggcaagaaatctaaacagtaagccatcccgggccatggcaaacagaattcggggtaaaggaaacatagagcccagaagacttgttgacaaggcgcagagagaaccagctgcgacgacatatttggcaggaccccatcccacatattcaaacgctacaggaagggggcttttttcatcgaggaggtagtacggcatcataagtgttaaagctgcagagaccccaaaataggccataaagcaaacaagcaaagacgtcacaattccaatgggaatagctttctggggattccgaacttcttcaccagttgttgcaatgcagtcaaatcccacaaaggcataaaagcaagttgcagcaccagccaacgttcccgtaaagccataaggcataaagccaccagccccatagatacttgttccgttttcagaaggtggctctctggcacttgctgatatatttttgagaaactcttcactaatcttccagtttgccacatttcctttcacaaacccagcaaccatcacaaacagaaggacgagaatattaacagctgtgaagactttattcacccaagcagactcttttactccaaaagacaaaagacctgctagaagtaatataaggcacacagcaaaaaaatcgggatattctgcaagaccagtgtaattcattctgaagtatgtcctcaaaaactgaccaatctgtttgctaagaagttcatcaaaggtgccactccaggctcttgcaacacttgatgtacctatcacatacgataaaatgagattccagccagtgatgaaggcccacagctctccgacagtcacgtaggtgtacaaatatgcagaccccgtcttgggaacacgggccccaaattcggcatagcagaggccagccatcactgaagccagggcagcaatgaggaaggacaccacgatgctggggcccgagtctgccttggccacctccccagcgaggacataaaccccggccccaagggtgcttccaacgcccagggcaatgaggtccatggtggataagcagcggcataatttggtgtcttctagactgtccagggtcacgatttttctccggatcagacatcgggcaaaggtcagcgcggctctgcaaggaatcattctgacgtctgacgaaggcgacaggagaaacttgctgtcgcaaaccggtggggcaggtgttccaataaaccctcgacaaattagtttgtctgagttataaccacttgtttctatcttcattccagttgctagtttcgtggtgagacatctgctctttctgttttgggactgtaagggctcactgctttcctgctggtcttcagagagtctcctgctggg

SEQ ID NO: 18169 - protein, 102 aa, Homo sapiens
MSVPMDIMSTSAFRSNRKAIKAEMTPAVNVAATGDCLLLTLARNLNSKPSRAMANRIRGKGNIEPRRLVDKAQREPAATTYLAGPHPTYSNATGRGLFSSRR

SEQ ID NO: 18170 - DNA, 432 bp, Homo sapiens
catgaaggctactttttgctgattctggggcagcctccagatggtgagaacgatggcaacgaagagaacaagaaacagcgcgaggagagcgaggctccaggcctccagcctggtgatggcatgaactccgtaagtggtcaagacactcaggcccaacacgaggaaagctaggaatcctaccagaaagctcacgagagaagctgactgctgtgttggcagaagggaggggcagaagagggtccgcatgctgaagccctgtctctgcagcatggtgacctgggactcactcttcgaggttaccctgggagacgatcccagaccatctttctcaggagaacatttgggctggtcgtaagataagccaggctggtacctatttccaaacaaacatctatgtctttattctcaaatagacatttggcccaagtgaaa

SEQ ID NO: 18171 - protein, 36 aa, Homo sapiens
MLKPCLCSMVTWDSLFEVTLGDDPRPSFSGEHLGWS

SEQ ID NO: 18172 - DNA, 2166 bp, Homo sapiens
aaacattttggtttaaaaaacatgattatttaaaactggaaactaaaaagaatcaaattgaattaaagctatataaacacagttaacccttgtaaatgagtaaacaaatttttacatgtaagattctctaattgtcatattttactttttaggattccctaatagtggactgtttatttgcagtgtatttgcttctcatgaactatttctcgtacaaatcattaaatagttcattggatgaggctgggtgacatttcccaggacagcatggtgaacattaccaggcatgctagctggcccgtgtaatcccaagacaaggaaaacattcgttttcctcatgggtcttccaagaaatgagctattttattgatgccattaaaaagcaagttgcgatggttttgtatagccaggatttaagaccggcctgagtagcatagcaagaccctgtctctacaaaaaaaacaaaaattagctgggcatggtggcatgcacatgtagtcagagctactgggggtgctgaggtgggaggatcgcttgagcccaggagagtgaggctgcagtgagctgagattacgccactgcactctagcctgggcaacggtgagaccctgcctcaaaaaaaataaaaataaaaataaaacactttaattagaatctatttttacctattttctaaatttatttaaatgcttagcaggaagcataaggaaaagccatcggcctccaatacccatgatgacagagggagcacttgagccttgccttccctcctcttaaatcagggtgtgttccgagattacagaacatcacaccttggcgtgatgaaatcatgccaagattctgactctccctttccggtgatactgctcatgatttctcctaatacgcttcaagcaactgttaccacaaaaaatacagtttccgcagggctttaaaggattgagtttagcatgtatatcatgcgttattaaagttcacgtgattcatgtgaaattaactgtcctttttgctagtgccaaaacagtgccttctctgcacactttacttgtttataaagttctcccacatgtccttaaatatcaagggggaaagtatggatattcgcgtagcaataatgccagcaaaggtcattttcattttttagtcatatagatatgaaaataagttcatatagatatgaaattgcttgactttattgttttggggagattttttttccttacatgattatattaaacactttaaaatagccttccggtttctggattttgagaagcctgatctgttattgttgtggttgttggtgtttgtaatattcattattgtttgtatatacacggtttagtcttactgatttcaaatgcattttgttattgctcaacccaactggtaacactgtttgctgggagcattatacttaactttgattcaccatggttgatgccactgccatgatcgctgggtcttaaagagctttccctagccactgacagccccgtggagatcataatcagggccccaggctggttccaggatcaggcagcctatagagtgtgagcatctatgtgtagctacccttgttgggtgggctcttagactgatggggtaggatatgaagtgaaagacttcaaatgcaagtaaggtagtttgggctccttaattccaaacatcccatgagtatatcaagatgaataaggaccaagggacctctgtgactcatagaagggctggctgaatcctgaagtagcatagtgggacctggtctacaatttatgcacatgcactgacagccttgctgtgccacgtgtctcaccaagacccagttgggaaagagcgtcatattgccaacaggttgggtttctctggcctacacctgattaatgggccctttatctttggtgtcccctaggagtgtccagttgttttattgctgtattttgttattgcagtacttaataaaaattgttgatagggcccaaaaccctacagaaattctatgtctgtaaaaaccaacaaaggcattggacttgtgtgaatgtacagggtttttttagtagtaattttaaatttaaatgttttaagtgatcatcagtgttcctttttacttataaagttggattcttttttagaatttgtaataaataaaaactgctgctttaccactgt

SEQ ID NO: 18173 - protein, 42 aa, Homo sapiens
MYRVFLVVILNLNVLSDHQCSFLLIKLDSFLEFVINKNCCFT

SEQ ID NO: 18174 - DNA, 2221 bp, Homo sapiens
aaacattttggtttaaaaaacatgattatttaaaactggaaactaaaaagaatcaaattgaattaaagctatataaacacagttaacccttgtaaatgagtaaacaaatttttacatgtaagattctctaattgtcatattttactttttaggattccctaatagtggactgtttatttgcagtgtatttgcttctcatgaactatttctcgtacaaatcattaaatagttcattggatgaggctgggtgacatttcccaggacagcatggtgaacattaccaggcatgctagctggcccgtgtaatcccaagacaaggaaaacattcgttttcctcatgggtcttccaagaaatgagctattttattgatgccattaaaaagcaagttgcgatggttttgtatagccaggatttaagaccggcctgagtagcatagcaagaccctgtctctacaaaaaaaacaaaaattagctgggcatggtggcatgcacatgtagtcagagctactgggggtgctgaggtgggaggatcgcttgagcccaggagagtgaggctgcagtgagctgagattacgccactgcactctagcctgggcaacggtgagaccctgcctcaaaaaaaataaaaataaaaataaaacactttaattagaatctatttttacctattttctaaatttatttaaatgcttagcaggaagcataaggaaaagccatcggcctccaatacccatgatgacagagggagcacttgagccttgccttccctcctcttaaatcagggtgtgttccgagattacagaacatcacaccttggcgtgatgaaatcatgccaagattctgactctccctttccggtgatactgctcatgatttctcctaatacgcttcaagcaactgttaccacaaaaaatacagtttccgcagggctttaaaggattgagtttagcatgtatatcatgcgttattaaagttcacgtgattcatgtgaaattaactgtcctttttgctagtgccaaaacagtgccttctctgcacactttacttgtttataaagttctcccacatgtccttaaatatcaagggggaaagtatggatattcgcgtagcaataatgccagcaaaggtcattttcattttttagtcatatagatatgaaaataagttcatatagatatgaaattgcttgactttattgttttggggagattttttttccttacatgattatattaaacactttaaaatagccttccggtttctggattttgagaagcctgatctgttattgttgtggttgttggtgtttgtaatattcattattgtttgtatatacacggtttagtcttactgatttcaaatgcattttgttattgctcaacccaactggtaacactgtttgctgggagcattatacttaactttgattcaccatggttgatgccactgccatgatcgctgggtcttaaagagctttccctagccactgacagccccgtggagatcataatcagggccccaggctggttccaggatcaggcagcctatagagtgtgagcatctatgtgtagctacccttgttgggtgggctcttagactgatggggtaggatatgaagtgaaagacttcaaatgcaagtaaggtagtttgggctccttaattccaaacatcccatgagtatatcaagatgaataaggaccaagggacctctgtgactcatagaagggctggctgaatcctgaagtagcatagtgggacctggtctacaatttatgcacatgcactgacagccttgctgtgccacgtgtctcaccaagacccagttgggaaagagcgtcatattgccaacaggttgggtttctctggcctacacctgattaatgggccctttatctttggtgtcccctaggagtgtccagttgttttattgctgtattttgttattgcagtacttaataaaaattgttgatagggcccaaaaccctacagaaattctatgtctgtaaaaaccaacaaaggcattggacttgtgtgaatgtacagggtttttttagtagtaattttaaatttaaatgttttaagtgatcatcagtgttcctttttacttataaagttggattcttttttagaatttgtaataaataaaaactgctgctttaccactgtaaaatatgctttctgatgtggtgtatttttaaaataaattttaatatgtaataat

SEQ ID NO: 18175 - protein, 48 aa, Homo sapiens
MYRVFLVVILNLNVLSDHQCSFLLIKLDSFLEFVINKNCCFTTVKYAF

SEQ ID NO: 18176 - DNA, 2620 bp, Homo sapiens
taaggaaaaaaaatctccccaaaacaataaagtcaagcaatttcatatctatatgaacttattttcatatctatatgactaaaaaatgaaaatgacctttgctggcattattgctacgcgaatatccatactttcccccttgatatttaaggacatgtgggagaactttataaacaagtaaagtgtgcagagaaggcactgttttggcactagcaaaaaggacagttaatttcacatgaatcacgtgaactttaataacgcatgatatacatgctaaactcaatcctttaaagccctgcggaaactgtattttttgtggtaacagttgcttgaagcgtattaggagaaatcatgagcagtatcaccggaaagggagagtcagaatcttggcatgatttcatcacgccaaggtgtgatgttctgtaatctcggaacacaccctgatttaagaggagggaaggcaaggctcaagtgctccctctgtcatcatgggtattggaggccgatggcttttccttatgcttcctgttttattttttttgaggcagggtctcaccgttgcccaggctagagtgcagtggcgtaatctcagctcactgcagcctcactctcctgggctcaagcgatcctcccacctcagcacccccagtagctctgactacatgtgcatgccaccatgcccagctaatttttgttttttttgtagagacagggtcttgctatgctactcaggccggtcttaaactcctgggctcaagcgatcagcttgcctcgacctcccaagatcctaggattataggtgtgagcgagccaccatgcctggccttaaaatttttttaacaactacctgtaagcactcaggacttaaaaagtattttgactaatatttaaaattttaaagtttttaaaaatttcttttattcatagaaattaaaagaaaacaaatagtctcttattttttaaaggagggtaattctgaaactaatattttctatcaactacggctggtgatggtaaagttctatatattaatgttactttttcatatatatctctcttaaatgacactttggctttcgttctctcaatgtttatctctggggaaaatgtgattaagataatcagtattttagtatatatcaaaagttctaatataagttttcctcatagtttttaacagagtttgcatagctctattcttaaatgtaggactgccattgccttttggtggtaattcacaaattattgtttttttttaagagtataaaatttgaggtgccattacaagaaattctcactgaaaatgttgagaatatatttcttaatgtagaaaagaaaagtaatttaagctgcttttactcaatcacaaaagaatttgcatatgtatttcttaattactggagaagactttatataattttgattgattactagtcaaaactctacaaaacatttaggtaattctgagaaagtaaaaaaaaaatttagttgaaaacattatgaattcacaagcagaaacagaaaggtgccaaagagctggtgatactgacttttgctaataaacacctaccaggacagatcagtcggaaaaggtgtggcagcagcaagtaaacaggaatccccaaatgcccctacctcttctccattccagattacaaagcacctgctataatgtactagagtttagtgatttcatattagaaacattataaatacatcttaaagagtctataggaaatatacatataaaatcatagtatattttaaaatagtttaaaaactaaaaattaggtataagcatatctatcaacatcaaacatcaatttttctccacatcagttgggttttgtacccacctaatgacatagtcaaagcccaccataaacccaacttacttatacactgacgttagagatacacacacacagatatatatatacactcatacaaacatatgtaactgttaacaaacatacaaacacacacatccgttgagtcttcacagaaaaaaaggcacagtggctgacaaagcatcttttcatagatatttgtgtctgcaaagtgtttcaatgtggaaaaataatttttcactgaattctgcttcaaattgagcacagtgggcataacagttttagctgcctatcacattctaaacaagtttcttggtttcgttacagtaaaagatttgagtgttcatatataacaattgttcacatttcctgtgtgaagggtctattcttgattgggtatagaatcaaacgggttttcagcgtactgtgacaacagcaaggatttatgagcatgcctacagtccctaccaaaatacccgagcctgtgcttatccaactccttctctccagtaaaccacgcagcttgagagaaaattctgggcttcagattttaccatgtgcaccctggaagttgtggaatgtccgtaatgagttctgtgtcatggatgctataacgctagcagccagaaacccaggctttctacctgtttctttgatgtttaatcacaataaactcctggctatacaaaaccatcgcaacttgctttttaatggcatcaataaaatagctcatttcttggaagacccatgaggaaaacgaatgttttcct

SEQ ID NO: 18177 - protein, 84 aa, Homo sapiens
MGIGGRWLFLMLPVLFFLRQGLTVAQARVQWRNLSSLQPHSPGLKRSSHLSTPSSSDYMCMPPCPANFCFFCRDRVLLCYSGRS

SEQ ID NO: 18178 - DNA, 3344 bp, Homo sapiens
gggtcttccaagaaatgagctattttattgatgccattaaaaagcaagttgcgatggttttgtatagccaggagtttattgtgattaaacatcaaagaaacaggtagaaagcctgggtttctggctgctagcgttatagcatccatgacacagaactcattacggacattccacaacttccagggtgcacatggtaaaatctgaagcccagaattttctctcaagctgcgtggtttactggagagaaggagttggataagcacaggctcgggtattttggtagggactgtaggcatgctcataaatccttgctgttgtcacagtacgctgaaaacccgtttgattctatacccaatcaagaatagacccttcacacaggaaatgtgaacaattgttatatatgaacactcaaatcttttactgtaacgaaaccaagaaacttgtttagaatgtgataggcagctaaaactgttatgcccactgtgctcaatttgaagcagaattcaaaaaattgatgtttgatgttgatagatatgcttatacctaatttttagtttttaaactattttaaaatatactatgattttatatgtatatttcctatagactctttaagatgtatttataatgtttctaatatgaaatcactaaactctagtacattatagcaggtgctttgtaatctggaatggagaagaggtaggggcatttggggattcctgtttacttgctgctgccacaccttttccgactgatctgtcctggtaggtgtttattagcaaaagtcagtatcaccagctctttggcacctttctgtttctgcttgtgaattcataatgttttcaactaaattttttttttactttctcagaattacctaaatgttttgtagagttttgactagtaatcaatcaaaattatataaagtcttctccagtaattaagaaatacatatgcaaattcttttgtgattgagtaaaagcagcttaaattacttttcttttctacattaagaaatatattctcaacattttcagtgagaatttcttgtaatggcacctcaaattttatactcttaaaaaaaaacaataatttgtgaattaccaccaaaaggcaatggcagtcctacatttaagaatagagctatgcaaactctgttaaaaactatgaggaaaacttatattagaacttttgatatatactaaaatactgattatcttaatcacattttccccagagataaacattgagagaacgaaagccaaagtgtcatttaagagagatatatatgaaaaagtaacattaatatatagaactttaccatcaccagccgtagttgatagaaaatattagtttcagaattaccctcctttaaaaaataagagactatttgttttcttttaatttctatgaataaaagaaatttttaaaaactttaaaattttaaatattagtcaaaatactttttaagtcctgagtgcttacaggtagttgttaaaaaaattttaaggccaggcatggtggctcgctcacacctataatcctaggatcttgggaggtcgaggcaagctgatcgcttgagcccaggagtttaagaccggcctgagtagcatagcaagaccctgtctctacaaaaaaaacaaaaattagctgggcatggtggcatgcacatgtagtcagagctactgggggtgctgaggtgggaggatcgcttgagcccaggagagtgaggctgcagtgagctgagattacgccactgcactctagcctgggcaacggtgagaccctgcctcaaaaaaaataaaaataaaaataaaacactttaattagaatctatttttacctattttctaaatttatttaaatgcttagcaggaagcataaggaaaagccatcggcctccaatacccatgatgacagagggagcacttgagccttgccttccctcctcttaaatcagggtgtgttccgagattacagaacatcacaccttggcgtgatgaaatcatgccaagattctgactctccctttccggtgatactgctcatgatttctcctaatacgcttcaagcaactgttaccacaaaaaatacagtttccgcagggctttaaaggattgagtttagcatgtatatcatgcgttattaaagttcacgtgattcatgtgaaattaactgtcctttttgctagtgccaaaacagtgccttctctgcacactttacttgtttataaagttctcccacatgtccttaaatatcaagggggaaagtatggatattcgcgtagcaataatgccagcaaaggtcattttcattttttagtcatatagatatgaaaataagttcatatagatatgaaattgcttgactttattgttttggggagattttttttccttacatgattatattaaacactttaaaatagccttccggtttctggattttgagaagcctgatctgttattgttgtggttgttggtgtttgtaatattcattattgtttgtatatacacggtttagtcttactgatttcaaatgcattttgttattgctcaacccaactggtaacactgtttgctgggagcattatacttaactttgattcaccatggttgatgccactgccatgatcgctgggtcttaaagagctttccctagccactgacagccccgtggagatcataatcagggccccaggctggttccaggatcaggcagcctatagagtgtgagcatctatgtgtagctacccttgttgggtgggctcttagactgatggggtaggatatgaagtgaaagacttcaaatgcaagtaaggtagtttgggctccttaattccaaacatcccatgagtatatcaagatgaataaggaccaagggacctctgtgactcatagaagggctggctgaatcctgaagtagcatagtgggacctggtctacaatttatgcacatgcactgacagccttgctgtgccacgtgtctcaccaagacccagttgggaaagagcgtcatattgccaacaggttgggtttctctggcctacacctgattaatgggccctttatctttggtgtcccctaggagtgtccagttgttttattgctgtattttgttattgcagtacttaataaaaattgttgatagggcccaaaaccctacagaaattctatgtctgtaaaaaccaacaaaggcattggacttgtgtgaatgtacagggtttttttagtagtaattttaaatttaaatgttttaagtgatcatcagtgttcctttttacttataaagttggattcttttttagaatttgtaataaataaaaactgctgctttaccactgt

SEQ ID NO: 18179 - protein, 42 aa, Homo sapiens; identical to SEQ ID NO: 18173

SEQ ID NO: 18180 - DNA, 3399 bp, Homo sapiens
gggtcttccaagaaatgagctattttattgatgccattaaaaagcaagttgcgatggttttgtatagccaggagtttattgtgattaaacatcaaagaaacaggtagaaagcctgggtttctggctgctagcgttatagcatccatgacacagaactcattacggacattccacaacttccagggtgcacatggtaaaatctgaagcccagaattttctctcaagctgcgtggtttactggagagaaggagttggataagcacaggctcgggtattttggtagggactgtaggcatgctcataaatccttgctgttgtcacagtacgctgaaaacccgtttgattctatacccaatcaagaatagacccttcacacaggaaatgtgaacaattgttatatatgaacactcaaatcttttactgtaacgaaaccaagaaacttgtttagaatgtgataggcagctaaaactgttatgcccactgtgctcaatttgaagcagaattcaaaaaattgatgtttgatgttgatagatatgcttatacctaatttttagtttttaaactattttaaaatatactatgattttatatgtatatttcctatagactctttaagatgtatttataatgtttctaatatgaaatcactaaactctagtacattatagcaggtgctttgtaatctggaatggagaagaggtaggggcatttggggattcctgtttacttgctgctgccacaccttttccgactgatctgtcctggtaggtgtttattagcaaaagtcagtatcaccagctctttggcacctttctgtttctgcttgtgaattcataatgttttcaactaaattttttttttactttctcagaattacctaaatgttttgtagagttttgactagtaatcaatcaaaattatataaagtcttctccagtaattaagaaatacatatgcaaattcttttgtgattgagtaaaagcagcttaaattacttttcttttctacattaagaaatatattctcaacattttcagtgagaatttcttgtaatggcacctcaaattttatactcttaaaaaaaaacaataatttgtgaattaccaccaaaaggcaatggcagtcctacatttaagaatagagctatgcaaactctgttaaaaactatgaggaaaacttatattagaacttttgatatatactaaaatactgattatcttaatcacattttccccagagataaacattgagagaacgaaagccaaagtgtcatttaagagagatatatatgaaaaagtaacattaatatatagaactttaccatcaccagccgtagttgatagaaaatattagtttcagaattaccctcctttaaaaaataagagactatttgttttcttttaatttctatgaataaaagaaatttttaaaaactttaaaattttaaatattagtcaaaatactttttaagtcctgagtgcttacaggtagttgttaaaaaaattttaaggccaggcatggtggctcgctcacacctataatcctaggatcttgggaggtcgaggcaagctgatcgcttgagcccaggagtttaagaccggcctgagtagcatagcaagaccctgtctctacaaaaaaaacaaaaattagctgggcatggtggcatgcacatgtagtcagagctactgggggtgctgaggtgggaggatcgcttgagcccaggagagtgaggctgcagtgagctgagattacgccactgcactctagcctgggcaacggtgagaccctgcctcaaaaaaaataaaaataaaaataaaacactttaattagaatctatttttacctattttctaaatttatttaaatgcttagcaggaagcataaggaaaagccatcggcctccaatacccatgatgacagagggagcacttgagccttgccttccctcctcttaaatcagggtgtgttccgagattacagaacatcacaccttggcgtgatgaaatcatgccaagattctgactctccctttccggtgatactgctcatgatttctcctaatacgcttcaagcaactgttaccacaaaaaatacagtttccgcagggctttaaaggattgagtttagcatgtatatcatgcgttattaaagttcacgtgattcatgtgaaattaactgtcctttttgctagtgccaaaacagtgccttctctgcacactttacttgtttataaagttctcccacatgtccttaaatatcaagggggaaagtatggatattcgcgtagcaataatgccagcaaaggtcattttcattttttagtcatatagatatgaaaataagttcatatagatatgaaattgcttgactttattgttttggggagattttttttccttacatgattatattaaacactttaaaatagccttccggtttctggattttgagaagcctgatctgttattgttgtggttgttggtgtttgtaatattcattattgtttgtatatacacggtttagtcttactgatttcaaatgcattttgttattgctcaacccaactggtaacactgtttgctgggagcattatacttaactttgattcaccatggttgatgccactgccatgatcgctgggtcttaaagagctttccctagccactgacagccccgtggagatcataatcagggccccaggctggttccaggatcaggcagcctatagagtgtgagcatctatgtgtagctacccttgttgggtgggctcttagactgatggggtaggatatgaagtgaaagacttcaaatgcaagtaaggtagtttgggctccttaattccaaacatcccatgagtatatcaagatgaataaggaccaagggacctctgtgactcatagaagggctggctgaatcctgaagtagcatagtgggacctggtctacaatttatgcacatgcactgacagccttgctgtgccacgtgtctcaccaagacccagttgggaaagagcgtcatattgccaacaggttgggtttctctggcctacacctgattaatgggccctttatctttggtgtcccctaggagtgtccagttgttttattgctgtattttgttattgcagtacttaataaaaattgttgatagggcccaaaaccctacagaaattctatgtctgtaaaaaccaacaaaggcattggacttgtgtgaatgtacagggtttttttagtagtaattttaaatttaaatgttttaagtgatcatcagtgttcctttttacttataaagttggattcttttttagaatttgtaataaataaaaactgctgctttaccactgtaaaatatgctttctgatgtggtgtatttttaaaataaattttaatatgtaataat

SEQ ID NO: 18181 - protein, 48 aa, Homo sapiens; identical to SEQ ID NO: 18175

SEQ ID NO: 18182 - DNA, 1239 bp, Homo sapiens
taaacattgagagaacgaaagccaaagtgtcatttaagagagatatatatgaaaaagtaacattaatatatagaactttaccatcaccagccgtagttgatagaaaatattagtttcagaattaccctcctttaaaaaataagagactatttgttttcttttaatttctatgaataaaagaaatttttaaaaactttaaaattttaaatattagtcaaaatactttttaagtcctgagtgcttacaggtagttgttaaaaaaattttaaggccaggcatggtggctcgctcacacctataatcctaggatcttgggaggtcgaggcaagctgatcgcttgagcccaggagtttaagaccggcctgagtagcatagcaagaccctgtctctacaaaaaaaacaaaaattagctgggcatggtggcatgcacatgtagtcagagctactgggggtgctgaggtgggaggatcgcttgagcccaggagagtgaggctgcagtgagctgagattacgccactgcactctagcctgggcaacggtgagaccctgcctcaaaaaaaataaaaataaaaataaaacactttaattagaatctatttttacctattttctaaatttatttaaatgcttagcaggaagcataaggaaaagccatcggcctccaatacccatgatgacagagggagcacttgagccttgccttccctcctcttaaatcagggtgtgttccgagattacagaacatcacaccttggcgtgatgaaatcatgccaagattctgactctccctttccggtgatactgctcatgatttctcctaatacgcttcaagcaactgttaccacaaaaaatacagtttccgcagggctttaaaggattgagtttagcatgtatatcatgcgttattaaagttcacgtgattcatgtgaaattaactgtcctttttgctagtgccaaaacagtgccttctctgcacactttacttgtttataaagttctcccacatgtccttaaatatcaagggggaaagtatggatattcgcgtagcaataatgccagcaaaggtcattttcatgtaaaaaccaacaaaggcattggacttgtgtgaatgtacagggtttttttagtagtaattttaaatttaaatgttttaagtgatcatcagtgttcctttttacttataaagttggattcttttttagaatttgtaataaataaaaactgctgctttaccactgt

SEQ ID NO: 18183 - protein, 42 aa, Homo sapiens; identical to SEQ ID NO: 18173

SEQ ID NO: 18184 - DNA, 1555 bp, Homo sapiens
taaacattgagagaacgaaagccaaagtgtcatttaagagagatatatatgaaaaagtaacattaatatatagaactttaccatcaccagccgtagttgatagaaaatattagtttcagaattaccctcctttaaaaaataagagactatttgttttcttttaatttctatgaataaaagaaatttttaaaaactttaaaattttaaatattagtcaaaatactttttaagtcctgagtgcttacaggtagttgttaaaaaaattttaaggccaggcatggtggctcgctcacacctataatcctaggatcttgggaggtcgaggcaagctgatcgcttgagcccaggagtttaagaccggcctgagtagcatagcaagaccctgtctctacaaaaaaaacaaaaattagctgggcatggtggcatgcacatgtagtcagagctactgggggtgctgaggtgggaggatcgcttgagcccaggagagtgaggctgcagtgagctgagattacgccactgcactctagcctgggcaacggtgagaccctgcctcaaaaaaaataaaaataaaaataaaacactttaattagaatctatttttacctattttctaaatttatttaaatgcttagcaggaagcataaggaaaagccatcggcctccaatacccatgatgacagagggagcacttgagccttgccttccctcctcttaaatcagggtgtgttccgagattacagaacatcacaccttggcgtgatgaaatcatgccaagattctgactctccctttccggtgatactgctcatgatttctcctaatacgcttcaagcaactgttaccacaaaaaatacagtttccgcagggctttaaaggattgagtttagcatgtatatcatgcgttattaaagttcacgtgattcatgtgaaattaactgtcctttttgctagtgccaaaacagtgccttctctgcacactttacttgtttataaagttctcccacatgtccttaaatatcaagggggaaagtatggatattcgcgtagcaataatgccagcaaaggtcattttcattttttagtcatatagatatgaaaataagttcatatagatatgaaattgcttgactttattgttttggggagattttttttccttacatgattatattaaacactttaaaatagccttccggtttctctggcctacacctgattaatgggccctttatctttggtgtcccctaggagtgtccagttgttttattgctgtattttgttattgcagtacttaataaaaattgttgatagggcccaaaaccctacagaaattctatgtctgtaaaaaccaacaaaggcattggacttgtgtgaatgtacagggtttttttagtagtaattttaaatttaaatgttttaagtgatcatcagtgttcctttttacttataaagttggattcttttttagaatttgtaataaataaaaactgctgctttaccactgtaaaatatgctttctgatgtggtgtatttttaaaataaattttaatatgta

SEQ ID NO: 18185 - protein, 48 aa, Homo sapiens; identical to SEQ ID NO: 18175

SEQ ID NO: 18186 - DNA, 1672 bp, Homo sapiens
cgtcctcccacccccaccagcagttacagggctgggtgcggagaccaactctggccagacacagaggagcagcaagaacccggggcaacggtcctaaaccgaatcctcccgcttcggcgtcccaggagcccgcccctcgcccgccgcctcccctgcgtccccgccccgcgcagccgccgcgctcctgcgctccgaggtccgaggttcccgagatgaaggtctggctgctgcttggtcttctgctggtgcacgaagcgctggaggatgttactggccaacaccttcccaagaacaagcgtccaaaagaaccaggagagaatagaatcaaacctaccaacaagaaggtgaagcccaaaattcctaaaatgaaggacagggactcagccaattcagcaccaaagacgcagtctatcatgatgcaagtgctggataaaggtcgcttccagaaacccgccgctaccctgagtctgctggcggggcaaactgtagagcttcgatgtaaagggagtagaattgggtggagctaccctgcgtatctggacacctttaaggattctcgcctcagcgtcaagcagaatgagcgctacggccagttgactctggtcaactccacctcggcagacacaggtgaattcagctgctgggtgcagctctgcagcggctacatctgcaggaaggacgaggccaaaacgggctccacctacatcttttttacagagaaaggagaactctttgtaccttctcccagctacttcgatgttgtctacttgaacccggacagacaggctgtggttccttgtcgggtgaccgtgctgtcggccaaagtcacgctccacagggaattcccagccaaggagatcccagccaatggaacggacattgtttatgacatgaagcggggctttgtgtatctgcaacctcattccgagcaccagggtgtggtttactgcagggcggaggccgggggcagatctcagatctccgtcaagtaccagctgctctatgtggcggttcccagtggccctccctcaacaaccatcttggcttcttcaaacaaagtgaaaagtggggacgacatcagtgtgctctgcactgtcctgggggagcccgatgtggaggtggagttcacctggatcttcccagggcagaaggatgaaaggcctgtgacgatccaagacacttggaggttgatccacagaggactgggacacaccacgagaatctcccagagtgtcattacagtggaagactttgagacgattgatgcaggatattacatttgcactgctcagaatcttcaaggacagaccacagtagctaccactgttgagttttcctgacttggaaaaggaaatgtaatgaacttatggaaagcccatttgtgtacacagtcagctttggggttccttttattagtgctttgccagaggctgatgtcaagcaccacaccccaaccccagcgtctcgtgagtccgacccagacatccaaactaaaaggaagtcatccagtctattcacagaagtgttaacttttctaacagaaagcatgattttgattgcttacctacatacgtgttcctagtttttatacatgtgtaaacaattttatataatcaatcatttctattaaatgagcacgtttttgtaaaaaataaaaagtgggataagtgtt

SEQ ID NO: 18187 - protein, 375 aa, Homo sapiens; identical to SEQ ID NO: 2186

SEQ ID NO: 18188 - DNA, 453 bp, Homo sapiens
cagtaaaggtcgtatctcctcttagtttatatttcccaggaatttccactgcaaccgcagagttggtcatgggctcacagagctagagtgagagtcaggaaaactcaacagtggtagctactgtggtctgtccttgaagattctgagcagtgcaaatgtaatatcctgcatcaatcgtctcaaagtcttccactgtaatgacactctgggagattctcgtggtgtgtcccagtcctctgtggatcaacctccaagtgtcttggatcgtcacaggcctttcatcctgtttaacgacacccacaaagactgaagcaagagggacaagctgctataaagagctcccactcacccaacactgttgagcgttcctttcagagagcaaagcacatgcttataaaagactgtttagtatgcgtagctcataagctgtggaagcttctacactggaatcat

SEQ ID NO: 18189 - protein, 54 aa, Homo sapiens
MTLWEILVVCPSPLWINLQVSWIVTGLSSCLTTPTKTEARGTSCYKELPLTQHC

SEQ ID NO: 18190 - DNA, 1153 bp, Homo sapiens
ttgttcattgcctttttcacctaagcatagggggaaaaactctcagggccctattaagatttataacctttgtaatgttcttcaccacagacaccttcttgtgagttttcagtctgactgtgggggtggggggtgtgaatgaaatggatgtcacagagtgtcatgtgtctgatgcagcctcctctgctgtgtattaaatgtcaaaatctgaatatatctggatatgtactaatcaaataataatcaatcaatcagcatatacatttcagccaaagccatagaagaaaaagcaatagttgcttgaattatgatcatctaccaccaactctgctcagccctgtaacagggtagggagagggtataacaggaagagctttgacttgtccctgtctatacattctctgtatcttttgggggtaacttcttggcagtttttcagtgttcagccatgtcagttgaaactagatttttctgtagattttttacttacccatgtgagcctaacactatcctgtaattcattttctcaggctattatttactaatctacattcagtggctgtacaaataacagctgtagtaagaagagattcaggatgctagaggtgaatatttgggtcatttacatgtacactacatagcaagttgatactcatgttgcatgttcttttaaattagtgattttgtgtcttaagtctttaacttccaatacttcatcatgtatgtaaccttccatgtttgcttctgataaatggaaatgtaggttcactgccacttcatgagatatctctgctcacgcttccaagttgttctcaatgacattagccaaagttgggtttgccattcatcccctaggcatggtaaatcttgtgttgttccctgctgtcctccgtattacgtgaccggcaaataaatctcatagcagttaatataaaacatctttggaggatgggagagaacaggagggaagatgggaaacaaaatagagaattcttaagattttgtttaaaccaaatgtttcatgtagaatgcaaaatgttggcacgtcaaaaatatgaatgtgtagacaactgtagttgtgctcagtttgtagtgatgggaagtgtattttactctgatcaaataaataatgctggaatactcaagaattgca

SEQ ID NO: 18191 - protein, 67 aa, Homo sapiens
MGENRREDGKQNREFLRFCLNQMFHVECKMLARQKYECVDNCSCAQFVVMGSVFYSDQINNAGILKN

SEQ ID NO: 18192 - DNA, 2255 bp, Homo sapiens
cggagcaggctgttctgcaagagtcgctggagaaggagtcgaaagtcaacaagcgactctctatggaaaacgaggagcttctgtggaaactgcacaatggggacctgtgtagccccaagagatcccccacatcctccgccatccctttgcagtcaccaaggaattcgggctccttccctagccccagcatttcacccagatgacacctccccaaagtccacagactctctgaaagcattttgatgcaggtctgcaggactgaccccaaggaggaacgtgggcacaagaggtatatcagcacacgtgtgatcaccgtagggtaactggagcgtcaccaccggcggaatcgcagcttctgagactggaactctggaggaagacttttgcctccgtccaaaagattcctccaaaaaaagatttaaaaaaagatttcggcatcgacacggacgttgttgcacaaagcacttaaagaacgagagcatcttgttcattgcctttttcacctaagcatagggggaaaaactctcagggccctattaagatttataacctttgtaatgttcttcaccacagacaccttcttgtgagttttcagtctgactgtgggggtggggggtgtgaatgaaatggatgtcacagagtgtcatgtgtctgatgcagcctcctctgctgtgtattaaatgtcaaaatctgaatatatctggatatgtactaatcaaataataatcaatcaatcagcatatacatttcagccaaagccatagaagaaaaagcaatagttgcttgaattatgatcatctaccaccaactctgctcagccctgtaacagggtagggagagggtataacaggaagagctttgacttgtccctgtctatacattctctgtatcttttgggggtaacttcttggcagtttttcagtgttcagccatgtcagttgaaactagatttttctgtagattttttacttacccatgtgagcctaacactatcctgtaattcattttctcaggctatgtgtaaatgtagaacccttatttttacctttgatctacccttgcagatttaacctgtcttcttccctcccattattctcattttccttttacctttctccaccatccagagccacaaaagcaaaccttctacctcctacctacttttctctgggacaaggataaaggaatatgattttccagagccccagagccagctcatcttccaggtgctgaaaccactttccaaataaactaaagcctggatttgatattacaaattttgggaaatcttagaataaagaacgagaacaaggaagtcattggctagtataattaagaaaggtaggattcagtgcttaccgatgatgcagtacttgatagaagaaaacagtctgggaggatagcgctcatttttcagttaccctttaaggagtccctttgtctttgggaaagtagcagaatggtccgcttctttcccatgagtggaaaatgtggcttgtccaactctcctccaggttgcatttcagtttctttccaaaacttattacctcccctaatcctgagactttggaaaaggtggaaggaagaactgttgctttatctccccctccctgcatgtgtcaacattgtgatgtcagtatttactaatctacattcagtggctgtacaaataacagctgtagtaagaagagattcaggatgctagaggtgaatatttgggtcatttacatgtacactacatagcaagttgatactcatgttgcatgttcttttaaattagtgattttgtgtcttaagtctttaacttccaatacttcatcatgtatgtaaccttccatgtttgcttctgataaatggaaatgtaggttcactgccacttcatgagatatctctgctcacgcttccaagttgttctcaatgacattagccaaagttgggtttgccattcatcccctaggcatggtaaatcttgtgttgttccctgctgtcctccgtattacgtgaccggcaaataaatctcatagcagttaatataaaacatctttggaggatgggagagaacaggagggaagatgggaaacaaaatagagaattcttaagattttgtttaaaccaaatgtttcatgtagaatgcaaaatgttggcacgtcaaaaatatgaatgtgtagacaactgtagttgtgctcagtttgtagtgatgggaagtgtattttactctgatcaaataaataatgctggaatactcaagaattgca

SEQ ID NO: 18193 - protein, 81 aa, Homo sapiens
MVRFFPMSGKCGLSNSPPGCISVSFQNLLPPLILRLWKRWKEELLLYLPLPACVNIVMSVFTNLHSVAVQITAVVRRDSGC

SEQ ID NO: 18194 - DNA, 4160 bp, Homo sapiens
cttctacaagtgcctcattcaaacccaaaccagccctggacagtaggggacatgggggacctctctgctgcttggtttgtgttggtttggcgtttggttttcttctggagactatgacttctgttgagggagataacggccaagcccctgtgtggatataccagcattttgaattatcaggaaatttttgtaaaggaaggaaaggaactcatggttgttaatgggccaacctagtatacataccagttcctgccaaaggtcgtcctgttcgactgagtctggtatcttctaatctggtagtcagggatgactcagatgatcctgttaataggactgctccatatgccattcatgcatcaaaactttcaaaaaatcatgtgcaataaatcagactttgctgtaaacttaccaacacatttaatttctgatgatctactatttgtttcttgccatgccccagaggtatcctgataatatccttcagccttgcattgtgtatgtgtgcaagaatgagttgatacaatgagagggagacccactgttcccttcatatttgtaaattacaggcctctgatgaaattaagagacttagaagcacaggaagttttctaagaaagacagctttcccatgaaaccggcactgcccataatcagctctgtgacattattaggactagtttccctaggatgagatatttaaaggacaatacctcccaatctcaaattccaggtttttttccacgttgttttatctgggaatccttcataattactgaacgtagactccttttctggaaagtgatttaacctgaacaggttgtcctgagctgcttctggataacaggatgtcttaagaacaatcaggttccaaactaagcaacatactcaaagcgcgttagtcctgctacaaggacaaggacttagacttaatcctgacggagctataatattgcctcttcataaagccttacctttagaaagtgagtgggggatggaatcaggtcttcatcatgttaagtgattaaatgtcctcaggcatcttatcctttcatctctccgctgatcagtttgtttgccttgaaagttcagcctgcacagggcagcaagagaacagacctatctatcttcagctgacctgaggagactcgtggcatgttacttctttgatggcatgctctaagagctctatcgaattgaagctttgtatggccactcagacgcaaatgctgaaaacttaccatgaaactgagttcaagtccatagtaaacgttgccagggactgtgaattgctggcctgtgagttttcatcagatgtgggaatctttttttttttttttccagcaaaattcaccgtaaggagatagataagctttgataagtgtgggcagtgtgtctgcagggtttatttcacattgaaacagaaagaggcaccaattcttagagaattccaaaacaacatgacctggaacaaatctgttacccactcgtatcaatatttaagtgtcctggcatacatgttttaaaaatacccagccgctctgttttgctgttttaaaatctttttcagtatgtttgttagtgtataaatattttaatatggaattgcattttccttaattaaatctccaaagtgtgcttgtgtcgtgaggtgccttaagaaatgaggggttttttttttaatattgtataaatgttggaattcttgtttatgccaaggtggacaacaacacagcattggttgacaaattgaagcgtttccagcaggagaatgaagaattgaaagctcggatggacaagcacatggcaatctcaaggcagctttccacggagcaggctgttctgcaagagtcgctggagaaggagtcgaaagtcaacaagcgactctctatggaaaacgaggagcttctgtggaaactgcacaatggggacctgtgtagccccaagagatcccccacatcctccgccatccctttgcagtcaccaaggaattcgggctccttccctagccccagcatttcacccagatgacacctccccaaagtccacagactctctgaaagcattttgatgcaggtctgcaggactgaccccaaggaggaacgtgggcacaagaggtatatcagcacacgtgtgatcaccgtagggtaactggagcgtcaccaccggcggaatcgcagcttctgagactggaactctggaggaagacttttgcctccgtccaaaagattcctccaaaaaaagatttaaaaaaagatttcggcatcgacacggacgttgttgcacaaagcacttaaagaacgagagcatcttgttcattgcctttttcacctaagcatagggggaaaaactctcagggccctattaagatttataacctttgtaatgttcttcaccacagacaccttcttgtgagttttcagtctgactgtgggggtggggggtgtgaatgaaatggatgtcacagagtgtcatgtgtctgatgcagcctcctctgctgtgtattaaatgtcaaaatctgaatatatctggatatgtactaatcaaataataatcaatcaatcagcatatacatttcagccaaagccatagaagaaaaagcaatagttgcttgaattatgatcatctaccaccaactctgctcagccctgtaacagggtagggagagggtataacaggaagagctttgacttgtccctgtctatacattctctgtatcttttgggggtaacttcttggcagtttttcagtgttcagccatgtcagttgaaactagatttttctgtagattttttacttacccatgtgagcctaacactatcctgtaattcattttctcaggctatgtgtaaatgtagaaccctaatttttctataaaaaaacaaactaactaactaactgtgtaaagaaagaaaaagggaagtaccaatgggtttttccaccttatttttacctttgatctacccttgcagatttaacctgtcttcttccctcccattattctcattttccttttacctttctccaccatccagagccacaaaagcaaaccttctacctcctacctacttttctctgggacaaggataaaggaatatgattttccagagccccagagccagctcatcttccaggtgctgaaaccactttccaaataaactaaagcctggatttgatattacaaattttgggaaatcttagaataaagaacgagaacaaggaagtcattggctagtataattaagaaaggtaggattcagtgcttaccgatgatgcagtacttgatagaagaaaacagtctgggaggatagcgctcatttttcagttaccctttaaggagtccctttgtctttgggaaagtagcagaatggtccgcttctttcccatgagtggaaaatgtggcttgtccaactctcctccaggttgcatttcagtttctttccaaaacttattacctcccctaatcctgagactttggaaaaggtggaaggaagaactgttgctttatctccccctccctgcatgtgtcaacattgtgatgtcagtatttactaatctacattcagtggctgtacaaataacagctgtagtaagaagagattcaggatgctagaggtgaatatttgggtcatttacatgtacactacatagcaagttgatactcatgttgcatgttcttttaaattagtgattttgtgtcttaagtctttaacttccaatacttcatcatgtatgtaaccttccatgtttgcttctgataaatggaaatgtaggttcactgccacttcatgagatatctctgctcacgcttccaagttgttctcaatgacattagccaaagttgggtttgccattcatcccctaggcatggtaaatcttgtgttgttccctgctgtcctccgtattacgtgaccggcaaataaatctcatagcagttaatataaaacatctttggaggatgggagagaacaggagggaagatgggaaacaaaatagagaattcttaagattttgtttaaaccaaatgtttcatgtagaatgcaaaatgttggcacgtcaaaaatatgaatgtgtagacaactgtagttgtgctcagtttgtagtgatgggaagtgtattttactctgatcaaataaataatgctggaatactcaagaattgca

SEQ ID NO: 18195 - protein, 79 aa, Homo sapiens
MDKHMAISRQLSTEQAVLQESLEKESKVNKRLSMENEELLWKLHNGDLCSPKRSPTSSAIPLQSPRNSGSFPSPSISPR

SEQ ID NO: 18196 - DNA, 4386 bp, Homo sapiens
acacggtaacctgcaggacatgaagtaagacgcccgagggccaatggcgcgcctcctgctagagctttgaatgtagacagacccgactggtgggtggcgcggccacctgtatgcttcttgcacagtgcgaggggtggggggacttggagacagaagctggaaaatgggctgccccagcagcaaactgtgcctctattctccatgtgcagcaacaaggcgggaggaagcactgaaacaacacaaaaccctatctcaagaacttgttaacctccggggagagctagtcactgcttcaaccacctgtgagaaattagaaaaagccaggaatgagttacaaacagtgtatgaagcattcgtccagcagcaccaggctgaaaaaacagaacgagagaatcggcttaaagagttttacaccagggagtatgaaaagcttcgggacacttacattgaagaagcagagaagtacaaaatgcaattgcaagagcagtttgacaacttaaatgctgcgcatgaaacctctaagttggaaattgaagctagccactcagagaaacttgaattgctaaagaaggcctatgaagcctccctttcaggcaaggatgctttttttcctctttaaacagaataaaatctgaaggaaccacatgatgttttaagatggaaatgattcataacttcctgcttcagcgaatgccctgtggccttcaggctggggtgttcttggttcctttttgcgtggtttattgttaacagatgccttttcccactaaggatgcaaataatagttacaaatgccagccttgtgttaaataggatgggctttggaagactgtaaaggccattttggcggtggtggttgccagcttaggtccctgggaagtggcaagtacaagtttctatcttgtaatccacagtaaaggatccaccccaagtgctcctgcacagcagtgttgctgtgaaatgtcgatgccacttattgaatagaaaaatagtcttttctatttttcatctgtcatcagtgggagggtgtaagccattgctttcagaacagaatcggcagtgtcgctcacagtctttctactaaaccagttgcatcttacagagcagcgtggatgagtgctaagaaccggctgtgtgaccttcagcaaggactttctcaccacaaaaatagagttgcccaaagtcaggcagaggtgataatgtgtaaaagtgactggctccaggcagacttgtagtgaacattgtttttcttccttcctgctagaaatgagtataattttagacttatgtttaggttatgaagagcaaattgaaaagagcacagggtttccagaccaggagtctggagtggcatttatgagagcctgccctgaaatggcactcagtgttgtcctaaggtcgcatggcctctgtgggccatggtgggcttcagtgggcctcagggctctcagtcataaaatgggaatgtctaccctaaccacctctcaaggccattttgagaacagatggccaatttacataaaagcatactatagatgtaaagtaacgtcatacggcttcatcatcaacccctacatctatatgctttaactgttttagagtacattgatctcatagaatgttattgcctcaaaaatatccgtttattttcccagaaattaagaaaggccatgaaatagaaaagaaatcgcttgaagatttactttctgagaagcaggaatcgctagagaagcaaatcaatgatctgaagagtgaaaatgatgctttaaatgaaaaattgaaatcagaagaacaaaaaagaagagcaagagaaaaagcaaatttgaaaaatcctcagatcatgtatctagaacaggagttagaaagcctgaaagctgtgttagagatcaagaatgagaaactgcatcaacaggacatcaagttaatgaaaatggagaaactggtggacaacaacacagcattggttgacaaattgaagcgtttccagcaggagaatgaagaattgaaagctcggatggacaagcacatggcaatctcaaggcagctttccacggagcaggctgttctgcaagagtcgctggagaaggagtcgaaagtcaacaagcgactctctatggaaaacgaggagcttctgtggaaactgcacaatggggacctgtgtagccccaagagatcccccacatcctccgccatccctttgcagtcaccaaggaattcgggctccttccctagccccagcatttcacccagatgacacctccccaaagtccacagactctctgaaagcattttgatgcaggtctgcaggactgaccccaaggaggaacgtgggcacaagaggtatatcagcacacgtgtgatcaccgtagggtaactggagcgtcaccaccggcggaatcgcagcttctgagactggaactctggaggaagacttttgcctccgtccaaaagattcctccaaaaaaagatttaaaaaaagatttcggcatcgacacggacgttgttgcacaaagcacttaaagaacgagagcatcttgttcattgcctttttcacctaagcatagggggaaaaactctcagggccctattaagatttataacctttgtaatgttcttcaccacagacaccttcttgtgagttttcagtctgactgtgggggtggggggtgtgaatgaaatggatgtcacagagtgtcatgtgtctgatgcagcctcctctgctgtgtattaaatgtcaaaatctgaatatatctggatatgtactaatcaaataataatcaatcaatcagcatatacatttcagccaaagccatagaagaaaaagcaatagttgcttgaattatgatcatctaccaccaactctgctcagccctgtaacagggtagggagagggtataacaggaagagctttgacttgtccctgtctatacattctctgtatcttttgggggtaacttcttggcagtttttcagtgttcagccatgtcagttgaaactagatttttctgtagattttttacttacccatgtgagcctaacactatcctgtaattcattttctcaggctatgtgtaaatgtagaaccctaatttttctataaaaaaacaaactaactaactaactgtgtaaagaaagaaaaagggaagtaccaatgggtttttccaccttatttttacctttgatctacccttgcagatttaacctgtcttcttccctcccattattctcattttccttttacctttctccaccatccagagccacaaaagcaaaccttctacctcctacctacttttctctgggacaaggataaaggaatatgattttccagagccccagagccagctcatcttccaggtgctgaaaccactttccaaataaactaaagcctggatttgatattacaaattttgggaaatcttagaataaagaacgagaacaaggaagtcattggctagtataattaagaaaggtaggattcagtgcttaccgatgatgcagtacttgatagaagaaaacagtctgggaggatagcgctcatttttcagttaccctttaaggagtccctttgtctttgggaaagtagcagaatggtccgcttctttcccatgagtggaaaatgtggcttgtccaactctcctccaggttgcatttcagtttctttccaaaacttattacctcccctaatcctgagactttggaaaaggtggaaggaagaactgttgctttatctccccctccctgcatgtgtcaacattgtgatgtcagtatttactaatctacattcagtggctgtacaaataacagctgtagtaagaagagattcaggatgctagaggtgaatatttgggtcatttacatgtacactacatagcaagttgatactcatgttgcatgttcttttaaattagtgattttgtgtcttaagtctttaacttccaatacttcatcatgtatgtaaccttccatgtttgcttctgataaatggaaatgtaggttcactgccacttcatgagatatctctgctcacgcttccaagttgttctcaatgacattagccaaagttgggtttgccattcatcccctaggcatggtaaatcttgtgttgttccctgctgtcctccgtattacgtgaccggcaaataaatctcatagcagttaatataaaacatctttggaggatgggagagaacaggagggaagatgggaaacaaaatagagaattcttaagattttgtttaaaccaaatgtttcatgtagaatgcaaaatgttggcacgtcaaaaatatgaatgtgtagacaactgtagttgtgctcagtttgtagtgatgggaagtgtattttactctgatcaaataaataatgctggaatactcaagaattgca

SEQ ID NO: 18197 - protein, 211 aa, Homo sapiens [sequence omitted]

SEQ ID NO: 18198 - DNA, 3780 bp, Homo sapiens
ctttaccatctcggatgaaaaccataacaactccacaagcatgcacagtgtgatgtggttcagaggcagcttctagacctgcaggagggagattgtattcagaggaagagcatcattttggcaacatctgaaagtgaaaacggaagccagaaacacttggccagccctgggggatttttttcttctatgcctctctggtggaatgacatttgctgtgtaggcatctttcctctgactgtatttcttggccttgaagagtactgagtttaaaaagacagtatgtgacagtccatggaaattgcctcttctgtgaaatctcgccacctgctccgaagacatgttgttgtctcccaaattctccttatccaccattcacatacgactgacggccaaaggattgcttcgaaaccttcgacttccttcagggtttaggagaagcactgttgttttccacacagttgaaaagagcaggcaaaagaatcctcgaagcttatgtatccagccacagacagctcccgatgcgctgccccctgagaaaacacttgaattgacgcaatataaaacaaaatgtgaaaaccaaagtggatttatcctgcagctcaagcagcttcttgcctgtggtaataccaagtttgaggcattgacagttgtgattcagcacctgctgtctgagcgggaggaagcactgaaacaacacaaaaccctatctcaagaacttgttaacctccggggagagctagtcactgcttcaaccacctgtgagaaattagaaaaagccaggaatgagttacaaacagtgtatgaagcattcgtccagcagcaccaggctgaaaaaacagaacgagagaatcggcttaaagagttttacaccagggagtatgaaaagcttcgggacacttacattgaagaagcagagaagtacaaaatgcaattgcaagagcagtttgacaacttaaatgctgcgcatgaaacctctaagttggaaattgaagctagccactcagagaaacttgaattgctaaagaaggcctatgaagcctccctttcagaaattaagaaaggccatgaaatagaaaagaaatcgcttgaagatttactttctgagaagcaggaatcgctagagaagcaaatcaatgatctgaagagtgaaaatgatgctttaaatgaaaaattgaaatcagaagaacaaaaaagaagagcaagagaaaaagcaaatttgaaaaatcctcagatcatgtatctagaacaggagttagaaagcctgaaagctgtgttagagatcaagaatgagaaactgcatcaacaggacatcaagttaatgaaaatggagaaactggtggacaacaacacagcattggttgacaaattgaagcgtttccagcaggagaatgaagaattgaaagctcggatggacaagcacatggcaatctcaaggcagctttccacggagcaggctgttctgcaagagtcgctggagaaggagtcgaaagtcaacaagcgactctctatggaaaacgaggagcttctgtggaaactgcacaatggggacctgtgtagccccaagagatcccccacatcctccgccatccctttgcagtcaccaaggaattcgggctccttccctagccccagcatttcacccagatgacacctccccaaagtccacagactctctgaaagcattttgatgcaggtctgcaggactgaccccaaggaggaacgtgggcacaagaggtatatcagcacacgtgtgatcaccgtagggtaactggagcgtcaccaccggcggaatcgcagcttctgagactggaactctggaggaagacttttgcctccgtccaaaagattcctccaaaaaaagatttaaaaaaagatttcggcatcgacacggacgttgttgcacaaagcacttaaagaacgagagcatcttgttcattgcctttttcacctaagcatagggggaaaaactctcagggccctattaagatttataacctttgtaatgttcttcaccacagacaccttcttgtgagttttcagtctgactgtgggggtggggggtgtgaatgaaatggatgtcacagagtgtcatgtgtctgatgcagcctcctctgctgtgtattaaatgtcaaaatctgaatatatctggatatgtactaatcaaataataatcaatcaatcagcatatacatttcagccaaagccatagaagaaaaagcaatagttgcttgaattatgatcatctaccaccaactctgctcagccctgtaacagggtagggagagggtataacaggaagagctttgacttgtccctgtctatacattctctgtatcttttgggggtaacttcttggcagtttttcagtgttcagccatgtcagttgaaactagatttttctgtagattttttacttacccatgtgagcctaacactatcctgtaattcattttctcaggctatgtgtaaatgtagaaccctaatttttctataaaaaaacaaactaactaactaactgtgtaaagaaagaaaaagggaagtaccaatgggtttttccaccttatttttacctttgatctacccttgcagatttaacctgtcttcttccctcccattattctcattttccttttacctttctccaccatccagagccacaaaagcaaaccttctacctcctacctacttttctctgggacaaggataaaggaatatgattttccagagccccagagccagctcatcttccaggtgctgaaaccactttccaaataaactaaagcctggatttgatattacaaattttgggaaatcttagaataaagaacgagaacaaggaagtcattggctagtataattaagaaaggtaggattcagtgcttaccgatgatgcagtacttgatagaagaaaacagtctgggaggatagcgctcatttttcagttaccctttaaggagtccctttgtctttgggaaagtagcagaatggtccgcttctttcccatgagtggaaaatgtggcttgtccaactctcctccaggttgcatttcagtttctttccaaaacttattacctcccctaatcctgagactttggaaaaggtggaaggaagaactgttgctttatctccccctccctgcatgtgtcaacattgtgatgtcagtatttactaatctacattcagtggctgtacaaataacagctgtagtaagaagagattcaggatgctagaggtgaatatttgggtcatttacatgtacactacatagcaagttgatactcatgttgcatgttcttttaaattagtgattttgtgtcttaagtctttaacttccaatacttcatcatgtatgtaaccttccatgtttgcttctgataaatggaaatgtaggttcactgccacttcatgagatatctctgctcacgcttccaagttgttctcaatgacattagccaaagttgggtttgccattcatcccctaggcatggtaaatcttgtgttgttccctgctgtcctccgtattacgtgaccggcaaataaatctcatagcagttaatataaaacatctttggaggatgggagagaacaggagggaagatgggaaacaaaatagagaattcttaagattttgtttaaaccaaatgtttcatgtagaatgcaaaatgttggcacgtcaaaaatatgaatgtgtagacaactgtagttgtgctcagtttgtagtgatgggaagtgtattttactctgatcaaataaataatgctggaatactcaagaattgca

SEQ ID NO: 18199 - protein, 436 aa, Homo sapiens; identical to SEQ ID NO: 2196

SEQ ID NO: 18200 - DNA, 4006 bp, Homo sapiens
agtactgtgtctgatgctcctaaggaggctgtaaagtgcttttgtccattcctttttgtcttttaacaaaggggtttaccatacacccacagagcctgtctagtggcgatgtgttcctgttgcggattaagcattcaaatcagtgagtctctttcttagtttgatttgctagctggtttaatctgttttgtgtagtgccttggagcttacgcatttttttttttttccctccattcgaattcactaagagcaagcatgagggatatgagagtgaacatggctgcagtttttcctgcttaagcttgctttgatccttttaaatgactgtaccaggaggatttcgcagttgtacagaaactgatatttcttcaaaaatctttatcaattctacactcaccccaccggctggttcagagaggcactatgatgctaccttattgacactgctggtcgtgggatcgtacagcctttgtataattcctttgttagccacgtttactgggaaaaaaactggtaatgccgctgtcatcaaatatgaggagaaacctccaaaaccagcatttcagaatggttcctcaggatccttttatttgaagcctttggtatccagggctcatgttcacttgatgaaaactcctccaaaaggtccttcgagaaaaaatttatttacagctcttaatgcagttgaaaagagcaggcaaaagaatcctcgaagcttatgtatccagccacagacagctcccgatgcgctgccccctgagaaaacacttgaattgacgcaatataaaacaaaatgtgaaaaccaaagtggatttatcctgcagctcaagcagcttcttgcctgtggtaataccaagtttgaggcattgacagttgtgattcagcacctgctgtctgagcgggaggaagcactgaaacaacacaaaaccctatctcaagaacttgttaacctccggggagagctagtcactgcttcaaccacctgtgagaaattagaaaaagccaggaatgagttacaaacagtgtatgaagcattcgtccagcagcaccaggctgaaaaaacagaacgagagaatcggcttaaagagttttacaccagggagtatgaaaagcttcgggacacttacattgaagaagcagagaagtacaaaatgcaattgcaagagcagtttgacaacttaaatgctgcgcatgaaacctctaagttggaaattgaagctagccactcagagaaacttgaattgctaaagaaggcctatgaagcctccctttcagaaattaagaaaggccatgaaatagaaaagaaatcgcttgaagatttactttctgagaagcaggaatcgctagagaagcaaatcaatgatctgaagagtgaaaatgatgctttaaatgaaaaattgaaatcagaagaacaaaaaagaagagcaagagaaaaagcaaatttgaaaaatcctcagatcatgtatctagaacaggagttagaaagcctgaaagctgtgttagagatcaagaatgagaaactgcatcaacaggacatcaagttaatgaaaatggagaaactggtggacaacaacacagcattggttgacaaattgaagcgtttccagcaggagaatgaagaattgaaagctcggatggacaagcacatggcaatctcaaggcagctttccacggagcaggctgttctgcaagagtcgctggagaaggagtcgaaagtcaacaagcgactctctatggaaaacgaggagcttctgtggaaactgcacaatggggacctgtgtagccccaagagatcccccacatcctccgccatccctttgcagtcaccaaggaattcgggctccttccctagccccagcatttcacccagatgacacctccccaaagtccacagactctctgaaagcattttgatgcaggtctgcaggactgaccccaaggaggaacgtgggcacaagaggtatatcagcacacgtgtgatcaccgtagggtaactggagcgtcaccaccggcggaatcgcagcttctgagactggaactctggaggaagacttttgcctccgtccaaaagattcctccaaaaaaagatttaaaaaaagatttcggcatcgacacggacgttgttgcacaaagcacttaaagaacgagagcatcttgttcattgcctttttcacctaagcatagggggaaaaactctcagggccctattaagatttataacctttgtaatgttcttcaccacagacaccttcttgtgagttttcagtctgactgtgggggtggggggtgtgaatgaaatggatgtcacagagtgtcatgtgtctgatgcagcctcctctgctgtgtattaaatgtcaaaatctgaatatatctggatatgtactaatcaaataataatcaatcaatcagcatatacatttcagccaaagccatagaagaaaaagcaatagttgcttgaattatgatcatctaccaccaactctgctcagccctgtaacagggtagggagagggtataacaggaagagctttgacttgtccctgtctatacattctctgtatcttttgggggtaacttcttggcagtttttcagtgttcagccatgtcagttgaaactagatttttctgtagattttttacttacccatgtgagcctaacactatcctgtaattcattttctcaggctatgtgtaaatgtagaaccctaatttttctataaaaaaacaaactaactaactaactgtgtaaagaaagaaaaagggaagtaccaatgggtttttccaccttatttttacctttgatctacccttgcagatttaacctgtcttcttccctcccattattctcattttccttttacctttctccaccatccagagccacaaaagcaaaccttctacctcctacctacttttctctgggacaaggataaaggaatatgattttccagagccccagagccagctcatcttccaggtgctgaaaccactttccaaataaactaaagcctggatttgatattacaaattttgggaaatcttagaataaagaacgagaacaaggaagtcattggctagtataattaagaaaggtaggattcagtgcttaccgatgatgcagtacttgatagaagaaaacagtctgggaggatagcgctcatttttcagttaccctttaaggagtccctttgtctttgggaaagtagcagaatggtccgcttctttcccatgagtggaaaatgtggcttgtccaactctcctccaggttgcatttcagtttctttccaaaacttattacctcccctaatcctgagactttggaaaaggtggaaggaagaactgttgctttatctccccctccctgcatgtgtcaacattgtgatgtcagtatttactaatctacattcagtggctgtacaaataacagctgtagtaagaagagattcaggatgctagaggtgaatatttgggtcatttacatgtacactacatagcaagttgatactcatgttgcatgttcttttaaattagtgattttgtgtcttaagtctttaacttccaatacttcatcatgtatgtaaccttccatgtttgcttctgataaatggaaatgtaggttcactgccacttcatgagatatctctgctcacgcttccaagttgttctcaatgacattagccaaagttgggtttgccattcatcccctaggcatggtaaatcttgtgttgttccctgctgtcctccgtattacgtgaccggcaaataaatctcatagcagttaatataaaacatctttggaggatgggagagaacaggagggaagatgggaaacaaaatagagaattcttaagattttgtttaaaccaaatgtttcatgtagaatgcaaaatgttggcacgtcaaaaatatgaatgtgtagacaactgtagttgtgctcagtttgtagtgatgggaagtgtattttactctgatcaaataaataatgctggaatactcaagaattgca

SEQ ID NO: 18201 - protein, 517 aa, Homo sapiens; identical to SEQ ID NO: 2194

SEQ ID NO: 18202 - DNA, 5602 bp, Homo sapiens
tttgccttttgtgtggaagcctaatgacaatttgaactgtgcaggctactgtgatgccttggagctaaaccaaacatttgacatgacagtggataaagttaactgcacctttatatcacatcatgccatcggaaagagtcagtccttccatactgctggaagcctgccaccaactggtaggagaagtggaagtacatcttctttatcctattccacttggacatcttcccattctgataagacgcatgcaagagaaactacttatgatagagaaagctttgaaaaccctcaagtcacaccatcagaagcccaagacatgacttacacagcattttctgatgtggtgatgcaaagtgaggtttttgtttcagatattggaaatcagtgtgcatgttcttcaggaaaggtcaccagtgagtacacagatggatcacaacaaagactagttggagaaaaggagacacaagcactaacaccagtttctgatggcatggaagtccccaatgattctgcattacaagagttcttttgtttatcccatgatgaatccaatagcgaaccacattcacagagctcatacaggcacaaggaaatgggccaaaatctgagagagacagtgtcctattgtcttattgatgatgaatgccctttaatggtgccagcttttgataagagcgaagctcaagtgctgaacccagagcataaagtcactgagactgaagacacacaaatggtctccaaaggaaaggatttgggaacccaaaatcatacctcagaattgattctaagtagcccgccaggacaaaaggtgggctcgtcatttggactgacttgggatgcaaatgatatggtcattagcacagacaaaacgatgtgcatgtcaacaccagtcctagaacccacaaaagtaaccttttctgtttcaccgattgaagcgacggagaaatgtaagaaagtggagaagggtaatcgagggcttaaaaacataccagactcgaaggaggcacctgtgaacctgtgtaaacccagtttaggaaaatcaacaatcaaaacgaataccccaataggctgcaaagttagaaaaactgaaattataagttacccaagaccaaacttcaagaatgtcaaagcaaaagttatgtctagagcagtgttgcagcccaaagatgctgctttatcaaaggtcacgcccagacctcagcagaccagtgcctcatcaccctcatcagtgaattcaagacaacaaacagtcttgagcagaacaccgagatctgacttgaatgcagacaaaaaagcagaaattctaattaacaagacacataagcagcagtttaataaactcattactagccaggctgtgcatgttacaactcattctaaaaatgcttcacacagggttccaagaacaacatctgccgtgaaatcgaatcaggaagatgttgacaaagccagttcttctaactcagcatgcgagaccgggtccgtttctgcgttgtttcagaagatcaaaggcatactccctgttaaaatggaaagtgcagaatgtttggaaatgacctatgttcccaacattgataggattagccctgaaaagaagggtgaaaaagaaaatgggacatctatggaaaaacaagagctgaaacaagagattatgaatgagacttttgaatatggttctctgtttttgggctctgcttcaaaaacaacgaccacctcaggtaggaatatatccaagcctgactcctgcggtttgaggcaaatagctgctccaaaagccaaagtggggccccctgtttcctgtttgaggcggaacagtgacaatagaaatcccagtgctgatcgagccgtatctcctcagaggatcaggcgtgtgtccagttctgttttgccaaaagctgctttctcatgattattctgattgatcatctccttcagagaacatgtgaaagcctacatccttgaaaactgcacagtcgtcatgggtgaatttgcctagaccacttcctaaatccaaagcatctttgaaaagtcctgcgctgcggaggacaggaagcaccccctcaatagccagcacccacagtgagctgagcacttacagcaacaattctggtaatgccgctgtcatcaaatatgaggagaaacctccaaaaccagcatttcagaatggttcctcaggatccttttatttgaagcctttggtatccagggctcatgttcacttgatgaaaactcctccaaaaggtccttcgagaaaaaatttatttacagctcttaatgcagttgaaaagagcaggcaaaagaatcctcgaagcttatgtatccagccacagacagctcccgatgcgctgccccctgagaaaacacttgaattgacgcaatataaaacaaaatgtgaaaaccaaagtggatttatcctgcagctcaagcagcttcttgcctgtggtaataccaagtttgaggcattgacagttgtgattcagcacctgctgtctgagcgggaggaagcactgaaacaacacaaaaccctatctcaagaacttgttaacctccggggagagctagtcactgcttcaaccacctgtgagaaattagaaaaagccaggaatgagttacaaacagtgtatgaagcattcgtccagcagcaccaggctgaaaaaacagaacgagagaatcggcttaaagagttttacaccagggagtatgaaaagcttcgggacacttacattgaagaagcagagaagtacaaaatgcaattgcaagagcagtttgacaacttaaatgctgcgcatgaaacctctaagttggaaattgaagctagccactcagagaaacttgaattgctaaagaaggcctatgaagcctccctttcagaaattaagaaaggccatgaaatagaaaagaaatcgcttgaagatttactttctgagaagcaggaatcgctagagaagcaaatcaatgatctgaagagtgaaaatgatgctttaaatgaaaaattgaaatcagaagaacaaaaaagaagagcaagagaaaaagcaaatttgaaaaatcctcagatcatgtatctagaacaggagttagaaagcctgaaagctgtgttagagatcaagaatgagaaactgcatcaacaggacatcaagttaatgaaaatggagaaactggtggacaacaacacagcattggttgacaaattgaagcgtttccagcaggagaatgaagaattgaaagctcggatggacaagcacatggcaatctcaaggcagctttccacggagcaggctgttctgcaagagtcgctggagaaggagtcgaaagtcaacaagcgactctctatggaaaacgaggagcttctgtggaaactgcacaatggggacctgtgtagccccaagagatcccccacatcctccgccatccctttgcagtcaccaaggaattcgggctccttccctagccccagcatttcacccagatgacacctccccaaagtccacagactctctgaaagcattttgatgcaggtctgcaggactgaccccaaggaggaacgtgggcacaagaggtatatcagcacacgtgtgatcaccgtagggtaactggagcgtcaccaccggcggaatcgcagcttctgagactggaactctggaggaagacttttgcctccgtccaaaagattcctccaaaaaaagatttaaaaaaagatttcggcatcgacacggacgttgttgcacaaagcacttaaagaacgagagcatcttgttcattgcctttttcacctaagcatagggggaaaaactctcagggccctattaagatttataacctttgtaatgttcttcaccacagacaccttcttgtgagttttcagtctgactgtgggggtggggggtgtgaatgaaatggatgtcacagagtgtcatgtgtctgatgcagcctcctctgctgtgtattaaatgtcaaaatctgaatatatctggatatgtactaatcaaataataatcaatcaatcagcatatacatttcagccaaagccatagaagaaaaagcaatagttgcttgaattatgatcatctaccaccaactctgctcagccctgtaacagggtagggagagggtataacaggaagagctttgacttgtccctgtctatacattctctgtatcttttgggggtaacttcttggcagtttttcagtgttcagccatgtcagttgaaactagatttttctgtagattttttacttacccatgtgagcctaacactatcctgtaattcattttctcaggctatgtgtaaatgtagaaccctaatttttctataaaaaaacaaactaactaactaactgtgtaaagaaagaaaaagggaagtaccaatgggtttttccaccttatttttacctttgatctacccttgcagatttaacctgtcttcttccctcccattattctcattttccttttacctttctccaccatccagagccacaaaagcaaaccttctacctcctacctacttttctctgggacaaggataaaggaatatgattttccagagccccagagccagctcatcttccaggtgctgaaaccactttccaaataaactaaagcctggatttgatattacaaattttgggaaatcttagaataaagaacgagaacaaggaagtcattggctagtataattaagaaaggtaggattcagtgcttaccgatgatgcagtacttgatagaagaaaacagtctgggaggatagcgctcatttttcagttaccctttaaggagtccctttgtctttgggaaagtagcagaatggtccgcttctttcccatgagtggaaaatgtggcttgtccaactctcctccaggttgcatttcagtttctttccaaaacttattacctcccctaatcctgagactttggaaaaggtggaaggaagaactgttgctttatctccccctccctgcatgtgtcaacattgtgatgtcagtatttactaatctacattcagtggctgtacaaataacagctgtagtaagaagagattcaggatgctagaggtgaatatttgggtcatttacatgtacactacatagcaagttgatactcatgttgcatgttcttttaaattagtgattttgtgtcttaagtctttaacttccaatacttcatcatgtatgtaaccttccatgtttgcttctgataaatggaaatgtaggttcactgccacttcatgagatatctctgctcacgcttccaagttgttctcaatgacattagccaaagttgggtttgccattcatcccctaggcatggtaaatcttgtgttgttccctgctgtcctccgtattacgtgaccggcaaataaatctcatagcagttaatataaaacatctttggaggatgggagagaacaggagggaagatgggaaacaaaatagagaattcttaagattttgtttaaaccaaatgtttcatgtagaatgcaaaatgttggcacgtcaaaaatatgaatgtgtagacaactgtagttgtgctcagtttgtagtgatgggaagtgtattttactctgatcaaataaataatgctggaatactcaagaattgca

SEQ ID NO: 18203 - protein, 608 aa, Homo sapiens
MTVDKVNCTFISHHAIGKSQSFHTAGSLPPTGRRSGSTSSLSYSTWTSSHSDKTHARETTYDRESFENPQVTPSEAQDMTYTAFSDVVMQSEVFVSDIGNQCACSSGKVTSEYTDGSQQRLVGEKETQALTPVSDGMEVPNDSALQEFFCLSHDESNSEPHSQSSYRHKEMGQNLRETVSYCLIDDECPLMVPAFDKSEAQVLNPEHKVTETEDTQMVSKGKDLGTQNHTSELILSSPPGQKVGSSFGLTWDANDMVISTDKTMCMSTPVLEPTKVTFSVSPIEATEKCKKVEKGNRGLKNIPDSKEAPVNLCKPSLGKSTIKTNTPIGCKVRKTEIISYPRPNFKNVKAKVMSRAVLQPKDAALSKVTPRPQQTSASSPSSVNSRQQTVLSRTPRSDLNADKKAEILINKTHKQQFNKLITSQAVHVTTHSKNASHRVPRTTSAVKSNQEDVDKASSSNSACETGSVSALFQKIKGILPVKMESAECLEMTYVPNIDRISPEKKGEKENGTSMEKQELKQEIMNETFEYGSLFLGSASKTTTTSGRNISKPDSCGLRQIAAPKAKVGPPVSCLRRNSDNRNPSADRAVSPQRIRRVSSSVLPKAAFS

SEQ ID NO: 18204 - DNA, 6241 bp, Homo sapiens
gggtgaaatgtcattgagtttcctagattcttccacagcccctcaggattgactatgaagtgtaagctgtgtcatctgatttgtcatggcagtgagcactcccttaccttcgatgatgcctcacgtcaccttttgcataaagggaacaacaaatcatttaatcttcagagcatcttagactgaaaacctttcaactgtgctgaaaaacctagaagacagaccattttgcccaccctctcatttaaaaggaattgaagaagaaataaaatggcagaggtttaaggttactattcaggatgactgatgataattcagatgataaaatagaagatgaattgcaaaccttctttaccagtgataaagatggaaatacacatgcatacaacccgaaatcaccacctacacaaaactcttcagccagcagtgtgaactggaattctgccaacccagatgacatggtggttgattatgaaactgaccctgctgtagttactggtgaaaatatttctttaagccttcagggtgttgaagtatttggtcatgaaaagtcttctagtgatttcattagtaagcaggtgttagatatgcataaagattctatttgtcagtgtcctgcacttgtaggtactgagaagcccaaatatctgcaacacagttgtcattccctagaagcagttgagggccagagtgttgagccatctttgccttttgtgtggaagcctaatgacaatttgaactgtgcaggctactgtgatgccttggagctaaaccaaacatttgacatgacagtggataaagttaactgcacctttatatcacatcatgccatcggaaagagtcagtccttccatactgctggaagcctgccaccaactggtaggagaagtggaagtacatcttctttatcctattccacttggacatcttcccattctgataagacgcatgcaagagaaactacttatgatagagaaagctttgaaaaccctcaagtcacaccatcagaagcccaagacatgacttacacagcattttctgatgtggtgatgcaaagtgaggtttttgtttcagatattggaaatcagtgtgcatgttcttcaggaaaggtcaccagtgagtacacagatggatcacaacaaagactagttggagaaaaggagacacaagcactaacaccagtttctgatggcatggaagtccccaatgattctgcattacaagagttcttttgtttatcccatgatgaatccaatagcgaaccacattcacagagctcatacaggcacaaggaaatgggccaaaatctgagagagacagtgtcctattgtcttattgatgatgaatgccctttaatggtgccagcttttgataagagcgaagctcaagtgctgaacccagagcataaagtcactgagactgaagacacacaaatggtctccaaaggaaaggatttgggaacccaaaatcatacctcagaattgattctaagtagcccgccaggacaaaaggtgggctcgtcatttggactgacttgggatgcaaatgatatggtcattagcacagacaaaacgatgtgcatgtcaacaccagtcctagaacccacaaaagtaaccttttctgtttcaccgattgaagcgacggagaaatgtaagaaagtggagaagggtaatcgagggcttaaaaacataccagactcgaaggaggcacctgtgaacctgtgtaaacccagtttaggaaaatcaacaatcaaaacgaataccccaataggctgcaaagttagaaaaactgaaattataagttacccaagaccaaacttcaagaatgtcaaagcaaaagttatgtctagagcagtgttgcagcccaaagatgctgctttatcaaaggtcacgcccagacctcagcagaccagtgcctcatcaccctcatcagtgaattcaagacaacaaacagtcttgagcagaacaccgagatctgacttgaatgcagacaaaaaagcagaaattctaattaacaagacacataagcagcagtttaataaactcattactagccaggctgtgcatgttacaactcattctaaaaatgcttcacacagggttccaagaacaacatctgccgtgaaatcgaatcaggaagatgttgacaaagccagttcttctaactcagcatgcgagaccgggtccgtttctgcgttgtttcagaagatcaaaggcatactccctgttaaaatggaaagtgcagaatgtttggaaatgacctatgttcccaacattgataggattagccctgaaaagaagggtgaaaaagaaaatgggacatctatggaaaaacaagagctgaaacaagagattatgaatgagacttttgaatatggttctctgtttttgggctctgcttcaaaaacaacgaccacctcaggtaggaatatatccaagcctgactcctgcggtttgaggcaaatagctgctccaaaagccaaagtggggccccctgtttcctgtttgaggcggaacagtgacaatagaaatcccagtgctgatcgagccgtatctcctcagaggatcaggcgtgtgtccagttctggaaagcctacatccttgaaaactgcacagtcgtcatgggtgaatttgcctagaccacttcctaaatccaaagcatctttgaaaagtcctgcgctgcggaggacaggaagcaccccctcaatagccagcacccacagtgagctgagcacttacagcaacaattctggtaatgccgctgtcatcaaatatgaggagaaacctccaaaaccagcatttcagaatggttcctcaggatccttttatttgaagcctttggtatccagggctcatgttcacttgatgaaaactcctccaaaaggtccttcgagaaaaaatttatttacagctcttaatgcagttgaaaagagcaggcaaaagaatcctcgaagcttatgtatccagccacagacagctcccgatgcgctgccccctgagaaaacacttgaattgacgcaatataaaacaaaatgtgaaaaccaaagtggatttatcctgcagctcaagcagcttcttgcctgtggtaataccaagtttgaggcattgacagttgtgattcagcacctgctgtctgagcgggaggaagcactgaaacaacacaaaaccctatctcaagaacttgttaacctccggggagagctagtcactgcttcaaccacctgtgagaaattagaaaaagccaggaatgagttacaaacagtgtatgaagcattcgtccagcagcaccaggctgaaaaaacagaacgagagaatcggcttaaagagttttacaccagggagtatgaaaagcttcgggacacttacattgaagaagcagagaagtacaaaatgcaattgcaagagcagtttgacaacttaaatgctgcgcatgaaacctctaagttggaaattgaagctagccactcagagaaacttgaattgctaaagaaggcctatgaagcctccctttcagaaattaagaaaggccatgaaatagaaaagaaatcgcttgaagatttactttctgagaagcaggaatcgctagagaagcaaatcaatgatctgaagagtgaaaatgatgctttaaatgaaaaattgaaatcagaagaacaaaaaagaagagcaagagaaaaagcaaatttgaaaaatcctcagatcatgtatctagaacaggagttagaaagcctgaaagctgtgttagagatcaagaatgagaaactgcatcaacaggacatcaagttaatgaaaatggagaaactggtggacaacaacacagcattggttgacaaattgaagcgtttccagcaggagaatgaagaattgaaagctcggatggacaagcacatggcaatctcaaggcagctttccacggagcaggctgttctgcaagagtcgctggagaaggagtcgaaagtcaacaagcgactctctatggaaaacgaggagcttctgtggaaactgcacaatggggacctgtgtagccccaagagatcccccacatcctccgccatccctttgcagtcaccaaggaattcgggctccttccctagccccagcatttcacccagatgacacctccccaaagtccacagactctctgaaagcattttgatgcaggtctgcaggactgaccccaaggaggaacgtgggcacaagaggtatatcagcacacgtgtgatcaccgtagggtaactggagcgtcaccaccggcggaatcgcagcttctgagactggaactctggaggaagacttttgcctccgtccaaaagattcctccaaaaaaagatttaaaaaaagatttcggcatcgacacggacgttgttgcacaaagcacttaaagaacgagagcatcttgttcattgcctttttcacctaagcatagggggaaaaactctcagggccctattaagatttataacctttgtaatgttcttcaccacagacaccttcttgtgagttttcagtctgactgtgggggtggggggtgtgaatgaaatggatgtcacagagtgtcatgtgtctgatgcagcctcctctgctgtgtattaaatgtcaaaatctgaatatatctggatatgtactaatcaaataataatcaatcaatcagcatatacatttcagccaaagccatagaagaaaaagcaatagttgcttgaattatgatcatctaccaccaactctgctcagccctgtaacagggtagggagagggtataacaggaagagctttgacttgtccctgtctatacattctctgtatcttttgggggtaacttcttggcagtttttcagtgttcagccatgtcagttgaaactagatttttctgtagattttttacttacccatgtgagcctaacactatcctgtaattcattttctcaggctatgtgtaaatgtagaaccctaatttttctataaaaaaacaaactaactaactaactgtgtaaagaaagaaaaagggaagtaccaatgggtttttccaccttatttttacctttgatctacccttgcagatttaacctgtcttcttccctcccattattctcattttccttttacctttctccaccatccagagccacaaaagcaaaccttctacctcctacctacttttctctgggacaaggataaaggaatatgattttccagagccccagagccagctcatcttccaggtgctgaaaccactttccaaataaactaaagcctggatttgatattacaaattttgggaaatcttagaataaagaacgagaacaaggaagtcattggctagtataattaagaaaggtaggattcagtgcttaccgatgatgcagtacttgatagaagaaaacagtctgggaggatagcgctcatttttcagttaccctttaaggagtccctttgtctttgggaaagtagcagaatggtccgcttctttcccatgagtggaaaatgtggcttgtccaactctcctccaggttgcatttcagtttctttccaaaacttattacctcccctaatcctgagactttggaaaaggtggaaggaagaactgttgctttatctccccctccctgcatgtgtcaacattgtgatgtcagtatttactaatctacattcagtggctgtacaaataacagctgtagtaagaagagattcaggatgctagaggtgaatatttgggtcatttacatgtacactacatagcaagttgatactcatgttgcatgttcttttaaattagtgattttgtgtcttaagtctttaacttccaatacttcatcatgtatgtaaccttccatgtttgcttctgataaatggaaatgtaggttcactgccacttcatgagatatctctgctcacgcttccaagttgttctcaatgacattagccaaagttgggtttgccattcatcccctaggcatggtaaatcttgtgttgttccctgctgtcctccgtattacgtgaccggcaaataaatctcatagcagttaatataaaacatctttggaggatgggagagaacaggagggaagatgggaaacaaaatagagaattcttaagattttgtttaaaccaaatgtttcatgtagaatgcaaaatgttggcacgtcaaaaatatgaatgtgtagacaactgtagttgtgctcagtttgtagtgatgggaagtgtattttactctgatcaaataaataatgctggaatactcaagaattgca

SEQ ID NO: 18205 - protein, 1270 aa, Homo sapiens; identical to SEQ ID NO: 2188

SEQ ID NO: 18206 - DNA, 1484 bp, Homo sapiens
agcacttaaagaacgagagcatcttgttcattgcctttttcacctaagcatagggggaaaaactctcagggccctattaagatttataacctttgtaatgttcttcaccacagacaccttcttgtgagttttcagtctgactgtgggggtggggggtgtgaatgaaatggatgtcacagagtgtcatgtgtctgatgcagcctcctctgctgtgtattaaatgtcaaaatctgaatatatctggatatgtactaatcaaataataatcaatcaatcagcatatacatttcagccaaagccatagaagaaaaagcaatagttgcttgaattatgatcatctaccaccaactctgctcagccctgtaacagggtagggagagggtataacaggaagagctttgacttgtccctgtctatacattctctgtatcttttgggggtaacttcttggcagtttttcagtgttcagccatgtcagttgaaactagatttttctgtagattttttacttacccatgtgagcctaacactatcctgtaattcattttctcaggctatgtgtaaatgtagaaccctaatttttctataaaaaaacaaactaactaactaactgtgtaaagaaagaaaaagggaagtaccaatgggtttttccaccttatttttacctttgatctacccttgcagatttaacctgtcttcttccctcccattattctcattttccttttacctttctccaccatccagagccacaaaagcaaaccttctacctcctacctacttttctctgggacaaggataaaggaatatgattttccagagccccagagccagctcatcttccaggtgctgaaaccactttccaaataaactaaagcctggatttgatattacaaattttgggaaatcttagaataaagaacgagaacaaggaagtcattggctagtataattaagaaaggtaggattcagtgcttaccgatgatgcagtacttgatagaagaaaacagtctgggaggatagcgctcatttttcagttaccctttaaggagtccctttgtctttgggaaagtagcagaatggtccgcttctttcccatgagtggaaaatgtggcttgtccaactctcctccaggttgcatttcagtttctttccaaaacttattacctcccctaatcctgagactttggaaaaggtggaaggaagaactgttgctttatctccccctccgtattacgtgaccggcaaataaatctcatagcagttaatataaaacatctttggaggatgggagagaacaggagggaagatgggaaacaaaatagagaattcttaagattttgtttaaaccaaatgtttcatgtagaatgcaaaatgttggcacgtcaaaaatatgaatgtgtagacaactgtagttgtgctcagtttgtagtgatgggaagtgtattttactctgatcaaataaataatgctggaatactcaa

SEQ ID NO: 18207 - protein, 53 aa, Homo sapiens
MVRFFPMSGKCGLSNSPPGCISVSFQNLLPPLILRLWKRWKEELLLYLPLRIT

SEQ ID NO: 18208 - DNA, 449 bp, Homo sapiens
agtcactgcttcaaccacctgtgagaaattagaaaaagccaggaatgagttacaaacagtgtatgaagcattcgtccagcagcaccaggctgaaaaaacagaacgagagaatcggcttaaagagttttacaccagggagtatgaaaagcttcgggacacttacattgaagaagcagagaagtacaaaatgcaattgcaagagcagtttgacaacttaaatgctgcgcatgaaacctctaagttggaaattgaagctagccactcagagaaacttgaattgctaaagaaggcctatgaagcctccctttcagaaattaagaaaggccatgaaatagaaaagaaatcgcttgaagatttactttctgagaagcaggaatcgctagagaagcaaatcaatgatctgaagagtgaaaatgatgctttaaatgaaaaattgaaatcagaagaac

SEQ ID NO: 18209 - protein, 86 aa, Homo sapiens
MQLQEQFDNLNAAHETSKLEIEASHSEKLELLKKAYEASLSEIKKGHEIEKKSLEDLLSEKQESLEKQINDLKSENDALNEKLKSE

SEQ ID NO: 18210 - DNA, 1187 bp, Homo sapiens
ctttaccatctcggatgaaaaccataacaactccacaagcatgcacagtgtgatgtggttcagaggcagcttctagacctgcaggagggagattgtattcagaggaagagcatcattttggcaacatctgaaagtgaaaacggaagccagaaacacttggccagccctgggggatttttttcttctatgcctctctggtggaatgacatttgctgtgtaggcatctttcctctgactgtatttcttggccttgaagagtactgagtttaaaaagacagtatgtgacagtccatggaaattgcctcttctgtgaaatctcgccacctgctccgaagacatgttgttgtctcccaaattctccttatccaccattcacatacgactgacggccaaaggattgcttcgaaaccttcgacttccttcagggtttaggagaagcactgttgttttccacacagttgaaaagagcaggcaaaagaatcctcgaagcttatgtatccagccacagacagctcccgatgcgctgccccctgagaaaacacttgaattgacgcaatataaaacaaaatgtgaaaaccaaagtggatttatcctgcagctcaagcagcttcttgcctgtggtaataccaagtttgaggcattgacagttgtgattcagcacctgctgtctgagcgggaggaagcactgaaacaacacaaaaccctatctcaagaacttgttaacctccggggagagctagtcactgcttcaaccacctgtgagaaattagaaaaagccaggaatgagttacaaacagtgtatgaagcattcgtccagcagcaccaggctgaaaaaacagaacgagagaatcggcttaaagagttttacaccagggagtatgaaaagcttcgggacacttacattgaagaagcagagaagtacaaaatgcaattgcaagagcagtttgacaacttaaatgctgcgcatgaaacctctaagttggaaattgaagctagccactcagagaaacttgaattgctaaagaaggcctatgaagcctccctttcagaaattaagaaaggccatgaaatagaaaagaaatcgcttgaagatttactttctgagaagcaggaatcgctagagaagcaaatcaatgatctgaagagtgaaaatgatgctttaaatgaaaaattgaaatcagaagaac

SEQ ID NO: 18211 - protein, 282 aa, Homo sapiens
MLLSPKFSLSTIHIRLTAKGLLRNLRLPSGFRRSTVVFHTVEKSRQKNPRSLCIQPQTAPDALPPEKTLELTQYKTKCENQSGFILQLKQLLACGNTKFEALTVVIQHLLSEREEALKQHKTLSQELVNLRGELVTASTTCEKLEKARNELQTVYEAFVQQHQAEKTERENRLKEFYTREYEKLRDTYIEEAEKYKMQLQEQFDNLNAAHETSKLEIEASHSEKLELLKKAYEASLSEIKKGHEIEKKSLEDLLSEKQESLEKQINDLKSENDALNEKLKSE

SEQ ID NO: 18212 - DNA, 1724 bp, Homo sapiens
atcagtgaattcaagacaacaaacagtcttgagcagaacaccgagatctgacttgaatgcagacaaaaaagcagaaattctaattaacaagacacataagcagcagtttaataaactcattactagccaggctgtgcatgttacaactcattctaaaaatgcttcacacagggttccaagaacaacatctgccgtgaaatcgaatcaggaagatgttgacaaagccagttcttctaactcagcatgcgagaccgggtccgtttctgcgttgtttcagaagatcaaaggcatactccctgttaaaatggaaagtgcagaatgtttggaaatgacctatgttcccaacattgataggattagccctgaaaagaagggtgaaaaagaaaatgggacatctatggaaaaacaagagctgaaacaagagattatgaatgagacttttgaatatggttctctgtttttgggctctgcttcaaaaacaacgaccacctcaggtaggaatatatccaagcctgactcctgcggtttgaggcaaatagctgctccaaaagccaaagtggggccccctgtttcctgtttgaggcggaacagtgacaatagaaatcccagtgctgatcgagccgtatctcctcagaggatcaggcgtgtgtccagttctggaaagcctacatccttgaaaactgcacagtcgtcatgggtgaatttgcctagaccacttcctaaatccaaagcatctttgaaaagtcctgcgctgcggaggacaggaagcaccccctcaatagccagcacccacagtgagctgagcacttacagcaacaattctggtaatgccgctgtcatcaaatatgaggagaaacctccaaaaccagcatttcagaatggttcctcaggatccttttatttgaagcctttggtatccagggctcatgttcacttgatgaaaactcctccaaaaggtccttcgagaaaaaatttatttacagctcttaatgcagttgaaaagagcaggcaaaagaatcctcgaagcttatgtatccagccacagacagctcccgatgcgctgccccctgagaaaacacttgaattgacgcaatataaaacaaaatgtgaaaaccaaagtggatttatcctgcagctcaagcagcttcttgcctgtggtaataccaagtttgaggcattgacagttgtgattcagcacctgctgtctgagcgggaggaagcactgaaacaacacaaaaccctatctcaagaacttgttaacctccggggagagctagtcactgcttcaaccacctgtgagaaattagaaaaagccaggaatgagttacaaacagtgtatgaagcattcgtccagcagcaccaggctgaaaaaacagaacgagagaatcggcttaaagagttttacaccagggagtatgaaaagcttcgggacacttacattgaagaagcagagaagtacaaaatgcaattgcaagagcagtttgacaacttaaatgctgcgcatgaaacctctaagttggaaattgaagctagccactcagagaaacttgaattgctaaagaaggcctatgaagcctccctttcagaaattaagaaaggccatgaaatagaaaagaaatcgcttgaagatttactttctgagaagcaggaatcgctagagaagcaaatcaatgatctgaagagtgaaaatgatgctttaaatgaaaaattgaaatcagaagaac

SEQ ID NO: 18213 - protein, 472 aa, Homo sapiens
MESAECLEMTYVPNIDRISPEKKGEKENGTSMEKQELKQEIMNETFEYGSLFLGSASKTTTTSGRNISKPDSCGLRQIAAPKAKVGPPVSCLRRNSDNRNPSADRAVSPQRIRRVSSSGKPTSLKTAQSSWVNLPRPLPKSKASLKSPALRRTGSTPSIASTHSELSTYSNNSGNAAVIKYEEKPPKPAFQNGSSGSFYLKPLVSRAHVHLMKTPPKGPSRKNLFTALNAVEKSRQKNPRSLCIQPQTAPDALPPEKTLELTQYKTKCENQSGFILQLKQLLACGNTKFEALTVVIQHLLSEREEALKQHKTLSQELVNLRGELVTASTTCEKLEKARNELQTVYEAFVQQHQAEKTERENRLKEFYTREYEKLRDTYIEEAEKYKMQLQEQFDNLNAAHETSKLEIEASHSEKLELLKKAYEASLSEIKKGHEIEKKSLEDLLSEKQESLEKQINDLKSENDALNEKLKSE

SEQ ID NO: 18214 - DNA, 1049 bp, Homo sapiens
ctttaccatctcggatgaaaaccataacaactccacaagcatgcacagtgtgatgtggttcagaggcagcttctagacctgcaggagggagattgtattcagaggaagagcatcattttggcaacatctgaaagtgaaaacggaagccagaaacacttggccagccctgggggatttttttcttctatgcctctctggtggaatgacatttgctgtgtaggcatctttcctctgactgtatttcttggccttgaagagtactgagtttaaaaagacagtatgtgacagtccatggaaattgcctcttctgtgaaatctcgccacctgctccgaagacatgttgttgtctcccaaattctccttatccaccattcacatacgactgacggccaaaggattgcttcgaaaccttcgacttccttcagggtttaggagaagcactgttgttttccacacagttgaaaagagcaggcaaaagaatcctcgaagcttatgtatccagccacagacagctcccgatgcgctgccccctgagaaaacacttgaattgacgcaatataaaacaaaatgtgaaaaccaaagtggatttatcctgcagctcaagcagcttcttgcctgtggtaataccaagtttgaggcattgacagttgtgattcagcacctgctgtctgagcgggaggaagcactgaaacaacacaaaaccctatctcaagaacttgttaacctccggggagagctagtcactgcttcaaccacctgtgagaaattagaaaaagccaggaatgagttacaaacagtgtatgaagcattcgtccagcagcaccaggctgaaaaaacagaacgagagaatcggcttaaagagttttacaccagggagtatgaaaagcttcgggacacttacattgaagaagcagagaagtacaaaatgcaattgcaagagcagtttgacaacttaaatgctgcgcatgaaacctctaagttggaaattgaagctagccactcagagaaacttgaattgctaaagaaggcctatgaagcctccctttcag

SEQ ID NO: 18215 - protein, 236 aa, Homo sapiens
MLLSPKFSLSTIHIRLTAKGLLRNLRLPSGFRRSTVVFHTVEKSRQKNPRSLCIQPQTAPDALPPEKTLELTQYKTKCENQSGFILQLKQLLACGNTKFEALTVVIQHLLSEREEALKQHKTLSQELVNLRGELVTASTTCEKLEKARNELQTVYEAFVQQHQAEKTERENRLKEFYTREYEKLRDTYIEEAEKYKMQLQEQFDNLNAAHETSKLEIEASHSEKLELLKKAYEASL

SEQ ID NO: 18216 - DNA, 735 bp, Homo sapiens
ggacatcacggacctaccaatatgatgtcacccctggaggcccagctgtaaaattcctctctttgtactctttctctttatttctcagaccggccaacacttacaggaaacaaaaataacctacattgaaatattgggggcgacagaccatgggaatgcaagtatctcttcaacatcctgatttcaattattttgaagaaaccctggcagcctcggcatcacctcatcagcaggtttgcaacttgcaaccacttcccagcacttggcaaaagaaggcaagaaagccgccctgttctcctgtgatgtctttactaagtaactgcggaaggaccagtgcattttctaccttccaaggcagacactctggcacctgagagtgatgatcttgtgtaaaccaatcagggtactggataaatacagctctgatgcctctggtatgccagtggctttagtgtatggtagaaccaaggtaataatagtattctgtggtatgtgtgacatcttccttatcagcagtaagccaagattttttttagagtcaatatcaactacaatcttgcagcgtcataacgtttaaataaattacaacagttagaccccaagaggttggttcttgactttaagcagtctttcctgcttgctttagagatttaaaataattcaacttcctggaaaagaaccctaaaaataagcccctagaattataaaaacaatgtaaaagatcgccatcattac

SEQ ID NO: 18217 - protein, 74 aa, Homo sapiens
MGMQVSLQHPDFNYFEETLAASASPHQQVCNLQPLPSTWQKKARKPPCSPVMSLLSNCGRTSAFSTFQGRHSGT

SEQ ID NO: 18218 - DNA, 654 bp, Homo sapiens
attcgaattcactaagagcaagcatgagggatatgagagtgaacatggctgcagtttttcctgcttaagcttgctttgatccttttaaatgactgtaccaggaggatttcgcagttgtacagaaactgatatttcttcaaaaatctttatcaattctacactcaccccaccggctggttcagagaggcactatgatgctaccttattgacactgctggtcgtgggatcgtacagcctttgtataattcctttgttagccacgtttactgggaaaaaaactggtaatgccgctgtcatcaaatatgaggagaaacctccaaaaccagcatttcagaatggttcctcaggatccttttatttgaagcctttggtatccagggctcatgttcacttgatgaaaactcctccaaaaggtccttcgagaaaaaatttatttacagctcttaatgcagagatggggtttcaccgtgttagccaggatggtctcgatcttctgacctcgtgatccgcccgcctcggcctccgaaagtgctgggattacaggcgtgagtcactgcgcccagctatctcagaattcgtaaccttttgtaggctcttaaagctaggaagacagccatgcagaatgatctaagttctaaagatccccaggatgct

SEQ ID NO: 18219 - protein, 138 aa, Homo sapiens
MTVPGGFRSCTETDISSKIFINSTLTPPAGSERHYDATLLTLLVVGSYSLCIIPLLATFTGKKTGNAAVIKYEEKPPKPAFQNGSSGSFYLKPLVSRAHVHLMKTPPKGPSRKNLFTALNAEMGFHRVSQDGLDLLTS

SEQ ID NO: 18220 - DNA, 1573 bp, Homo sapiens
gctcaaataaagcctaggccaaactgcacaaatcagattgacccagtcgacaggatctgaacttccagtgaccatcccaggaacagaaagcaactgtgttaccagttctgcttttcctggacctgttccaagctctcacgttccacatcacacatgggacatctagtgtcaggctcccagagagcaggaaccaggtgaaatataagagcacagtcctcccagccggtggcatggggataatcggacaatacaactctccacccttttttatgaattcaagccaggaagaagcagcaatctgtcttctggattaaaactgaagatcaacctactttcaacttactaagaaaggggatcatggacattgaagcatatcttgaaagaattggctataagaagtctaggaacaaattggacttggaaacattaactgacattcttcaacaccagatccgagctgttccctttgagaaccttaacatccattgtggggatgccatggacttaggcttagaggccatttttgatcaagttgtgagaagaaatcggggtggatggtgtctccaggtcaatcatcttctgtactgggctctgaccactattggttttgagaccacgatgttgggagggtatgtttacagcactccagccaaaaaatacagcactggcatgattcaccttctcctgcaggtgaccattgatggcaggaactacattgtcgatgctgggtttggacgctcataccagatgtggcagcctctggagttaatttctgggaaggatcagcctcaggtgccttgtgtcttccgtttgacggaagagaatggattctggtatctagaccaaatcagaagggaacagtacattccaaatgaagaatttcttcattctgatctcctagaagacagcaaataccgaaaaatctactcctttactcttaagcctcgaacaattgaagattttgagtctatgaatacatacctgcagacatctccatcatctgtgtttactagtaaatcattttgttccttgcagaccccagatggggttcactgtttggtgggcttcaccctcacccataggagattcaattataaggacaatacagatctaatagagttcaagactctgagtgaggaagaaatagaaaaagtgctgaaaaatatatttaatatttccttgcagagaaagcttgtgcccaaacatggtgatagattttttactatttagaataaggagtaaaacaatcttgtctatttgtcatccagctcaccagttatcaactgacgacctatcatgtatcttctgtacccttaccttattttgaagaaaatcctagacatcaaatcatttcacctataaaaatgtcatcatatataattaaacagctttttaaagaaacataaccacaaaccttttcaaataataataataataataataaaaaatgtattttaaagatggcctgtggttatcttggaaattggtgatttatgctagaaagcttttaatgttggtttattgttgaattcctagaaaagttttattggtagatgagtaaataaaatattgt

SEQ ID NO: 18221 - protein, 290 aa, Homo sapiens; identical to SEQ ID NO: 2198

SEQ ID NO: 18222 - DNA, 1622 bp, Homo sapiens
gctcaaataaagcctaggccaaactgcacaaatcagattgacccagtcgacaggatctgaacttccagtgaccatcccaggaacagaaagcaactgtgttaccagttctgcttttcctggacctgttccaagctctcacgttccacatcacacatgggacatctagtgtcaggctcccagagagcaggaaccaggtgaaatataagagcacagtcctcccagccggtggcatggggataatcggacaatacaactctccacccttttttatgaattcaagccaggaagaagcagcaatctgtcttctggattaaaactgaagatcaacctactttcaacttactaagaaaggggatcatggacattgaagcatatcttgaaagaattggctataagaagtctaggaacaaattggacttggaaacattaactgacattcttcaacaccagatccgagctgttccctttgagaaccttaacatccattgtggggatgccatggacttaggcttagaggccatttttgatcaagttgtgagaagaaatcggggtggatggtgtctccaggtcaatcatcttctgtactgggctctgaccactattggttttgagaccacgatgttgggagggtatgtttacagcactccagccaaaaaatacagcactggcatgattcaccttctcctgcaggtgaccattgatggcaggaactacattgtcgatgctgggtttggacgctcataccagatgtggcagcctctggagttaatttctgggaaggatcagcctcaggtgccttgtgtcttccgtttgacggaagagaatggattctggtatctagaccaaatcagaagggaacagtacattccaaatgaagaatttcttcattctgatctcctagaagacagcaaataccgaaaaatctactcctttactcttaagcctcgaacaattgaagattttgagtctatgaatacatacctgcagacatctccatcatctgtgtttactagtaaatcattttgttccttgcagaccccagatggggttcactgtttggtgggcttcaccctcacccataggagattcaattataaggacaatacagatctaatagagttcaagactctgagtgaggaagaaatagaaaaagtgctgaaaaatatatttaatatttccttgcagagaaagcttgtgcccaaacatggtgatagattttttactatttagaataaggagtaaaacaatcttgtctatttgtcatccagctcaccagttatcaactgacgacctatcatgtatcttctgtacccttaccttattttgaagaaaatcctagacatcaaatcatttcacctataaaaatgtcatcatatataattaaacagctttttaaagaaacataaccacaaaccttttcaaataataataataataataataaaaaatgtattttaaagatggcctgtggttatcttggaaattggtgatttatgctagaaagcttttaatgttggtttattgttgaattcctagaaaagttttattggtagatgagtaaataaaatattgtaaaaaaacttattgtctataaagtatattaaaacattgttggctaatat

SEQ ID NO: 18223 - protein, 290 aa, Homo sapiens; identical to SEQ ID NO: 2198

SEQ ID NO: 18224 - DNA, 1998 bp, Homo sapiens
gctcaaataaagcctaggccaaactgcacaaatcagattgacccagtcgacaggatctgaacttccagtgaccatcccaggaacagaaagcaactgtgttaccagttctgcttttcctggacctgttccaagctctcacgttccacatcacacatgggacatctagtgtcaggctcccagagagcaggaaccaggtgaaatataagagcacagtcctcccagccggtggcatggggataatcggacaatacaactctccacccttttttatgaattcaagccaggaagaagcagcaatctgtcttctggattaaaactgaagatcaacctactttcaacttactaagaaaggggatcatggacattgaagcatatcttgaaagaattggctataagaagtctaggaacaaattggacttggaaacattaactgacattcttcaacaccagatccgagctgttccctttgagaaccttaacatccattgtggggatgccatggacttaggcttagaggccatttttgatcaagttgtgagaagaaatcggggtggatggtgtctccaggtcaatcatcttctgtactgggctctgaccactattggttttgagaccacgatgttgggagggtatgtttacagcactccagccaaaaaatacagcactggcatgattcaccttctcctgcaggtgaccattgatggcaggaactacattgtcgatgctgggtttggacgctcataccagatgtggcagcctctggagttaatttctgggaaggatcagcctcaggtgccttgtgtcttccgtttgacggaagagaatggattctggtatctagaccaaatcagaagggaacagtacattccaaatgaagaatttcttcattctgatctcctagaagacagcaaataccgaaaaatctactcctttactcttaagcctcgaacaattgaagattttgagtctatgaatacatacctgcagacatctccatcatctgtgtttactagtaaatcattttgttccttgcagaccccagatggggttcactgtttggtgggcttcaccctcacccataggagattcaattataaggacaatacagatctaatagagttcaagactctgagtgaggaagaaatagaaaaagtgctgaaaaatatatttaatatttccttgcagagaaagcttgtgcccaaacatggtgatagattttttactatttagaataaggagtaaaacaatcttgtctatttgtcatccagctcaccagttatcaactgacgacctatcatgtatcttctgtacccttaccttattttgaagaaaatcctagacatcaaatcatttcacctataaaaatgtcatcatatataattaaacagctttttaaagaaacataaccacaaaccttttcaaataataataataataataataaaaaatgtattttaaagatggcctgtggttatcttggaaattggtgatttatgctagaaagcttttaatgttggtttattgttgaattcctagaaaagttttattggtagatgagtaaataaaatattgtaaaaaaacttattgtctataaagtatattaaaacattgttggctaatataatttgaaaaaaagtggttttttggaagacttaggatattatggtgctacataatttttcctcgatgctctcttcctctcatctttcttgtctcttaaattgctttacttccttgcacactttgccatacaagaatgaacatgagcttttcttgtgtagatctgagttgaaatcctgtggacactgggcgaattactttttagatctgtagctctgactcctcaggcataaaatgggaataatgcttttacagtttagtggcggaactaaactcccaaaattatttgttatatggatcaagtaataacgtcagtaatgtttttggtacaaagtcattatttaataaaagttattgttccatcttgcttgccccccc

SEQ ID NO: 18225 - protein, 290 aa, Homo sapiens; identical to SEQ ID NO: 2198

SEQ ID NO: 18226 - DNA, 1658 bp, Homo sapiens
cagattgacccagtcgacaggatctgaacttccagtgaccatcccaggaacagaaagcaactgtgttaccagttctgcttttcctggacctgttccaagctctcacgttccacatcacacatgggacatctagtgtcaggctcccagagagcaggaaccaggtgaaatataagagcacagtcctcccagccggtggcatggggataatcggacaatacaactctccacccttttttatgacgtgtacagaagggccatgctgttattactcttacacaaggaggcagccctcgagccacagggtccagctgttggctataatagcctaccggtctctgatgatcaccatgtttctggaattcaagccaggaagaagcagcaatctgtcttctggattaaaactgaagatcaacctactttcaacttactaagaaaggggatcatggacattgaagcatatcttgaaagaattggctataagaagtctaggaacaaattggacttggaaacattaactgacattcttcaacaccagatccgagctgttccctttgagaaccttaacatccattgtggggatgccatggacttaggcttagaggccatttttgatcaagttgtgagaagaaatcggggtggatggtgtctccaggtcaatcatcttctgtactgggctctgaccactattggttttgagaccacgatgttgggagggtatgtttacagcactccagccaaaaaatacagcactggcatgattcaccttctcctgcaggtgaccattgatggcaggaactacattgtcgatgctgggtttggacgctcataccagatgtggcagcctctggagttaatttctgggaaggatcagcctcaggtgccttgtgtcttccgtttgacggaagagaatggattctggtatctagaccaaatcagaagggaacagtacattccaaatgaagaatttcttcattctgatctcctagaagacagcaaataccgaaaaatctactcctttactcttaagcctcgaacaattgaagattttgagtctatgaatacatacctgcagacatctccatcatctgtgtttactagtaaatcattttgttccttgcagaccccagatggggttcactgtttggtgggcttcaccctcacccataggagattcaattataaggacaatacagatctaatagagttcaagactctgagtgaggaagaaatagaaaaagtgctgaaaaatatatttaatatttccttgcagagaaagcttgtgcccaaacatggtgatagattttttactatttagaataaggagtaaaacaatcttgtctatttgtcatccagctcaccagttatcaactgacgacctatcatgtatcttctgtacccttaccttattttgaagaaaatcctagacatcaaatcatttcacctataaaaatgtcatcatatataattaaacagctttttaaagaaacataaccacaaaccttttcaaataataataataataataataaaaaatgtattttaaagatggcctgtggttatcttggaaattggtgatttatgctagaaagcttttaatgttggtttattgttgaattcctagaaaagttttattggtagatgagtaaataaaatattgt

SEQ ID NO: 18227 - protein, 352 aa, Homo sapiens
MLLLLLHKEAALEPQGPAVGYNSLPVSDDHHVSGIQARKKQQSVFWIKTEDQPTFNLLRKGIMDIEAYLERIGYKKSRNKLDLETLTDILQHQIRAVPFENLNIHCGDAMDLGLEAIFDQVVRRNRGGWCLQVNHLLYWALTTIGFETTMLGGYVYSTPAKKYSTGMIHLLLQVTIDGRNYIVDAGFGRSYQMWQPLELISGKDQPQVPCVFRLTEENGFWYLDQIRREQYIPNEEFLHSDLLEDSKYRKIYSFTLKPRTIEDFESMNTYLQTSPSSVFTSKSFCSLQTPDGVHCLVGFTLTHRRFNYKDNTDLIEFKTLSEEEIEKVLKNIFNISLQRKLVPKHGDRFFTI

SEQ ID NO: 18228 - DNA, 1707 bp, Homo sapiens
cagattgacccagtcgacaggatctgaacttccagtgaccatcccaggaacagaaagcaactgtgttaccagttctgcttttcctggacctgttccaagctctcacgttccacatcacacatgggacatctagtgtcaggctcccagagagcaggaaccaggtgaaatataagagcacagtcctcccagccggtggcatggggataatcggacaatacaactctccacccttttttatgacgtgtacagaagggccatgctgttattactcttacacaaggaggcagccctcgagccacagggtccagctgttggctataatagcctaccggtctctgatgatcaccatgtttctggaattcaagccaggaagaagcagcaatctgtcttctggattaaaactgaagatcaacctactttcaacttactaagaaaggggatcatggacattgaagcatatcttgaaagaattggctataagaagtctaggaacaaattggacttggaaacattaactgacattcttcaacaccagatccgagctgttccctttgagaaccttaacatccattgtggggatgccatggacttaggcttagaggccatttttgatcaagttgtgagaagaaatcggggtggatggtgtctccaggtcaatcatcttctgtactgggctctgaccactattggttttgagaccacgatgttgggagggtatgtttacagcactccagccaaaaaatacagcactggcatgattcaccttctcctgcaggtgaccattgatggcaggaactacattgtcgatgctgggtttggacgctcataccagatgtggcagcctctggagttaatttctgggaaggatcagcctcaggtgccttgtgtcttccgtttgacggaagagaatggattctggtatctagaccaaatcagaagggaacagtacattccaaatgaagaatttcttcattctgatctcctagaagacagcaaataccgaaaaatctactcctttactcttaagcctcgaacaattgaagattttgagtctatgaatacatacctgcagacatctccatcatctgtgtttactagtaaatcattttgttccttgcagaccccagatggggttcactgtttggtgggcttcaccctcacccataggagattcaattataaggacaatacagatctaatagagttcaagactctgagtgaggaagaaatagaaaaagtgctgaaaaatatatttaatatttccttgcagagaaagcttgtgcccaaacatggtgatagattttttactatttagaataaggagtaaaacaatcttgtctatttgtcatccagctcaccagttatcaactgacgacctatcatgtatcttctgtacccttaccttattttgaagaaaatcctagacatcaaatcatttcacctataaaaatgtcatcatatataattaaacagctttttaaagaaacataaccacaaaccttttcaaataataataataataataataaaaaatgtattttaaagatggcctgtggttatcttggaaattggtgatttatgctagaaagcttttaatgttggtttattgttgaattcctagaaaagttttattggtagatgagtaaataaaatattgtaaaaaaacttattgtctataaagtatattaaaacattgttggctaatat

SEQ ID NO: 18229 - protein, 352 aa, Homo sapiens; identical to SEQ ID NO: 18227

SEQ ID NO: 18230 - DNA, 2083 bp, Homo sapiens
cagattgacccagtcgacaggatctgaacttccagtgaccatcccaggaacagaaagcaactgtgttaccagttctgcttttcctggacctgttccaagctctcacgttccacatcacacatgggacatctagtgtcaggctcccagagagcaggaaccaggtgaaatataagagcacagtcctcccagccggtggcatggggataatcggacaatacaactctccacccttttttatgacgtgtacagaagggccatgctgttattactcttacacaaggaggcagccctcgagccacagggtccagctgttggctataatagcctaccggtctctgatgatcaccatgtttctggaattcaagccaggaagaagcagcaatctgtcttctggattaaaactgaagatcaacctactttcaacttactaagaaaggggatcatggacattgaagcatatcttgaaagaattggctataagaagtctaggaacaaattggacttggaaacattaactgacattcttcaacaccagatccgagctgttccctttgagaaccttaacatccattgtggggatgccatggacttaggcttagaggccatttttgatcaagttgtgagaagaaatcggggtggatggtgtctccaggtcaatcatcttctgtactgggctctgaccactattggttttgagaccacgatgttgggagggtatgtttacagcactccagccaaaaaatacagcactggcatgattcaccttctcctgcaggtgaccattgatggcaggaactacattgtcgatgctgggtttggacgctcataccagatgtggcagcctctggagttaatttctgggaaggatcagcctcaggtgccttgtgtcttccgtttgacggaagagaatggattctggtatctagaccaaatcagaagggaacagtacattccaaatgaagaatttcttcattctgatctcctagaagacagcaaataccgaaaaatctactcctttactcttaagcctcgaacaattgaagattttgagtctatgaatacatacctgcagacatctccatcatctgtgtttactagtaaatcattttgttccttgcagaccccagatggggttcactgtttggtgggcttcaccctcacccataggagattcaattataaggacaatacagatctaatagagttcaagactctgagtgaggaagaaatagaaaaagtgctgaaaaatatatttaatatttccttgcagagaaagcttgtgcccaaacatggtgatagattttttactatttagaataaggagtaaaacaatcttgtctatttgtcatccagctcaccagttatcaactgacgacctatcatgtatcttctgtacccttaccttattttgaagaaaatcctagacatcaaatcatttcacctataaaaatgtcatcatatataattaaacagctttttaaagaaacataaccacaaaccttttcaaataataataataataataataaaaaatgtattttaaagatggcctgtggttatcttggaaattggtgatttatgctagaaagcttttaatgttggtttattgttgaattcctagaaaagttttattggtagatgagtaaataaaatattgtaaaaaaacttattgtctataaagtatattaaaacattgttggctaatataatttgaaaaaaagtggttttttggaagacttaggatattatggtgctacataatttttcctcgatgctctcttcctctcatctttcttgtctcttaaattgctttacttccttgcacactttgccatacaagaatgaacatgagcttttcttgtgtagatctgagttgaaatcctgtggacactgggcgaattactttttagatctgtagctctgactcctcaggcataaaatgggaataatgcttttacagtttagtggcggaactaaactcccaaaattatttgttatatggatcaagtaataacgtcagtaatgtttttggtacaaagtcattatttaataaaagttattgttccatcttgcttgccccccc

SEQ ID NO: 18231 - protein, 352 aa, Homo sapiens; identical to SEQ ID NO: 18227

SEQ ID NO: 18232 - DNA, 1389 bp, Homo sapiens
ctttggaagtgagagcacttcctcatagaccttggatgtgggaggattgcattcagtctagttcctggttgccggctgaaataacctgaattcaagccaggaagaagcagcaatctgtcttctggattaaaactgaagatcaacctactttcaacttactaagaaaggggatcatggacattgaagcatatcttgaaagaattggctataagaagtctaggaacaaattggacttggaaacattaactgacattcttcaacaccagatccgagctgttccctttgagaaccttaacatccattgtggggatgccatggacttaggcttagaggccatttttgatcaagttgtgagaagaaatcggggtggatggtgtctccaggtcaatcatcttctgtactgggctctgaccactattggttttgagaccacgatgttgggagggtatgtttacagcactccagccaaaaaatacagcactggcatgattcaccttctcctgcaggtgaccattgatggcaggaactacattgtcgatgctgggtttggacgctcataccagatgtggcagcctctggagttaatttctgggaaggatcagcctcaggtgccttgtgtcttccgtttgacggaagagaatggattctggtatctagaccaaatcagaagggaacagtacattccaaatgaagaatttcttcattctgatctcctagaagacagcaaataccgaaaaatctactcctttactcttaagcctcgaacaattgaagattttgagtctatgaatacatacctgcagacatctccatcatctgtgtttactagtaaatcattttgttccttgcagaccccagatggggttcactgtttggtgggcttcaccctcacccataggagattcaattataaggacaatacagatctaatagagttcaagactctgagtgaggaagaaatagaaaaagtgctgaaaaatatatttaatatttccttgcagagaaagcttgtgcccaaacatggtgatagattttttactatttagaataaggagtaaaacaatcttgtctatttgtcatccagctcaccagttatcaactgacgacctatcatgtatcttctgtacccttaccttattttgaagaaaatcctagacatcaaatcatttcacctataaaaatgtcatcatatataattaaacagctttttaaagaaacataaccacaaaccttttcaaataataataataataataataaaaaatgtattttaaagatggcctgtggttatcttggaaattggtgatttatgctagaaagcttttaatgttggtttattgttgaattcctagaaaagttttattggtagatgagtaaataaaatattgt

SEQ ID NO: 18233 - protein, 290 aa, Homo sapiens; identical to SEQ ID NO: 2198

SEQ ID NO: 18234 - DNA, 1438 bp, Homo sapiens
ctttggaagtgagagcacttcctcatagaccttggatgtgggaggattgcattcagtctagttcctggttgccggctgaaataacctgaattcaagccaggaagaagcagcaatctgtcttctggattaaaactgaagatcaacctactttcaacttactaagaaaggggatcatggacattgaagcatatcttgaaagaattggctataagaagtctaggaacaaattggacttggaaacattaactgacattcttcaacaccagatccgagctgttccctttgagaaccttaacatccattgtggggatgccatggacttaggcttagaggccatttttgatcaagttgtgagaagaaatcggggtggatggtgtctccaggtcaatcatcttctgtactgggctctgaccactattggttttgagaccacgatgttgggagggtatgtttacagcactccagccaaaaaatacagcactggcatgattcaccttctcctgcaggtgaccattgatggcaggaactacattgtcgatgctgggtttggacgctcataccagatgtggcagcctctggagttaatttctgggaaggatcagcctcaggtgccttgtgtcttccgtttgacggaagagaatggattctggtatctagaccaaatcagaagggaacagtacattccaaatgaagaatttcttcattctgatctcctagaagacagcaaataccgaaaaatctactcctttactcttaagcctcgaacaattgaagattttgagtctatgaatacatacctgcagacatctccatcatctgtgtttactagtaaatcattttgttccttgcagaccccagatggggttcactgtttggtgggcttcaccctcacccataggagattcaattataaggacaatacagatctaatagagttcaagactctgagtgaggaagaaatagaaaaagtgctgaaaaatatatttaatatttccttgcagagaaagcttgtgcccaaacatggtgatagattttttactatttagaataaggagtaaaacaatcttgtctatttgtcatccagctcaccagttatcaactgacgacctatcatgtatcttctgtacccttaccttattttgaagaaaatcctagacatcaaatcatttcacctataaaaatgtcatcatatataattaaacagctttttaaagaaacataaccacaaaccttttcaaataataataataataataataaaaaatgtattttaaagatggcctgtggttatcttggaaattggtgatttatgctagaaagcttttaatgttggtttattgttgaattcctagaaaagttttattggtagatgagtaaataaaatattgtaaaaaaacttattgtctataaagtatattaaaacattgttggctaatat

SEQ ID NO: 18235 - protein, 290 aa, Homo sapiens; identical to SEQ ID NO: 2198

SEQ ID NO: 18236 - DNA, 1814 bp, Homo sapiens
ctttggaagtgagagcacttcctcatagaccttggatgtgggaggattgcattcagtctagttcctggttgccggctgaaataacctgaattcaagccaggaagaagcagcaatctgtcttctggattaaaactgaagatcaacctactttcaacttactaagaaaggggatcatggacattgaagcatatcttgaaagaattggctataagaagtctaggaacaaattggacttggaaacattaactgacattcttcaacaccagatccgagctgttccctttgagaaccttaacatccattgtggggatgccatggacttaggcttagaggccatttttgatcaagttgtgagaagaaatcggggtggatggtgtctccaggtcaatcatcttctgtactgggctctgaccactattggttttgagaccacgatgttgggagggtatgtttacagcactccagccaaaaaatacagcactggcatgattcaccttctcctgcaggtgaccattgatggcaggaactacattgtcgatgctgggtttggacgctcataccagatgtggcagcctctggagttaatttctgggaaggatcagcctcaggtgccttgtgtcttccgtttgacggaagagaatggattctggtatctagaccaaatcagaagggaacagtacattccaaatgaagaatttcttcattctgatctcctagaagacagcaaataccgaaaaatctactcctttactcttaagcctcgaacaattgaagattttgagtctatgaatacatacctgcagacatctccatcatctgtgtttactagtaaatcattttgttccttgcagaccccagatggggttcactgtttggtgggcttcaccctcacccataggagattcaattataaggacaatacagatctaatagagttcaagactctgagtgaggaagaaatagaaaaagtgctgaaaaatatatttaatatttccttgcagagaaagcttgtgcccaaacatggtgatagattttttactatttagaataaggagtaaaacaatcttgtctatttgtcatccagctcaccagttatcaactgacgacctatcatgtatcttctgtacccttaccttattttgaagaaaatcctagacatcaaatcatttcacctataaaaatgtcatcatatataattaaacagctttttaaagaaacataaccacaaaccttttcaaataataataataataataataaaaaatgtattttaaagatggcctgtggttatcttggaaattggtgatttatgctagaaagcttttaatgttggtttattgttgaattcctagaaaagttttattggtagatgagtaaataaaatattgtaaaaaaacttattgtctataaagtatattaaaacattgttggctaatataatttgaaaaaaagtggttttttggaagacttaggatattatggtgctacataatttttcctcgatgctctcttcctctcatctttcttgtctcttaaattgctttacttccttgcacactttgccatacaagaatgaacatgagcttttcttgtgtagatctgagttgaaatcctgtggacactgggcgaattactttttagatctgtagctctgactcctcaggcataaaatgggaataatgcttttacagtttagtggcggaactaaactcccaaaattatttgttatatggatcaagtaataacgtcagtaatgtttttggtacaaagtcattatttaataaaagttattgttccatcttgcttgccccccc

SEQ ID NO: 18237 - protein, 290 aa, Homo sapiens; identical to SEQ ID NO: 2198

SEQ ID NO: 18238 - DNA, 1472 bp, Homo sapiens
atgtgggaggattgcattcagtctagttcctggttgccggctgaaataacctgacgtgtacagaagggccatgctgttattactcttacacaaggaggcagccctcgagccacagggtccagctgttggctataatagcctaccggtctctgatgatcaccatgtttctggaattcaagccaggaagaagcagcaatctgtcttctggattaaaactgaagatcaacctactttcaacttactaagaaaggggatcatggacattgaagcatatcttgaaagaattggctataagaagtctaggaacaaattggacttggaaacattaactgacattcttcaacaccagatccgagctgttccctttgagaaccttaacatccattgtggggatgccatggacttaggcttagaggccatttttgatcaagttgtgagaagaaatcggggtggatggtgtctccaggtcaatcatcttctgtactgggctctgaccactattggttttgagaccacgatgttgggagggtatgtttacagcactccagccaaaaaatacagcactggcatgattcaccttctcctgcaggtgaccattgatggcaggaactacattgtcgatgctgggtttggacgctcataccagatgtggcagcctctggagttaatttctgggaaggatcagcctcaggtgccttgtgtcttccgtttgacggaagagaatggattctggtatctagaccaaatcagaagggaacagtacattccaaatgaagaatttcttcattctgatctcctagaagacagcaaataccgaaaaatctactcctttactcttaagcctcgaacaattgaagattttgagtctatgaatacatacctgcagacatctccatcatctgtgtttactagtaaatcattttgttccttgcagaccccagatggggttcactgtttggtgggcttcaccctcacccataggagattcaattataaggacaatacagatctaatagagttcaagactctgagtgaggaagaaatagaaaaagtgctgaaaaatatatttaatatttccttgcagagaaagcttgtgcccaaacatggtgatagattttttactatttagaataaggagtaaaacaatcttgtctatttgtcatccagctcaccagttatcaactgacgacctatcatgtatcttctgtacccttaccttattttgaagaaaatcctagacatcaaatcatttcacctataaaaatgtcatcatatataattaaacagctttttaaagaaacataaccacaaaccttttcaaataataataataataataataaaaaatgtattttaaagatggcctgtggttatcttggaaattggtgatttatgctagaaagcttttaatgttggtttattgttgaattcctagaaaagttttattggtagatgagtaaataaaatattgt

SEQ ID NO: 18239 - protein, 352 aa, Homo sapiens; identical to SEQ ID NO: 18227

SEQ ID NO: 18240 - DNA, 1785 bp, Homo sapiens
gtgggaggattgcattcagtctagttcctggttgccggctgaaataacctgctctccaaaatgtccacaaaagtgacttaagtcaggttcccccaaaccagacaccaagacaagaatccatgtgtgtgtgactgaaggaagtgctgggagagccccagctgcagcctggatgtgaactgcaactccaaagtgtgtccagactcaaggcaagggcactaggctttccagacctcctactaagtcattgatccagcactgccctgccaggacataaatccctggcacctcttgctctctgcaaaggagggcaaagcagcttcaggagcccttgggagtcctccaaagagagtctagggtacaggtccgaaagtagaagaacacagaaggcaggccaggggcactgtgagatggtaaaagagatctgaagggatccagaattcaagccaggaagaagcagcaatctgtcttctggattaaaactgaagatcaacctactttcaacttactaagaaaggggatcatggacattgaagcatatcttgaaagaattggctataagaagtctaggaacaaattggacttggaaacattaactgacattcttcaacaccagatccgagctgttccctttgagaaccttaacatccattgtggggatgccatggacttaggcttagaggccatttttgatcaagttgtgagaagaaatcggggtggatggtgtctccaggtcaatcatcttctgtactgggctctgaccactattggttttgagaccacgatgttgggagggtatgtttacagcactccagccaaaaaatacagcactggcatgattcaccttctcctgcaggtgaccattgatggcaggaactacattgtcgatgctgggtttggacgctcataccagatgtggcagcctctggagttaatttctgggaaggatcagcctcaggtgccttgtgtcttccgtttgacggaagagaatggattctggtatctagaccaaatcagaagggaacagtacattccaaatgaagaatttcttcattctgatctcctagaagacagcaaataccgaaaaatctactcctttactcttaagcctcgaacaattgaagattttgagtctatgaatacatacctgcagacatctccatcatctgtgtttactagtaaatcattttgttccttgcagaccccagatggggttcactgtttggtgggcttcaccctcacccataggagattcaattataaggacaatacagatctaatagagttcaagactctgagtgaggaagaaatagaaaaagtgctgaaaaatatatttaatatttccttgcagagaaagcttgtgcccaaacatggtgatagattttttactatttagaataaggagtaaaacaatcttgtctatttgtcatccagctcaccagttatcaactgacgacctatcatgtatcttctgtacccttaccttattttgaagaaaatcctagacatcaaatcatttcacctataaaaatgtcatcatatataattaaacagctttttaaagaaacataaccacaaaccttttcaaataataataataataataataaaaaatgtattttaaagatggcctgtggttatcttggaaattggtgatttatgctagaaagcttttaatgttggtttattgttgaattcctagaaaagttttattggtagatgagtaaataaaatattgtaaaaaaacttattgtctataaagtatattaaaacattgttggctaatat

SEQ ID NO: 18241 - protein, 290 aa, Homo sapiens; identical to SEQ ID NO: 2198

SEQ ID NO: 18242 - DNA, 1498 bp, Homo sapiens
gaggattgcattcagtctagttcctggttgccggctgaaataacctgaccgagagcatcaccccctgaacatggacttgcagaattccacagaagagaggagactggcctagacagacagccccaggagctgagggcccaacaggctttctaccctggatgctgctcccatgccctgacatgaggcccactacaatgaattcaagccaggaagaagcagcaatctgtcttctggattaaaactgaagatcaacctactttcaacttactaagaaaggggatcatggacattgaagcatatcttgaaagaattggctataagaagtctaggaacaaattggacttggaaacattaactgacattcttcaacaccagatccgagctgttccctttgagaaccttaacatccattgtggggatgccatggacttaggcttagaggccatttttgatcaagttgtgagaagaaatcggggtggatggtgtctccaggtcaatcatcttctgtactgggctctgaccactattggttttgagaccacgatgttgggagggtatgtttacagcactccagccaaaaaatacagcactggcatgattcaccttctcctgcaggtgaccattgatggcaggaactacattgtcgatgctgggtttggacgctcataccagatgtggcagcctctggagttaatttctgggaaggatcagcctcaggtgccttgtgtcttccgtttgacggaagagaatggattctggtatctagaccaaatcagaagggaacagtacattccaaatgaagaatttcttcattctgatctcctagaagacagcaaataccgaaaaatctactcctttactcttaagcctcgaacaattgaagattttgagtctatgaatacatacctgcagacatctccatcatctgtgtttactagtaaatcattttgttccttgcagaccccagatggggttcactgtttggtgggcttcaccctcacccataggagattcaattataaggacaatacagatctaatagagttcaagactctgagtgaggaagaaatagaaaaagtgctgaaaaatatatttaatatttccttgcagagaaagcttgtgcccaaacatggtgatagattttttactatttagaataaggagtaaaacaatcttgtctatttgtcatccagctcaccagttatcaactgacgacctatcatgtatcttctgtacccttaccttattttgaagaaaatcctagacatcaaatcatttcacctataaaaatgtcatcatatataattaaacagctttttaaagaaacataaccacaaaccttttcaaataataataataataataataaaaaatgtattttaaagatggcctgtggttatcttggaaattggtgatttatgctagaaagcttttaatgttggtttattgttgaattcctagaaaagttttattggtagatgagtaaataaaatattgt

SEQ ID NO: 18243 - protein, 290 aa, Homo sapiens; identical to SEQ ID NO: 2198

SEQ ID NO: 18244 - DNA, 1547 bp, Homo sapiens
gaggattgcattcagtctagttcctggttgccggctgaaataacctgaccgagagcatcaccccctgaacatggacttgcagaattccacagaagagaggagactggcctagacagacagccccaggagctgagggcccaacaggctttctaccctggatgctgctcccatgccctgacatgaggcccactacaatgaattcaagccaggaagaagcagcaatctgtcttctggattaaaactgaagatcaacctactttcaacttactaagaaaggggatcatggacattgaagcatatcttgaaagaattggctataagaagtctaggaacaaattggacttggaaacattaactgacattcttcaacaccagatccgagctgttccctttgagaaccttaacatccattgtggggatgccatggacttaggcttagaggccatttttgatcaagttgtgagaagaaatcggggtggatggtgtctccaggtcaatcatcttctgtactgggctctgaccactattggttttgagaccacgatgttgggagggtatgtttacagcactccagccaaaaaatacagcactggcatgattcaccttctcctgcaggtgaccattgatggcaggaactacattgtcgatgctgggtttggacgctcataccagatgtggcagcctctggagttaatttctgggaaggatcagcctcaggtgccttgtgtcttccgtttgacggaagagaatggattctggtatctagaccaaatcagaagggaacagtacattccaaatgaagaatttcttcattctgatctcctagaagacagcaaataccgaaaaatctactcctttactcttaagcctcgaacaattgaagattttgagtctatgaatacatacctgcagacatctccatcatctgtgtttactagtaaatcattttgttccttgcagaccccagatggggttcactgtttggtgggcttcaccctcacccataggagattcaattataaggacaatacagatctaatagagttcaagactctgagtgaggaagaaatagaaaaagtgctgaaaaatatatttaatatttccttgcagagaaagcttgtgcccaaacatggtgatagattttttactatttagaataaggagtaaaacaatcttgtctatttgtcatccagctcaccagttatcaactgacgacctatcatgtatcttctgtacccttaccttattttgaagaaaatcctagacatcaaatcatttcacctataaaaatgtcatcatatataattaaacagctttttaaagaaacataaccacaaaccttttcaaataataataataataataataaaaaatgtattttaaagatggcctgtggttatcttggaaattggtgatttatgctagaaagcttttaatgttggtttattgttgaattcctagaaaagttttattggtagatgagtaaataaaatattgtaaaaaaacttattgtctataaagtatattaaaacattgttggctaatat

SEQ ID NO: 18245 - protein, 290 aa, Homo sapiens; identical to SEQ ID NO: 2198

SEQ ID NO: 18246 - DNA, 1923 bp, Homo sapiens
gaggattgcattcagtctagttcctggttgccggctgaaataacctgaccgagagcatcaccccctgaacatggacttgcagaattccacagaagagaggagactggcctagacagacagccccaggagctgagggcccaacaggctttctaccctggatgctgctcccatgccctgacatgaggcccactacaatgaattcaagccaggaagaagcagcaatctgtcttctggattaaaactgaagatcaacctactttcaacttactaagaaaggggatcatggacattgaagcatatcttgaaagaattggctataagaagtctaggaacaaattggacttggaaacattaactgacattcttcaacaccagatccgagctgttccctttgagaaccttaacatccattgtggggatgccatggacttaggcttagaggccatttttgatcaagttgtgagaagaaatcggggtggatggtgtctccaggtcaatcatcttctgtactgggctctgaccactattggttttgagaccacgatgttgggagggtatgtttacagcactccagccaaaaaatacagcactggcatgattcaccttctcctgcaggtgaccattgatggcaggaactacattgtcgatgctgggtttggacgctcataccagatgtggcagcctctggagttaatttctgggaaggatcagcctcaggtgccttgtgtcttccgtttgacggaagagaatggattctggtatctagaccaaatcagaagggaacagtacattccaaatgaagaatttcttcattctgatctcctagaagacagcaaataccgaaaaatctactcctttactcttaagcctcgaacaattgaagattttgagtctatgaatacatacctgcagacatctccatcatctgtgtttactagtaaatcattttgttccttgcagaccccagatggggttcactgtttggtgggcttcaccctcacccataggagattcaattataaggacaatacagatctaatagagttcaagactctgagtgaggaagaaatagaaaaagtgctgaaaaatatatttaatatttccttgcagagaaagcttgtgcccaaacatggtgatagattttttactatttagaataaggagtaaaacaatcttgtctatttgtcatccagctcaccagttatcaactgacgacctatcatgtatcttctgtacccttaccttattttgaagaaaatcctagacatcaaatcatttcacctataaaaatgtcatcatatataattaaacagctttttaaagaaacataaccacaaaccttttcaaataataataataataataataaaaaatgtattttaaagatggcctgtggttatcttggaaattggtgatttatgctagaaagcttttaatgttggtttattgttgaattcctagaaaagttttattggtagatgagtaaataaaatattgtaaaaaaacttattgtctataaagtatattaaaacattgttggctaatataatttgaaaaaaagtggttttttggaagacttaggatattatggtgctacataatttttcctcgatgctctcttcctctcatctttcttgtctcttaaattgctttacttccttgcacactttgccatacaagaatgaacatgagcttttcttgtgtagatctgagttgaaatcctgtggacactgggcgaattactttttagatctgtagctctgactcctcaggcataaaatgggaataatgcttttacagtttagtggcggaactaaactcccaaaattatttgttatatggatcaagtaataacgtcagtaatgtttttggtacaaagtcattatttaataaaagttattgttccatcttgcttgccccccc

SEQ ID NO: 18247 - protein, 290 aa, Homo sapiens; identical to SEQ ID NO: 2198

SEQ ID NO: 18248 - DNA, 1715 bp, Homo sapiens
tagttcctggttgccggctgaaataacctgctctccaaaatgtccacaaaagtgacttaagtcaggttcccccaaaccagacaccaagacaagaatccatgtgtgtgtgactgaaggaagtgctgggagagccccagctgcagcctggatgtgaactgcaactccaaagtgtgtccagactcaaggcaagggcactaggctttccagacctcctactaagtcattgatccagcactgccctgccaggacataaatccctggcacctcttgctctctgcaaaggagggcaaagcagcttcaggagcccttgggagtcctccaaagagagtctagggtacaggtccgaaagtagaagaacacagaaggcaggccaggggcactgtgagatggtaaaagagatctgaagggatccagaattcaagccaggaagaagcagcaatctgtcttctggattaaaactgaagatcaacctactttcaacttactaagaaaggggatcatggacattgaagcatatcttgaaagaattggctataagaagtctaggaacaaattggacttggaaacattaactgacattcttcaacaccagatccgagctgttccctttgagaaccttaacatccattgtggggatgccatggacttaggcttagaggccatttttgatcaagttgtgagaagaaatcggggtggatggtgtctccaggtcaatcatcttctgtactgggctctgaccactattggttttgagaccacgatgttgggagggtatgtttacagcactccagccaaaaaatacagcactggcatgattcaccttctcctgcaggtgaccattgatggcaggaactacattgtcgatgctgggtttggacgctcataccagatgtggcagcctctggagttaatttctgggaaggatcagcctcaggtgccttgtgtcttccgtttgacggaagagaatggattctggtatctagaccaaatcagaagggaacagtacattccaaatgaagaatttcttcattctgatctcctagaagacagcaaataccgaaaaatctactcctttactcttaagcctcgaacaattgaagattttgagtctatgaatacatacctgcagacatctccatcatctgtgtttactagtaaatcattttgttccttgcagaccccagatggggttcactgtttggtgggcttcaccctcacccataggagattcaattataaggacaatacagatctaatagagttcaagactctgagtgaggaagaaatagaaaaagtgctgaaaaatatatttaatatttccttgcagagaaagcttgtgcccaaacatggtgatagattttttactatttagaataaggagtaaaacaatcttgtctatttgtcatccagctcaccagttatcaactgacgacctatcatgtatcttctgtacccttaccttattttgaagaaaatcctagacatcaaatcatttcacctataaaaatgtcatcatatataattaaacagctttttaaagaaacataaccacaaaccttttcaaataataataataataataataaaaaatgtattttaaagatggcctgtggttatcttggaaattggtgatttatgctagaaagcttttaatgttggtttattgttgaattcctagaaaagttttattggtagatgagtaaataaaatattgt

SEQ ID NO: 18249 - protein, 290 aa, Homo sapiens; identical to SEQ ID NO: 2198

SEQ ID NO: 18250 - DNA, 2140 bp, Homo sapiens
tagttcctggttgccggctgaaataacctgctctccaaaatgtccacaaaagtgacttaagtcaggttcccccaaaccagacaccaagacaagaatccatgtgtgtgtgactgaaggaagtgctgggagagccccagctgcagcctggatgtgaactgcaactccaaagtgtgtccagactcaaggcaagggcactaggctttccagacctcctactaagtcattgatccagcactgccctgccaggacataaatccctggcacctcttgctctctgcaaaggagggcaaagcagcttcaggagcccttgggagtcctccaaagagagtctagggtacaggtccgaaagtagaagaacacagaaggcaggccaggggcactgtgagatggtaaaagagatctgaagggatccagaattcaagccaggaagaagcagcaatctgtcttctggattaaaactgaagatcaacctactttcaacttactaagaaaggggatcatggacattgaagcatatcttgaaagaattggctataagaagtctaggaacaaattggacttggaaacattaactgacattcttcaacaccagatccgagctgttccctttgagaaccttaacatccattgtggggatgccatggacttaggcttagaggccatttttgatcaagttgtgagaagaaatcggggtggatggtgtctccaggtcaatcatcttctgtactgggctctgaccactattggttttgagaccacgatgttgggagggtatgtttacagcactccagccaaaaaatacagcactggcatgattcaccttctcctgcaggtgaccattgatggcaggaactacattgtcgatgctgggtttggacgctcataccagatgtggcagcctctggagttaatttctgggaaggatcagcctcaggtgccttgtgtcttccgtttgacggaagagaatggattctggtatctagaccaaatcagaagggaacagtacattccaaatgaagaatttcttcattctgatctcctagaagacagcaaataccgaaaaatctactcctttactcttaagcctcgaacaattgaagattttgagtctatgaatacatacctgcagacatctccatcatctgtgtttactagtaaatcattttgttccttgcagaccccagatggggttcactgtttggtgggcttcaccctcacccataggagattcaattataaggacaatacagatctaatagagttcaagactctgagtgaggaagaaatagaaaaagtgctgaaaaatatatttaatatttccttgcagagaaagcttgtgcccaaacatggtgatagattttttactatttagaataaggagtaaaacaatcttgtctatttgtcatccagctcaccagttatcaactgacgacctatcatgtatcttctgtacccttaccttattttgaagaaaatcctagacatcaaatcatttcacctataaaaatgtcatcatatataattaaacagctttttaaagaaacataaccacaaaccttttcaaataataataataataataataaaaaatgtattttaaagatggcctgtggttatcttggaaattggtgatttatgctagaaagcttttaatgttggtttattgttgaattcctagaaaagttttattggtagatgagtaaataaaatattgtaaaaaaacttattgtctataaagtatattaaaacattgttggctaatataatttgaaaaaaagtggttttttggaagacttaggatattatggtgctacataatttttcctcgatgctctcttcctctcatctttcttgtctcttaaattgctttacttccttgcacactttgccatacaagaatgaacatgagcttttcttgtgtagatctgagttgaaatcctgtggacactgggcgaattactttttagatctgtagctctgactcctcaggcataaaatgggaataatgcttttacagtttagtggcggaactaaactcccaaaattatttgttatatggatcaagtaataacgtcagtaatgtttttggtacaaagtcattatttaataaaagttattgttccatcttgcttgccccccc

SEQ ID NO: 18251 - protein, 290 aa, Homo sapiens; identical to SEQ ID NO: 2198

SEQ ID NO: 18252 - DNA, 1317 bp, Homo sapiens
tgagatcacttcccttgcagactttggaagggagagcactttattacagaccttggaagcaagaggattgcattcagcctagttcctggttgctggccaaagggatcatggacattgaagcatattttgaaagaattggctataagaactctaggaacaaattggacttggaaacattaactgacattcttgagcaccagatccgggctgttccctttgagaaccttaacatgcattgtgggcaagccatggagttgggcttagaggctatttttgatcacattgtaagaagaaaccggggtgggtggtgtctccaggtcaatcaacttctgtactgggctctgaccacaatcggttttcagaccacaatgttaggagggtatttttacatccctccagttaacaaatacagcactggcatggttcaccttctcctgcaggtgaccattgacggcaggaattacattgtcgatgctgggtctggaagctcctcccagatgtggcagcctctagaattaatttctgggaaggatcagcctcaggtgccttgcattttctgcttgacagaagagagaggaatctggtacctggaccaaatcaggagagagcagtatattacaaacaaagaatttcttaattctcatctcctgccaaagaagaaacaccaaaaaatatacttatttacgcttgaacctcgaacaattgaagattttgagtctatgaatacatacctgcagacgtctccaacatcttcatttataaccacatcattttgttccttgcagaccccagaaggggtttactgtttggtgggcttcatcctcacctatagaaaattcaattataaagacaatacagatctggtcgagtttaaaactctcactgaggaagaggttgaagaagtgctgagaaatatatttaagatttccttggggagaaatctcgtgcccaaacctggtgatggatcccttactatttagaataaggaacaaaataaacccttgtgtatgtatcacccaactcactaattatcaacttatgtgctatcagatatcctctctaccctcacgttattttgaagaaaatcctaaacatcaaatactttcatccataaaaatgtcagcatttattaaaaaacaataactttttaaagaaacataaggacacattttcaaattaataaaaataaaggcattttaaggatggcctgtgattatcttgggaagcagagtgattcatgctagaaaacatttaatattgatttattgttgaattcatagtaaatttttactggtaaatgaataaagaatattgtgg

SEQ ID NO: 18253 - protein, 290 aa, Homo sapiens
MDIEAYFERIGYKNSRNKLDLETLTDILEHQIRAVPFENLNMHCGQAMELGLEAIFDHIVRRNRGGWCLQVNQLLYWALTTIGFQTTMLGGYFYIPPVNKYSTGMVHLLLQVTIDGRNYIVDAGSGSSSQMWQPLELISGKDQPQVPCIFCLTEERGIWYLDQIRREQYITNKEFLNSHLLPKKKHQKIYLFTLEPRTIEDFESMNTYLQTSPTSSFITTSFCSLQTPEGVYCLVGFILTYRKFNYKDNTDLVEFKTLTEEEVEEVLRNIFKISLGRNLVPKPGDGSLTI

SEQ ID NO: 18254 - DNA, 936 bp, Homo sapiens
attacagaccttggaagcaagaggattgcattcagcctagttcctggttgctggccaaagtgaccattgacggcaggaattacattgtcgatgctgggtctggaagctcctcccagatgtggcagcctctagaattaatttctgggaaggatcagcctcaggtgccttgcattttctgcttgacagaagagagaggaatctggtacctggaccaaatcaggagagagcagtatattacaaacaaagaatttcttaattctcatctcctgccaaagaagaaacaccaaaaaatatacttatttacgcttgaacctcgaacaattgaagattttgagtctatgaatacatacctgcagacgtctccaacatcttcatttataaccacatcattttgttccttgcagaccccagaaggggtttactgtttggtgggcttcatcctcacctatagaaaattcaattataaagacaatacagatctggtcgagtttaaaactctcactgaggaagaggttgaagaagtgctgagaaatatatttaagatttccttggggagaaatctcgtgcccaaacctggtgatggatcccttactatttagaataaggaacaaaataaacccttgtgtatgtatcacccaactcactaattatcaacttatgtgctatcagatatcctctctaccctcacgttattttgaagaaaatcctaaacatcaaatactttcatccataaaaatgtcagcatttattaaaaaacaataactttttaaagaaacataaggacacattttcaaattaataaaaataaaggcattttaaggatggcctgtgattatcttgggaagcagagtgattcatgctagaaaacatttaatattgatttattgttgaattcatagtaaatttttactggtaaatgaataaagaatattgtgg

SEQ ID NO: 18255 - protein, 160 aa, Homo sapiens
MWQPLELISGKDQPQVPCIFCLTEERGIWYLDQIRREQYITNKEFLNSHLLPKKKHQKIYLFTLEPRTIEDFESMNTYLQTSPTSSFITTSFCSLQTPEGVYCLVGFILTYRKFNYKDNTDLVEFKTLTEEEVEEVLRNIFKISLGRNLVPKPGDGSLTI

SEQ ID NO: 18256 - DNA, 669 bp, Homo sapiens
gtgttgagagaggaggctgggaagagggggacgtcctccttcaacttctttcaagttcgtatccctgagcccctgagggatccagtggcattctgggagaatgtcactgcggagtcagtgtgtagcactgggtttgaatcctcgttctagggcttgctggctgtgtaatcttaagcaaatcacaaaatatccttgagcttgttctcttgttcatcaaattccaatgctaatctgtacctcacagacttgttgaagatgcaattaaataaatatttaaagagctttttacatttccaatgccttatgcacaagttagttgtaatgatactctggtggaaaattttattatgtgtaagagcctaaattattttgcacgagctccctctattactggcctgaaaccataactctttagatttataaggtcagacagttgtgttctattcaattataactcttgaaacttttgaagaaggagaaaagtctctccttgttcaaggatgagaacaacgagggaaaagaacaacacggagtttgtgaaaaggtagtcaggacaaggaagggaaggagcatcttgaaaactctgacaaataatgagtctcttaaaatgattgactacaagaaccaaaagaaactcatggaaactatttggcatctttaatggaacat

SEQ ID NO: 18257 - protein, 31 aa, Homo sapiens
MSLRSQCVALGLNPRSRACWLCNLKQITKYP

SEQ ID NO: 18258 - DNA, 8192 bp, Homo sapiens
agtgacgtgagctgtgcctggaacaatcagactcgctgcaaacagggtagttgaagatgctgggggaggcagcctggtgcttcttaagctaacgcggatcacggcgctcaggagctgctcaggcacaaccccgcagagttcctccagcgtgagagccttggaacggttggaaagtgcctttttatttctctaaaccccttccttagttgaccttcgaaaatgattggcgtgaatagtgtccagagtgccagcaaggtacgggtgaggacctcaggttccgtgaaatactcccgggaggattctatccggcggcagtctcacaggtcaaagtccatgaaaatttccaactcctcagagttttctgctaaggagaacaaggctctgtacaactcaatcaagaatgagaagcttgaatgggcagtagatgatgaagagaaaaaaaagtctccctcagaaagtactgaggagaaagctaacggaacacatccaaagaccatcagtcgtattggaagtactactaacccatttttggacattcctcatgatccaaatgctgctgtgtacaaaagtggattcttggctcggaaaattcatgcagatatggatggaaagaagactccaagaggaaaacgaggatggaaaaccttttatgctgtactgaagggaacagttctttacttgcaaaaggatgaatacaagccagaaaaggccttgtctgaagaggacttgaaaaacgctgtgagtgtgcaccacgcattggcatccaaggccacggactatgagaagaaaccaaacgtgtttaaacttaaaactgccgactggagggtcttgctttttcaaactcagagcccagaggaaatgcaagggtggataaacaaaatcaattgtgtggcagctgtattttctgcaccaccatttccagcagcaatcggctctcagaagaagtttagccgcccacttctgcctgccactacaacaaaactgtctcaggaggagcaactgaagtcacatgaaagtaagctgaagcagatcaccaccgagctggccgagcaccgctcatatccccccgacaagaaggtcaaagccaaggacgtcgatgagtacaaactgaaagaccactatctggagtttgagaaaacccgctatgaaatgtatgtcagcattctcaaggaaggaggcaaagagctactgagtaacgatgaaagcgaggctgcaggactgaagaagtcgcactcgagtccttcgctgaacccggatacttctccaatcactgccaaagtcaagcgtaacgtgtcagagaggaaggatcaccgacctgaaacaccaagcattaagcaaaaagttacttagagtccatctgcggccaggaagtgctggtcatggagcaaaatagggtttttcaagatctttctggtaatccgtgaatatatttaaaaaaaaaaagtctgtgacaaaacggtgcattagtaattttttctattgtatatttttgttagtttctgtacagattgtctttgctcttgatttcttttgctttgatgatttttgcaacttgatagctaatgcaccttttctgtgaggaggaggggatcgtgatttcagaatgaattatgtatcccttctcttttggttttctcttgtttgcagtctgctcagttgttttatgtattctcatatcaactgttaaacttttttttaaggttaaagaatttaatccattgtgaaacacttaactggacaaactgtagttttagtaaattctagctggagttaatatacgcctttatatgtgaaatcttgcccagtcacagaggtagaattgagcactcacagatgctccagtaagaatcacagtgctgggaatctagttgctccaatatgaggcagcttcatgtgcagcttagcacttgttgttgagatcggaccctgctggaagcagggaaaagaagcgtgaagatcgtaggattgagaacttagggaagcacattagcttgcttgaagtgctgattccatttcagccaagcaagggaaagaggaagtggagtcattttgcctttgaaggctgaggaaagattgatacccagttaattttgtttgctaaaggatgggggcaataatcggcccttgaggagctgcagcagtaggcatgtgctcagtctgcaggaattgttacctcactcccacagggtctagactagaaatccatcatctctatcgttgatatccttccatccaggaatagatttttcttactctacatatgtgtgtgtgcgtgcgtgtgtgtgcgtgtgtgggcatggggttgtgtcctggttgtgatattgaggtcttccttcctaacaaattaatactaaaatgaaacagcttttcttgtgtccttaagacaaaataaggaaggaaaacgtagctgcagttgtccacgatggatattggttctttaaaatatatctgaaagtagtagtcagaatgaattatggttggaaaactgaggaatcttctggttgcaggtgcaaagtgactttgtttattcttgtctcagtctccttgatagccacttcactctgctactactcaactttctcctaaaaatacttcatctattttcagtcctttctttctgtctactcaaaatggttctattaactttgcagtcatgagcttgttccagttacagtccctttgaagttcagggtgataaacagaatattcttctgtagaggaagagaaaggagtgaaagtttagcccactgagacctagagctttgtgatttcctaaccttgaaactctgtaatccctaaagttaaaatctccgcaagtggcacaacttcagaactaatagtatcactttgatttttctttttcctcccttagaaagtttctctagttctatagtttatttgttgaaggtactatgaccaaagaatcagctgctctacaggaatagcatggttccagtgaattagagaaaacctgctgtaaagccatggtagtgtctaagtggtatgttattatgatgtactagcatttatttacagaattatttattaacgtttacttccttcccctctgtaaatgtccatgactattgcccagagaaggcttacccctctctagggttgcagttgctttctttgtaataagtattttgccacacctgtaaaaaaaaaaacctcacttttaactctctgccttgtttgggtaaaggcagtaactaagtttatgtttcagaactgcaaaacaaacaggatagttaccaatatggcccatgtatcagattgatttttgtagcctctcactgaatccaacatatccacaagcaagttatctgtctttctacctgataatctaaattatcaggatatttgttttctgcctaaatgtttatactaagccgaggggagagaggtacctagaccatgtcatctacaagcttcagtaactaaagaaaaaggaacttccctgagtggcttgaatgtgtttgcccacagtctatatctatgtatatagaatgtctgtatgtattttacttatttaatatacattgaatggtaccttgctacagtatttctgacatttagagtagtgttgaaatactcggctagcatcagcaccactatagcactgtccgtgtcatatgagtcactaatattaactccagggacttctggataggctaatagatcattggatacgaagggctcttttgaagcttcagtataccatgtttgcatagtttatctttaaaaacaactttaaaggttcttttgtgagccaggatctcagactgccgtagcatgatgctgtccatctttagcgcatgggctgagaacacctcttccctgaggcttctgaaggttgctgtctgtcatgagtgcatgaaggaggccaagagtttatgctatgggaggaaacagtcactgatttgcctagattctgagagtctggcccatagccaaccacattttcctttgggataatttatttcctgtggcatctagccagaagaaattgaggatgtttcctttcacagctgctccaagcctgttgcccaattcacggtacaagggagcaccccttccctttcctctgaaggtacgccacccacctccgtcgcccacctcagcgcccaggagccttgggacttccttccatatgataaatcattcttcttcacgtcaatacacttcatattaatttctagtacagaaaatcttgacagctatcagaatgccttggtcatagtgttgttgcaaaattgaccatacaggtggcccatgtataaaatctgaattttaggggtttgtccccacctcgcatgctggcttttacagggaggtgtctgggattcctcattagcaatcaaaacttaattactgggatgcagagtccttactttatcgccagcccgtaggcatttctgaagtgcacttttttgaaacatcattttgctaactctcagcagtgtctaattaaactgagcaatacttttgtgaattttaattaatctcagcaaaaccatgatgggagagagtcctctgatggaaatgtagtccctggattatgtgtaacctttttattcctcttagatgcagaggatagaaagcattttttggtgcagtggtcttgtggcaaacacaagaccctctatgcgtctccaactgttatcctaatctagaaaatgaggactggcccctgggcaaaagtgacatgaggaatttactctggaagaggaaaatctgggtggctttccaaggctaagataggtttgtatttcaccctgtggccaagctacagaacttctgagattgtggaagaatttttgcaaccagcagggaaagaggcctcttactgcctaaacacaaagttacactgagcttttctactgtcctttgcctattgctccctctatcatgtaaagatctgggaaggatgagaggcagggcctgcttgtcatgagctgcactcttttctttttaactaatcattgacaattggaagaaaattgacgttaaagaagtttctccattgtcttactaacaaaaccttttgggtttcattaattgtccttgaaattgagttcctttggcatttttccttgcagtcatcagttaagcatgttgcatcctgaattcacagaagtttagctttgcaggtttgaatctctgtaatttaactcccgtggacttggtcgagttttcagcaggttgggagccacctctcttcatttcagcagtgagtcatcccttgacttttcaaatgacagaattttttccaattgtaaaattagcactgtaaaacaaagaaccaaagtggcatcctaagagttgttaaacctgaagtctagtttatgaggaattgtccaagttggagtttaaatagtatctgcttttgtctcaaagcatctaagttattctgacagaaaatggtaagtcagctttgcaggcagatgcgcctctgggcctcctaccttgctccacagctttctggccatcttgtctcccaggccatgccactgctctgccacatgtcagcaaatttctttccaccagtcttatagcatcttacatgatcaaatcatcacagaataaccccgtgatagattattgatagcaatagagaggggctttgtcactgatttttctctcagattccttttccatctctcatccataaaggaaggactgaaatccaaaggcattctccttttgtacctacagtatccagaacccacgtgggcagccttctgcttatgacaataattggcccattgcatgcagagagaatgtcttcatagagagaatgtcattaaatacttgaatctgcatgacagtttgacttgaatgcaacagcaggaaaattttgcaagttacataattgtatatacagtaggttttcttaagtctcttcggttcatcctttgtaatttgtgtgtgtatctgtagtattgcaggcttttggagactattcttacaggcagtatgtcagtcatcaaagaaaatgctgtcacctgccattgttgtatttgtgggtatttatagttgtatgtatgtaaatgcatcagtgtgtagattgcatatcagtgtatggtacatgtacatcaaaattatttttgtccttaatcagtgtgatatgaaaagcaagtacaacctcataggactgattatataatgaagttgttgagagtatatatagtggtattgttttattaaacttaaactcaaataatattttgattaaaatttttaataagactttatgctagaaaattctttgagctttgaatcaccagggcaaaaatgactttcaactaaccttgtgaatcttttgcagtgtactgtgtgcaataccaagggcatagctccctgtaatttgggaaatacagaaagaaaagaaaaaaaaaaaaaaaggcagcctgtgcagtcttagtaactttagtattaagagcacttaaagtcaaactgacaattttgggcttattacaaaatgtgatgctttaaagcacacgttctttattgttgttgtaattagtccataaaaaatatagctttcggaagaattaagtacccaccatatcatttatgtatttgtgtatgttttacgggagatcaaaccactctcgtggtgccgcatccgtactcgcttgacttggaagaaatatcacaagcactaaagtatatcagggcatcccaggattgggtactgtatcctaggtttgcagttgcagaaattagcatctagtgtcacaggtaaaagaatttcaggaccaggtttaaactttattttaaatatttttatacttaggtctctttttcctgcctctccccaaagaagagccactggccttagttgtttgagcttactgcttatattatagagtgtaaataggtaactagagactaaaattttattaaccagcatgtttggtatatttaaagcagtgactgagtgtgtttgagtgagtggctgagtgcagtgtcttttgtttaaacacactgcctcgtgtctttgtagctgattcagagagtttgaattgtggggtgggagactaacttcagctccaggctgcagtaatgtgttggtagttacacttgaggcatttttttgttgttgttaattaactctatagtctcaaactatttttgcaaatatatcatttttcctaattggttcttgacgtgcagtggactggctctgtgaatgattggcagggtcttagttttgcgagagtatttccttctaagaattattgtgatctgcagaaacagccatttgattcaaaaatcatgtagaaaaggagtaggagaagcaaaacgtttcatttttgggccttaaccatttgaaatgtttggactttaaacataaagccatggagtttataaagccaagtaaccatttgatatggataataatatctactctagagagagtatatatatgcacattgatttttaatgctgttaagatacttttgtaaaactgtaggaacaagagtaattagaccaaattgaagcttaggggacagtaaagtggttgctttccatttagggtaaccatgcatgtggttagtcctctcctcctgagattcagaaccagttgactgtccccttaggtgtataaggagaaaagttgacatgtctgggacctctgacatgtgtacacatgcttgcacacatgcacacacagtgaatgttttaagttatacaaacataagaccttaagatgcaaagagccagaatattctaaagaggtgatgaacagagggggtggaaactgcatcacagatgttttccaagggccagggtggaatctgagctctagtgtctgactttgagatgcattatatttttaacacataaatgaggggatccatatcacattctttcttgtggaccaccaaattgaaggctttcttgtaattcacaagcagcagctctccagcatctctccgtagcctgggtgaagtcccagaagctggtgtgcatcattttccaaggtggcagagctgcttgctctgcagatcattcctttgagagaggagtacaagtgaagaaacaaggaggcacttcctgtaggagcactgatgtgccttgtccacactcccctctgagctttactggtaagagagctccgactgaacatgctgagcagttgagcacttttccatcagcaacaacagcgaggatggaaatgg

SEQ ID NO: 18259 - protein, 376 aa, Homo sapiens
MIGVNSVQSASKVRVRTSGSVKYSREDSIRRQSHRSKSMKISNSSEFSAKENKALYNSIKNEKLEWAVDDEEKKKSPSESTEEKANGTHPKTISRIGSTTNPFLDIPHDPNAAVYKSGFLARKIHADMDGKKTPRGKRGWKTFYAVLKGTVLYLQKDEYKPEKALSEEDLKNAVSVHHALASKATDYEKKPNVFKLKTADWRVLLFQTQSPEEMQGWINKINCVAAVFSAPPFPAAIGSQKKFSRPLLPATTTKLSQEEQLKSHESKLKQITTELAEHRSYPPDKKVKAKDVDEYKLKDHYLEFEKTRYEMYVSILKEGGKELLSNDESEAAGLKKSHSSPSLNPDTSPITAKVKRNVSERKDHRPETPSIKQKVT

SEQ ID NO: 18260 - DNA, 8192 bp, Homo sapiens
aggctcggcagtcactgaacttgggagctgaagaatactggacggggcttcggagaggaaggatggtccaggcgcaccccaggggttgcgatgggctcttcttggtgtctgtatggttgctgcaatgctggggtgaaaacaacacggctagaagctcattctgaaatggggagcactgaaattttggaaaaggagaccccagaaaatctcagtaatggtaccagcagcaatgtggaagcagccaaaaggttggccaaacgcctttatcagctggacagattcaaaagatcagatgttgcaaaacaccttggcaagaacaacgaatttagcaaactagttgcagaagaatatctgaagttttttgattttacaggaatgacgctggatcagtcactcaggtatttctttaaagcattctctcttgtgggagaaactcaagaacgagagagagttttaatacacttctccaatagatatttttattgtaacccagataccattgcttcacaagatggagtccattgccttacctgtgcaataatgcttcttaataccgatctacatggccacaatattggaaagaagatgacctgtcaggagttcattgcaaatctgcaaggggtaaatgagggtgttgatttctccaaggatctgctgaaagctctgtacaactcaatcaagaatgagaagcttgaatgggcagtagatgatgaagagaaaaaaaagtctccctcagaaagtactgaggagaaagctaacggaacacatccaaagaccatcagtcgtattggaagtactactaacccatttttggacattcctcatgatccaaatgctgctgtgtacaaaagtggattcttggctcggaaaattcatgcagatatggatggaaagaagactccaagaggaaaacgaggatggaaaaccttttatgctgtactgaagggaacagttctttacttgcaaaaggatgaatacaagccagaaaaggccttgtctgaagaggacttgaaaaacgctgtgagtgtgcaccacgcattggcatccaaggccacggactatgagaagaaaccaaacgtgtttaaacttaaaactgccgactggagggtcttgctttttcaaactcagagcccagaggaaatgcaagggtggataaacaaaatcaattgtgtggcagctgtattttctgcaccaccatttccagcagcaatcggctctcagaagaagtttagccgcccacttctgcctgccactacaacaaaactgtctcaggaggagcaactgaagtcacatgaaagtaagctgaagcagatcaccaccgagctggccgagcaccgctcatatccccccgacaagaaggtcaaagccaaggacgtcgatgagtacaaactgaaagaccactatctggagtttgagaaaacccgctatgaaatgtatgtcagcattctcaaggaaggaggcaaagagctactgagtaacgatgaaagcgaggctgcaggactgaagaagtcgcactcgagtccttcgctgaacccggatacttctccaatcactgccaaagtcaagcgtaacgtgtcagagaggaaggatcaccgacctgaaacaccaagcattaagcaaaaagttacttagagtccatctgcggccaggaagtgctggtcatggagcaaaatagggtttttcaagatctttctggtaatccgtgaatatatttaaaaaaaaaaagtctgtgacaaaacggtgcattagtaattttttctattgtatatttttgttagtttctgtacagattgtctttgctcttgatttcttttgctttgatgatttttgcaacttgatagctaatgcaccttttctgtgaggaggaggggatcgtgatttcagaatgaattatgtatcccttctcttttggttttctcttgtttgcagtctgctcagttgttttatgtattctcatatcaactgttaaacttttttttaaggttaaagaatttaatccattgtgaaacacttaactggacaaactgtagttttagtaaattctagctggagttaatatacgcctttatatgtgaaatcttgcccagtcacagaggtagaattgagcactcacagatgctccagtaagaatcacagtgctgggaatctagttgctccaatatgaggcagcttcatgtgcagcttagcacttgttgttgagatcggaccctgctggaagcagggaaaagaagcgtgaagatcgtaggattgagaacttagggaagcacattagcttgcttgaagtgctgattccatttcagccaagcaagggaaagaggaagtggagtcattttgcctttgaaggctgaggaaagattgatacccagttaattttgtttgctaaaggatgggggcaataatcggcccttgaggagctgcagcagtaggcatgtgctcagtctgcaggaattgttacctcactcccacagggtctagactagaaatccatcatctctatcgttgatatccttccatccaggaatagatttttcttactctacatatgtgtgtgtgcgtgcgtgtgtgtgcgtgtgtgggcatggggttgtgtcctggttgtgatattgaggtcttccttcctaacaaattaatactaaaatgaaacagcttttcttgtgtccttaagacaaaataaggaaggaaaacgtagctgcagttgtccacgatggatattggttctttaaaatatatctgaaagtagtagtcagaatgaattatggttggaaaactgaggaatcttctggttgcaggtgcaaagtgactttgtttattcttgtctcagtctccttgatagccacttcactctgctactactcaactttctcctaaaaatacttcatctattttcagtcctttctttctgtctactcaaaatggttctattaactttgcagtcatgagcttgttccagttacagtccctttgaagttcagggtgataaacagaatattcttctgtagaggaagagaaaggagtgaaagtttagcccactgagacctagagctttgtgatttcctaaccttgaaactctgtaatccctaaagttaaaatctccgcaagtggcacaacttcagaactaatagtatcactttgatttttctttttcctcccttagaaagtttctctagttctatagtttatttgttgaaggtactatgaccaaagaatcagctgctctacaggaatagcatggttccagtgaattagagaaaacctgctgtaaagccatggtagtgtctaagtggtatgttattatgatgtactagcatttatttacagaattatttattaacgtttacttccttcccctctgtaaatgtccatgactattgcccagagaaggcttacccctctctagggttgcagttgctttctttgtaataagtattttgccacacctgtaaaaaaaaaaacctcacttttaactctctgccttgtttgggtaaaggcagtaactaagtttatgtttcagaactgcaaaacaaacaggatagttaccaatatggcccatgtatcagattgatttttgtagcctctcactgaatccaacatatccacaagcaagttatctgtctttctacctgataatctaaattatcaggatatttgttttctgcctaaatgtttatactaagccgaggggagagaggtacctagaccatgtcatctacaagcttcagtaactaaagaaaaaggaacttccctgagtggcttgaatgtgtttgcccacagtctatatctatgtatatagaatgtctgtatgtattttacttatttaatatacattgaatggtaccttgctacagtatttctgacatttagagtagtgttgaaatactcggctagcatcagcaccactatagcactgtccgtgtcatatgagtcactaatattaactccagggacttctggataggctaatagatcattggatacgaagggctcttttgaagcttcagtataccatgtttgcatagtttatctttaaaaacaactttaaaggttcttttgtgagccaggatctcagactgccgtagcatgatgctgtccatctttagcgcatgggctgagaacacctcttccctgaggcttctgaaggttgctgtctgtcatgagtgcatgaaggaggccaagagtttatgctatgggaggaaacagtcactgatttgcctagattctgagagtctggcccatagccaaccacattttcctttgggataatttatttcctgtggcatctagccagaagaaattgaggatgtttcctttcacagctgctccaagcctgttgcccaattcacggtacaagggagcaccccttccctttcctctgaaggtacgccacccacctccgtcgcccacctcagcgcccaggagccttgggacttccttccatatgataaatcattcttcttcacgtcaatacacttcatattaatttctagtacagaaaatcttgacagctatcagaatgccttggtcatagtgttgttgcaaaattgaccatacaggtggcccatgtataaaatctgaattttaggggtttgtccccacctcgcatgctggcttttacagggaggtgtctgggattcctcattagcaatcaaaacttaattactgggatgcagagtccttactttatcgccagcccgtaggcatttctgaagtgcacttttttgaaacatcattttgctaactctcagcagtgtctaattaaactgagcaatacttttgtgaattttaattaatctcagcaaaaccatgatgggagagagtcctctgatggaaatgtagtccctggattatgtgtaacctttttattcctcttagatgcagaggatagaaagcattttttggtgcagtggtcttgtggcaaacacaagaccctctatgcgtctccaactgttatcctaatctagaaaatgaggactggcccctgggcaaaagtgacatgaggaatttactctggaagaggaaaatctgggtggctttccaaggctaagataggtttgtatttcaccctgtggccaagctacagaacttctgagattgtggaagaatttttgcaaccagcagggaaagaggcctcttactgcctaaacacaaagttacactgagcttttctactgtcctttgcctattgctccctctatcatgtaaagatctgggaaggatgagaggcagggcctgcttgtcatgagctgcactcttttctttttaactaatcattgacaattggaagaaaattgacgttaaagaagtttctccattgtcttactaacaaaaccttttgggtttcattaattgtccttgaaattgagttcctttggcatttttccttgcagtcatcagttaagcatgttgcatcctgaattcacagaagtttagctttgcaggtttgaatctctgtaatttaactcccgtggacttggtcgagttttcagcaggttgggagccacctctcttcatttcagcagtgagtcatcccttgacttttcaaatgacagaattttttccaattgtaaaattagcactgtaaaacaaagaaccaaagtggcatcctaagagttgttaaacctgaagtctagtttatgaggaattgtccaagttggagtttaaatagtatctgcttttgtctcaaagcatctaagttattctgacagaaaatggtaagtcagctttgcaggcagatgcgcctctgggcctcctaccttgctccacagctttctggccatcttgtctcccaggccatgccactgctctgccacatgtcagcaaatttctttccaccagtcttatagcatcttacatgatcaaatcatcacagaataaccccgtgatagattattgatagcaatagagaggggctttgtcactgatttttctctcagattccttttccatctctcatccataaaggaaggactgaaatccaaaggcattctccttttgtacctacagtatccagaacccacgtgggcagccttctgcttatgacaataattggcccattgcatgcagagagaatgtcttcatagagagaatgtcattaaatacttgaatctgcatgacagtttgacttgaatgcaacagcaggaaaattttgcaagttacataattgtatatacagtaggttttcttaagtctcttcggttcatcctttgtaatttgtgtgtgtatctgtagtattgcaggcttttggagactattcttacaggcagtatgtcagtcatcaaagaaaatgctgtcacctgccattgttgtatttgtgggtatttatagttgtatgtatgtaaatgcatcagtgtgtagattgcatatcagtgtatggtacatgtacatcaaaattatttttgtccttaatcagtgtgatatgaaaagcaagtacaacctcataggactgattatataatgaagttgttgagagtatatatagtggtattgttttattaaacttaaactcaaataatattttgattaaaatttttaataagactttatgctagaaaattctttgagctttgaatcaccagggcaaaaatgactttcaactaaccttgtgaatcttttgcagtgtactgtgtgcaataccaagggcatagctccctgtaatttgggaaatacagaaagaaaagaaaaaaaaaaaaaaaggcagcctgtgcagtcttagtaactttagtattaagagcacttaaagtcaaactgacaattttgggcttattacaaaatgtgatgctttaaagcacacgttctttattgttgttgtaattagtccataaaaaatatagctttcggaagaattaagtacccaccatatcatttatgtatttgtgtatgttttacgggagatcaaaccactctcgtggtgccgcatccgtactcgcttgacttggaagaaatatcacaagcactaaagtatatcagggcatcccaggattgggtactgtatcctaggtttgcagttgcagaaattagcatctagtgtcacaggtaaaagaatttcaggaccaggtttaaactttattttaaatatttttatacttaggtctctttttcctgcctctccccaaagaagagccactggccttagttgtttgagcttactgcttatattatagagtgtaaataggtaactagagactaaaattttattaaccagcatgtttggtatatttaaagcagtgactgagtgtgtttgagtgagtggctgagtgcagtgtcttttgtttaaacacactgcctcgtgtctttgtagctgattcagagagtttgaattgtggggtgggagactaacttcagctccaggctgcagtaatgtgttggtagttacacttgaggcatttttttgttgttgttaattaactctatagtctcaaactatttttgcaaatatatcatttttcctaattggttcttgacgtgcagtggactggctctgtgaatgattggcagggtcttagttttgcgagagtatttccttctaagaattattgtgatctgcagaaacagccatttgattcaaaaatcatgtagaaaaggagtaggagaagcaaaacgtttcatttttgggccttaaccatttgaaatgtttggactttaaacataaagccatggagtttataaagccaagtaaccatttgatatggataataatatctactctagagagagtatatatatgcacattgatttttaatgctgttaagatacttttgtaaaactgtaggaacaagagtaattagaccaaattgaagcttaggggacagtaaagtggttgctttccatttagggtaaccatgcatgtggttagtcctctcctcctgagattcagaaccagttgactgtccccttaggtgtataaggagaaaagttgacatgtctgggacctctgacatgtgtacacatgcttgcacacatgcacacacagtgaatgttttaagttatacaaacataagaccttaagatgcaaagagccagaatattctaaagaggtgatgaacagagggggtggaaactgcatcacagatgttttccaagggccagggtggaatctgagctctagtgtctgactttgagatgcattatatttttaacacataaatgaggggatccatatcacattctttcttgtggaccaccaaattgaaggcttt

SEQ ID NO: 18261 - protein, 513 aa, Homo sapiens; identical to SEQ ID NO: 2204

SEQ ID NO: 18262 - DNA, 8192 bp, Homo sapiens
gggggacatggttacattaaagctaactcccgtcatctcaattatctccttggaagtagttttcacaaatataaaaacgccctacggtggctgttttcggtgatcatggaggaagcactttactcccaccaaatgtcacaaatgaatttccagaatatgggaccatggaggaaggtggagaaggcctaagggcttctctggaatttgatggtgaggctctgccatgccacccacaagagcagcagggtgtccagcctcttactggctgccactctgggctcgacagtgttacagaaggaccaaaagatgtcagagaggccccctctcaaagtcatctcaaggaacaaagtttacagcccattgactctttgatttcagctctgaaagccacagaagccagaatcatttccggaacattacaggctacaaaggtactggaccaagatgctgtttctagtttttcagttcagcaggtggaaaaagagctggacactgccagtcgtaaaacacagagagtcaacaaaacgctccctgctggccaaaaaaatttaccagaaatacctctttcagctgaagtaacaacggaggaaagtttttatttgagcatccagaaagatctcaccgcgctgttaactggagacactcaggcagagatttcccagataatgaataatgggaggaaaggggctgtctgtgtgcaggagccatcttgtcctttggcctccctcgggagctcagcagtgacctgccactctgcaggcagtgttggtttcttgaaagagcagaggtctgctcttgggagagagcacccagggggatgtgatcgaagcagctccatgggacgcccaggccgggtcaaacatgtggaatttcaaggagtggaaatactgtggacaggaggagacaagagagagacccagcatcctatagattttgagacatcactgcaaagaacagcctctcctgacagcaaagagtcttccaaagtgccacgccatctcatctcatcagctggtttgtgtaattcaagtagtttaactgagaatgtttgggatgaatcctggaaagctccttcagagaggcctggcactagctcggggacattttcccctgtgcgtcttgatgagagtggagaggatgaagtcttcctacaggaaaacaaacagcatcttgagaagacacctaaaccagagagagacagggaaaggatcagcgaacaagaggagcacgttaagggggaagatgaagacatccttgggcctggatatacggaggactccaccgacgtgtacagctcccagtttgaaaccattttggacaacacttctttatactacagtgcagagtccctggagacattatactcagagcctgatagctattttagctttgaaatgcccctcactccaatgatacaacagcgcattaaagaaggtggtcagttcttggagaggacatcagggggaggacatcaggatatcctgagtgtgtctgcagatggtggcatcgtgatgggctattctagtggcgtcaccaatgggctgaatgatgccagcgactccatctacacgaaaggcaccccggagattgctttctggggaagcaatgctggggtgaaaacaacacggctagaagctcattctgaaatggggagcactgaaattttggaaaaggagaccccagaaaatctcagtaatggtaccagcagcaatgtggaagcagccaaaaggttggccaaacgcctttatcagctggacagattcaaaagatcagatgttgcaaaacaccttggcaagaacaacgaatttagcaaactagttgcagaagaatatctgaagttttttgattttacaggaatgacgctggatcagtcactcaggtatttctttaaagcattctctcttgtgggagaaactcaagaacgagagagagttttaatacacttctccaatagatatttttattgtaacccagataccattgcttcacaagatggagtccattgccttacctgtgcaataatgcttcttaataccgatctacatggccacaatattggaaagaagatgacctgtcaggagttcattgcaaatctgcaaggggtaaatgagggtgttgatttctccaaggatctgctgaaagctctgtacaactcaatcaagaatgagaagcttgaatgggcagtagatgatgaagagaaaaaaaagtctccctcagaaagtactgaggagaaagctaacggaacacatccaaagaccatcagtcgtattggaagtactactaacccatttttggacattcctcatgatccaaatgctgctgtgtacaaaagtggattcttggctcggaaaattcatgcagatatggatggaaagaagactccaagaggaaaacgaggatggaaaaccttttatgctgtactgaagggaacagttctttacttgcaaaaggatgaatacaagccagaaaaggccttgtctgaagaggacttgaaaaacgctgtgagtgtgcaccacgcattggcatccaaggccacggactatgagaagaaaccaaacgtgtttaaacttaaaactgccgactggagggtcttgctttttcaaactcagagcccagaggaaatgcaagggtggataaacaaaatcaattgtgtggcagctgtattttctgcaccaccatttccagcagcaatcggctctcagaagaagtttagccgcccacttctgcctgccactacaacaaaactgtctcaggaggagcaactgaagtcacatgaaagtaagctgaagcagatcaccaccgagctggccgagcaccgctcatatccccccgacaagaaggtcaaagccaaggacgtcgatgagtacaaactgaaagaccactatctggagtttgagaaaacccgctatgaaatgtatgtcagcattctcaaggaaggaggcaaagagctactgagtaacgatgaaagcgaggctgcaggactgaagaagtcgcactcgagtccttcgctgaacccggatacttctccaatcactgccaaagtcaagcgtaacgtgtcagagaggaaggatcaccgacctgaaacaccaagcattaagcaaaaagttacttagagtccatctgcggccaggaagtgctggtcatggagcaaaatagggtttttcaagatctttctggtaatccgtgaatatatttaaaaaaaaaaagtctgtgacaaaacggtgcattagtaattttttctattgtatatttttgttagtttctgtacagattgtctttgctcttgatttcttttgctttgatgatttttgcaacttgatagctaatgcaccttttctgtgaggaggaggggatcgtgatttcagaatgaattatgtatcccttctcttttggttttctcttgtttgcagtctgctcagttgttttatgtattctcatatcaactgttaaacttttttttaaggttaaagaatttaatccattgtgaaacacttaactggacaaactgtagttttagtaaattctagctggagttaatatacgcctttatatgtgaaatcttgcccagtcacagaggtagaattgagcactcacagatgctccagtaagaatcacagtgctgggaatctagttgctccaatatgaggcagcttcatgtgcagcttagcacttgttgttgagatcggaccctgctggaagcagggaaaagaagcgtgaagatcgtaggattgagaacttagggaagcacattagcttgcttgaagtgctgattccatttcagccaagcaagggaaagaggaagtggagtcattttgcctttgaaggctgaggaaagattgatacccagttaattttgtttgctaaaggatgggggcaataatcggcccttgaggagctgcagcagtaggcatgtgctcagtctgcaggaattgttacctcactcccacagggtctagactagaaatccatcatctctatcgttgatatccttccatccaggaatagatttttcttactctacatatgtgtgtgtgcgtgcgtgtgtgtgcgtgtgtgggcatggggttgtgtcctggttgtgatattgaggtcttccttcctaacaaattaatactaaaatgaaacagcttttcttgtgtccttaagacaaaataaggaaggaaaacgtagctgcagttgtccacgatggatattggttctttaaaatatatctgaaagtagtagtcagaatgaattatggttggaaaactgaggaatcttctggttgcaggtgcaaagtgactttgtttattcttgtctcagtctccttgatagccacttcactctgctactactcaactttctcctaaaaatacttcatctattttcagtcctttctttctgtctactcaaaatggttctattaactttgcagtcatgagcttgttccagttacagtccctttgaagttcagggtgataaacagaatattcttctgtagaggaagagaaaggagtgaaagtttagcccactgagacctagagctttgtgatttcctaaccttgaaactctgtaatccctaaagttaaaatctccgcaagtggcacaacttcagaactaatagtatcactttgatttttctttttcctcccttagaaagtttctctagttctatagtttatttgttgaaggtactatgaccaaagaatcagctgctctacaggaatagcatggttccagtgaattagagaaaacctgctgtaaagccatggtagtgtctaagtggtatgttattatgatgtactagcatttatttacagaattatttattaacgtttacttccttcccctctgtaaatgtccatgactattgcccagagaaggcttacccctctctagggttgcagttgctttctttgtaataagtattttgccacacctgtaaaaaaaaaaacctcacttttaactctctgccttgtttgggtaaaggcagtaactaagtttatgtttcagaactgcaaaacaaacaggatagttaccaatatggcccatgtatcagattgatttttgtagcctctcactgaatccaacatatccacaagcaagttatctgtctttctacctgataatctaaattatcaggatatttgttttctgcctaaatgtttatactaagccgaggggagagaggtacctagaccatgtcatctacaagcttcagtaactaaagaaaaaggaacttccctgagtggcttgaatgtgtttgcccacagtctatatctatgtatatagaatgtctgtatgtattttacttatttaatatacattgaatggtaccttgctacagtatttctgacatttagagtagtgttgaaatactcggctagcatcagcaccactatagcactgtccgtgtcatatgagtcactaatattaactccagggacttctggataggctaatagatcattggatacgaagggctcttttgaagcttcagtataccatgtttgcatagtttatctttaaaaacaactttaaaggttcttttgtgagccaggatctcagactgccgtagcatgatgctgtccatctttagcgcatgggctgagaacacctcttccctgaggcttctgaaggttgctgtctgtcatgagtgcatgaaggaggccaagagtttatgctatgggaggaaacagtcactgatttgcctagattctgagagtctggcccatagccaaccacattttcctttgggataatttatttcctgtggcatctagccagaagaaattgaggatgtttcctttcacagctgctccaagcctgttgcccaattcacggtacaagggagcaccccttccctttcctctgaaggtacgccacccacctccgtcgcccacctcagcgcccaggagccttgggacttccttccatatgataaatcattcttcttcacgtcaatacacttcatattaatttctagtacagaaaatcttgacagctatcagaatgccttggtcatagtgttgttgcaaaattgaccatacaggtggcccatgtataaaatctgaattttaggggtttgtccccacctcgcatgctggcttttacagggaggtgtctgggattcctcattagcaatcaaaacttaattactgggatgcagagtccttactttatcgccagcccgtaggcatttctgaagtgcacttttttgaaacatcattttgctaactctcagcagtgtctaattaaactgagcaatacttttgtgaattttaattaatctcagcaaaaccatgatgggagagagtcctctgatggaaatgtagtccctggattatgtgtaacctttttattcctcttagatgcagaggatagaaagcattttttggtgcagtggtcttgtggcaaacacaagaccctctatgcgtctccaactgttatcctaatctagaaaatgaggactggcccctgggcaaaagtgacatgaggaatttactctggaagaggaaaatctgggtggctttccaaggctaagataggtttgtatttcaccctgtggccaagctacagaacttctgagattgtggaagaatttttgcaaccagcagggaaagaggcctcttactgcctaaacacaaagttacactgagcttttctactgtcctttgcctattgctccctctatcatgtaaagatctgggaaggatgagaggcagggcctgcttgtcatgagctgcactcttttctttttaactaatcattgacaattggaagaaaattgacgttaaagaagtttctccattgtcttactaacaaaaccttttgggtttcattaattgtccttgaaattgagttcctttggcatttttccttgcagtcatcagttaagcatgttgcatcctgaattcacagaagtttagctttgcaggtttgaatctctgtaatttaactcccgtggacttggtcgagttttcagcaggttgggagccacctctcttcatttcagcagtgagtcatcccttgacttttcaaatgacagaattttttccaattgtaaaattagcactgtaaaacaaagaaccaaagtggcatcctaagagttgttaaacctgaagtctagtttatgaggaattgtccaagttggagtttaaatagtatctgcttttgtctcaaagcatctaagttattctgacagaaaatggtaagtcagctttgcaggcagatgcgcctctgggcctcctaccttgctccacagctttctggccatcttgtctcccaggccatgccactgctctgccacatgtcagcaaatttctttccaccagtcttatagcatcttacatgatcaaatcatcacagaataaccccgtgatagattattgatagcaatagagaggggctttgtcactgatttttctctcagattccttttccatctctcatccataaaggaaggactgaaatccaaaggcattctccttttgtacctacagtatccagaacccacgtgggcagccttctgcttatgacaataattggcccattgcatgcagagagaatgtcttcatagagagaatgtcattaaatacttgaatctgcatgacagtttgacttgaatgcaacagcaggaaaattttgcaagttacataattgtatatacagtaggttttcttaagtctcttcggttcatcctttgtaatttgtgtgtgtatctgtagtattgcaggcttttggagactattcttacaggcagtatgtcagtcatcaaagaaaatgctgtcacctgccattgttgtatttgtgggtatttatagttgtatgtatgtaaatgcatcagtgtgtagattgcatatcagtgtatggtacatgtacatcaaaattatttttgtccttaatcagtgtgatatgaaaagcaagtacaacctcataggactgattatataatgaagttgttgagagtatatatagtggtattgttttattaaacttaaactcaaataatattttgattaaaatttttaataagactttatgctagaaaattctttgagctttgaatcaccagggcaaaaatgactttcaactaaccttgtgaatcttttgcagtgtactgtgtgcaataccaagggcatagctccctgtaatttgggaaatacagaaagaaaagaaaaaaaaaaaaaaaggcagcctgtgcagtcttagta

SEQ ID NO: 18263 - protein, 982 aa, Homo sapiens
MEEGGEGLRASLEFDGEALPCHPQEQQGVQPLTGCHSGLDSVTEGPKDVREAPSQSHLKEQSLQPIDSLISALKATEARIISGTLQATKVLDQDAVSSFSVQQVEKELDTASRKTQRVNKTLPAGQKNLPEIPLSAEVTTEESFYLSIQKDLTALLTGDTQAEISQIMNNGRKGAVCVQEPSCPLASLGSSAVTCHSAGSVGFLKEQRSALGREHPGGCDRSSSMGRPGRVKHVEFQGVEILWTGGDKRETQHPIDFETSLQRTASPDSKESSKVPRHLISSAGLCNSSSLTENVWDESWKAPSERPGTSSGTFSPVRLDESGEDEVFLQENKQHLEKTPKPERDRERISEQEEHVKGEDEDILGPGYTEDSTDVYSSQFETILDNTSLYYSAESLETLYSEPDSYFSFEMPLTPMIQQRIKEGGQFLERTSGGGHQDILSVSADGGIVMGYSSGVTNGLNDASDSIYTKGTPEIAFWGSNAGVKTTRLEAHSEMGSTEILEKETPENLSNGTSSNVEAAKRLAKRLYQLDRFKRSDVAKHLGKNNEFSKLVAEEYLKFFDFTGMTLDQSLRYFFKAFSLVGETQERERVLIHFSNRYFYCNPDTIASQDGVHCLTCAIMLLNTDLHGHNIGKKMTCQEFIANLQGVNEGVDFSKDLLKALYNSIKNEKLEWAVDDEEKKKSPSESTEEKANGTHPKTISRIGSTTNPFLDIPHDPNAAVYKSGFLARKIHADMDGKKTPRGKRGWKTFYAVLKGTVLYLQKDEYKPEKALSEEDLKNAVSVHHALASKATDYEKKPNVFKLKTADWRVLLFQTQSPEEMQGWINKINCVAAVFSAPPFPAAIGSQKKFSRPLLPATTTKLSQEEQLKSHESKLKQITTELAEHRSYPPDKKVKAKDVDEYKLKDHYLEFEKTRYEMYVSILKEGGKELLSNDESEAAGLKKSHSSPSLNPDTSPITAKVKRNVSERKDHRPETPSIKQKVT

SEQ ID NO: 18264 - DNA, 8192 bp, Homo sapiens
aacaaagagcacgcggcgctggccgccggcactcgcgccctgaggctgcggccccggagcgcccggcggcggtttcggcgcgcggccgggctggcgatggaagatggaaggaaggagcgcagcgggtgatcatggaggaagcactttactcccaccaaatgtcacaaatgaatttccagaatatgggaccatggaggaaggtggagaaggcctaagggcttctctggaatttgatggtgaggctctgccatgccacccacaagagcagcagggtgtccagcctcttactggctgccactctgggctcgacagtgttacagaaggaccaaaagatgtcagagaggccccctctcaaagtcatctcaaggaacaaagtttacagcccattgactctttgatttcagctctgaaagccacagaagccagaatcatttccggaacattacaggctacaaaggtactggaccaagatgctgtttctagtttttcagttcagcaggtggaaaaagagctggacactgccagtcgtaaaacacagagagtcaacaaaacgctccctgctggccaaaaaaatttaccagaaatacctctttcagctgaagtaacaacggaggaaagtttttatttgagcatccagaaagatctcaccgcgctgttaactggagacactcaggcagagatttcccagataatgaataatgggaggaaaggggctgtctgtgtgcaggagccatcttgtcctttggcctccctcgggagctcagcagtgacctgccactctgcaggcagtgttggtttcttgaaagagcagaggtctgctcttgggagagagcacccagggggatgtgatcgaagcagctccatgggacgcccaggccgggtcaaacatgtggaatttcaaggagtggaaatactgtggacaggaggagacaagagagagacccagcatcctatagattttgagacatcactgcaaagaacagcctctcctgacagcaaagagtcttccaaagtgccacgccatctcatctcatcagctggtttgtgtaattcaagtagtttaactgagaatgtttgggatgaatcctggaaagctccttcagagaggcctggcactagctcggggacattttcccctgtgcgtcttgatgagagtggagaggatgaagtcttcctacaggaaaacaaacagcatcttgagaagacacctaaaccagagagagacagggaaaggatcagcgaacaagaggagcacgttaagggggaagatgaagacatccttgggcctggatatacggaggactccaccgacgtgtacagctcccagtttgaaaccattttggacaacacttctttatactacagtgcagagtccctggagacattatactcagagcctgatagctattttagctttgaaatgcccctcactccaatgatacaacagcgcattaaagaaggtggtcagttcttggagaggacatcagggggaggacatcaggatatcctgagtgtgtctgcagatggtggcatcgtgatgggctattctagtggcgtcaccaatgggctgaatgatgccagcgactccatctacacgaaaggcaccccggagattgctttctggggaagcaatgctggggtgaaaacaacacggctagaagctcattctgaaatggggagcactgaaattttggaaaaggagaccccagaaaatctcagtaatggtaccagcagcaatgtggaagcagccaaaaggttggccaaacgcctttatcagctggacagattcaaaagatcagatgttgcaaaacaccttggcaagaacaacgaatttagcaaactagttgcagaagaatatctgaagttttttgattttacaggaatgacgctggatcagtcactcaggtatttctttaaagcattctctcttgtgggagaaactcaagaacgagagagagttttaatacacttctccaatagatatttttattgtaacccagataccattgcttcacaagatggagtccattgccttacctgtgcaataatgcttcttaataccgatctacatggccacaatattggaaagaagatgacctgtcaggagttcattgcaaatctgcaaggggtaaatgagggtgttgatttctccaaggatctgctgaaagctctgtacaactcaatcaagaatgagaagcttgaatgggcagtagatgatgaagagaaaaaaaagtctccctcagaaagtactgaggagaaagctaacggaacacatccaaagaccatcagtcgtattggaagtactactaacccatttttggacattcctcatgatccaaatgctgctgtgtacaaaagtggattcttggctcggaaaattcatgcagatatggatggaaagaagactccaagaggaaaacgaggatggaaaaccttttatgctgtactgaagggaacagttctttacttgcaaaaggatgaatacaagccagaaaaggccttgtctgaagaggacttgaaaaacgctgtgagtgtgcaccacgcattggcatccaaggccacggactatgagaagaaaccaaacgtgtttaaacttaaaactgccgactggagggtcttgctttttcaaactcagagcccagaggaaatgcaagggtggataaacaaaatcaattgtgtggcagctgtattttctgcaccaccatttccagcagcaatcggctctcagaagaagtttagccgcccacttctgcctgccactacaacaaaactgtctcaggaggagcaactgaagtcacatgaaagtaagctgaagcagatcaccaccgagctggccgagcaccgctcatatccccccgacaagaaggtcaaagccaaggacgtcgatgagtacaaactgaaagaccactatctggagtttgagaaaacccgctatgaaatgtatgtcagcattctcaaggaaggaggcaaagagctactgagtaacgatgaaagcgaggctgcaggactgaagaagtcgcactcgagtccttcgctgaacccggatacttctccaatcactgccaaagtcaagcgtaacgtgtcagagaggaaggatcaccgacctgaaacaccaagcattaagcaaaaagttacttagagtccatctgcggccaggaagtgctggtcatggagcaaaatagggtttttcaagatctttctggtaatccgtgaatatatttaaaaaaaaaaagtctgtgacaaaacggtgcattagtaattttttctattgtatatttttgttagtttctgtacagattgtctttgctcttgatttcttttgctttgatgatttttgcaacttgatagctaatgcaccttttctgtgaggaggaggggatcgtgatttcagaatgaattatgtatcccttctcttttggttttctcttgtttgcagtctgctcagttgttttatgtattctcatatcaactgttaaacttttttttaaggttaaagaatttaatccattgtgaaacacttaactggacaaactgtagttttagtaaattctagctggagttaatatacgcctttatatgtgaaatcttgcccagtcacagaggtagaattgagcactcacagatgctccagtaagaatcacagtgctgggaatctagttgctccaatatgaggcagcttcatgtgcagcttagcacttgttgttgagatcggaccctgctggaagcagggaaaagaagcgtgaagatcgtaggattgagaacttagggaagcacattagcttgcttgaagtgctgattccatttcagccaagcaagggaaagaggaagtggagtcattttgcctttgaaggctgaggaaagattgatacccagttaattttgtttgctaaaggatgggggcaataatcggcccttgaggagctgcagcagtaggcatgtgctcagtctgcaggaattgttacctcactcccacagggtctagactagaaatccatcatctctatcgttgatatccttccatccaggaatagatttttcttactctacatatgtgtgtgtgcgtgcgtgtgtgtgcgtgtgtgggcatggggttgtgtcctggttgtgatattgaggtcttccttcctaacaaattaatactaaaatgaaacagcttttcttgtgtccttaagacaaaataaggaaggaaaacgtagctgcagttgtccacgatggatattggttctttaaaatatatctgaaagtagtagtcagaatgaattatggttggaaaactgaggaatcttctggttgcaggtgcaaagtgactttgtttattcttgtctcagtctccttgatagccacttcactctgctactactcaactttctcctaaaaatacttcatctattttcagtcctttctttctgtctactcaaaatggttctattaactttgcagtcatgagcttgttccagttacagtccctttgaagttcagggtgataaacagaatattcttctgtagaggaagagaaaggagtgaaagtttagcccactgagacctagagctttgtgatttcctaaccttgaaactctgtaatccctaaagttaaaatctccgcaagtggcacaacttcagaactaatagtatcactttgatttttctttttcctcccttagaaagtttctctagttctatagtttatttgttgaaggtactatgaccaaagaatcagctgctctacaggaatagcatggttccagtgaattagagaaaacctgctgtaaagccatggtagtgtctaagtggtatgttattatgatgtactagcatttatttacagaattatttattaacgtttacttccttcccctctgtaaatgtccatgactattgcccagagaaggcttacccctctctagggttgcagttgctttctttgtaataagtattttgccacacctgtaaaaaaaaaaacctcacttttaactctctgccttgtttgggtaaaggcagtaactaagtttatgtttcagaactgcaaaacaaacaggatagttaccaatatggcccatgtatcagattgatttttgtagcctctcactgaatccaacatatccacaagcaagttatctgtctttctacctgataatctaaattatcaggatatttgttttctgcctaaatgtttatactaagccgaggggagagaggtacctagaccatgtcatctacaagcttcagtaactaaagaaaaaggaacttccctgagtggcttgaatgtgtttgcccacagtctatatctatgtatatagaatgtctgtatgtattttacttatttaatatacattgaatggtaccttgctacagtatttctgacatttagagtagtgttgaaatactcggctagcatcagcaccactatagcactgtccgtgtcatatgagtcactaatattaactccagggacttctggataggctaatagatcattggatacgaagggctcttttgaagcttcagtataccatgtttgcatagtttatctttaaaaacaactttaaaggttcttttgtgagccaggatctcagactgccgtagcatgatgctgtccatctttagcgcatgggctgagaacacctcttccctgaggcttctgaaggttgctgtctgtcatgagtgcatgaaggaggccaagagtttatgctatgggaggaaacagtcactgatttgcctagattctgagagtctggcccatagccaaccacattttcctttgggataatttatttcctgtggcatctagccagaagaaattgaggatgtttcctttcacagctgctccaagcctgttgcccaattcacggtacaagggagcaccccttccctttcctctgaaggtacgccacccacctccgtcgcccacctcagcgcccaggagccttgggacttccttccatatgataaatcattcttcttcacgtcaatacacttcatattaatttctagtacagaaaatcttgacagctatcagaatgccttggtcatagtgttgttgcaaaattgaccatacaggtggcccatgtataaaatctgaattttaggggtttgtccccacctcgcatgctggcttttacagggaggtgtctgggattcctcattagcaatcaaaacttaattactgggatgcagagtccttactttatcgccagcccgtaggcatttctgaagtgcacttttttgaaacatcattttgctaactctcagcagtgtctaattaaactgagcaatacttttgtgaattttaattaatctcagcaaaaccatgatgggagagagtcctctgatggaaatgtagtccctggattatgtgtaacctttttattcctcttagatgcagaggatagaaagcattttttggtgcagtggtcttgtggcaaacacaagaccctctatgcgtctccaactgttatcctaatctagaaaatgaggactggcccctgggcaaaagtgacatgaggaatttactctggaagaggaaaatctgggtggctttccaaggctaagataggtttgtatttcaccctgtggccaagctacagaacttctgagattgtggaagaatttttgcaaccagcagggaaagaggcctcttactgcctaaacacaaagttacactgagcttttctactgtcctttgcctattgctccctctatcatgtaaagatctgggaaggatgagaggcagggcctgcttgtcatgagctgcactcttttctttttaactaatcattgacaattggaagaaaattgacgttaaagaagtttctccattgtcttactaacaaaaccttttgggtttcattaattgtccttgaaattgagttcctttggcatttttccttgcagtcatcagttaagcatgttgcatcctgaattcacagaagtttagctttgcaggtttgaatctctgtaatttaactcccgtggacttggtcgagttttcagcaggttgggagccacctctcttcatttcagcagtgagtcatcccttgacttttcaaatgacagaattttttccaattgtaaaattagcactgtaaaacaaagaaccaaagtggcatcctaagagttgttaaacctgaagtctagtttatgaggaattgtccaagttggagtttaaatagtatctgcttttgtctcaaagcatctaagttattctgacagaaaatggtaagtcagctttgcaggcagatgcgcctctgggcctcctaccttgctccacagctttctggccatcttgtctcccaggccatgccactgctctgccacatgtcagcaaatttctttccaccagtcttatagcatcttacatgatcaaatcatcacagaataaccccgtgatagattattgatagcaatagagaggggctttgtcactgatttttctctcagattccttttccatctctcatccataaaggaaggactgaaatccaaaggcattctccttttgtacctacagtatccagaacccacgtgggcagccttctgcttatgacaataattggcccattgcatgcagagagaatgtcttcatagagagaatgtcattaaatacttgaatctgcatgacagtttgacttgaatgcaacagcaggaaaattttgcaagttacataattgtatatacagtaggttttcttaagtctcttcggttcatcctttgtaatttgtgtgtgtatctgtagtattgcaggcttttggagactattcttacaggcagtatgtcagtcatcaaagaaaatgctgtcacctgccattgttgtatttgtgggtatttatagttgtatgtatgtaaatgcatcagtgtgtagattgcatatcagtgtatggtacatgtacatcaaaattatttttgtccttaatcagtgtgatatgaaaagcaagtacaacctcataggactgattatataatgaagttgttgagagtatatatagtggtattgttttattaaacttaaactcaaataatattttgattaaaatttttaataagactttatgctagaaaattctttgagctttgaatcaccagggcaaaaatgactttcaactaaccttgtgaatcttttgcagtgtactgtgtgcaataccaagggcatagctccctgtaatttgggaaatacagaaagaaaagaaaaaaaaaaa

SEQ ID NO: 18265 - protein, 1011 aa, Homo sapiens
MEGRSAAGDHGGSTLLPPNVTNEFPEYGTMEEGGEGLRASLEFDGEALPCHPQEQQGVQPLTGCHSGLDSVTEGPKDVREAPSQSHLKEQSLQPIDSLISALKATEARIISGTLQATKVLDQDAVSSFSVQQVEKELDTASRKTQRVNKTLPAGQKNLPEIPLSAEVTTEESFYLSIQKDLTALLTGDTQAEISQIMNNGRKGAVCVQEPSCPLASLGSSAVTCHSAGSVGFLKEQRSALGREHPGGCDRSSSMGRPGRVKHVEFQGVEILWTGGDKRETQHPIDFETSLQRTASPDSKESSKVPRHLISSAGLCNSSSLTENVWDESWKAPSERPGTSSGTFSPVRLDESGEDEVFLQENKQHLEKTPKPERDRERISEQEEHVKGEDEDILGPGYTEDSTDVYSSQFETILDNTSLYYSAESLETLYSEPDSYFSFEMPLTPMIQQRIKEGGQFLERTSGGGHQDILSVSADGGIVMGYSSGVTNGLNDASDSIYTKGTPEIAFWGSNAGVKTTRLEAHSEMGSTEILEKETPENLSNGTSSNVEAAKRLAKRLYQLDRFKRSDVAKHLGKNNEFSKLVAEEYLKFFDFTGMTLDQSLRYFFKAFSLVGETQERERVLIHFSNRYFYCNPDTIASQDGVHCLTCAIMLLNTDLHGHNIGKKMTCQEFIANLQGVNEGVDFSKDLLKALYNSIKNEKLEWAVDDEEKKKSPSESTEEKANGTHPKTISRIGSTTNPFLDIPHDPNAAVYKSGFLARKIHADMDGKKTPRGKRGWKTFYAVLKGTVLYLQKDEYKPEKALSEEDLKNAVSVHHALASKATDYEKKPNVFKLKTADWRVLLFQTQSPEEMQGWINKINCVAAVFSAPPFPAAIGSQKKFSRPLLPATTTKLSQEEQLKSHESKLKQITTELAEHRSYPPDKKVKAKDVDEYKLKDHYLEFEKTRYEMYVSILKEGGKELLSNDESEAAGLKKSHSSPSLNPDTSPITAKVKRNVSERKDHRPETPSIKQKVT

SEQ ID NO: 18266 - DNA, 6216 bp, Homo sapiens
agtgacgtgagctgtgcctggaacaatcagactcgctgcaaacagggtagttgaagatgctgggggaggcagcctggtgcttcttaagctaacgcggatcacggcgctcaggagctgctcaggcacaaccccgcagagttcctccagcgtgagagccttggaacggttggaaagtgcctttttatttctctaaaccccttccttagttgaccttcgaaaatgattggcgtgaatagtgtccagagtgccagcaaggtacgggtgaggacctcaggttccgtgaaatactcccgggaggattctatccggcggcagtctcacaggtcaaagtccatgaaaatttccaactcctcagagttttctgctaaggagaacaaggctctgtacaactcaatcaagaatgagaagcttgaatgggcagtagatgatgaagagaaaaaaaagtctccctcagaaagtactgaggagaaagctaacggaacacatccaaagaccatcagtcgtattggaagtactactaacccatttttggacattcctcatgatccaaatgctgctgtgtacaaaagtggattcttggctcggaaaattcatgcagatatggatggaaagaagactccaagaggaaaacgaggatggaaaaccttttatgctgtactgaagggaacagttctttacttgcaaaagtcacatgaaagtaagctgaagcagatcaccaccgagctggccgagcaccgctcatatccccccgacaagaaggtcaaagccaaggacgtcgatgagtacaaactgaaagaccactatctggagtttgagaaaacccgctatgaaatgtatgtcagcattctcaaggaaggaggcaaagagctactgagtaacgatgaaagcgaggctgcaggactgaagaagtcgcactcgagtccttcgctgaacccggatacttctccaatcactgccaaagtcaagcgtaacgtgtcagagaggaaggatcaccgacctgaaacaccaagcattaagcaaaaagttacttagagtccatctgcggccaggaagtgctggtcatggagcaaaatagggtttttcaagatctttctggtaatccgtgaatatatttaaaaaaaaaaagtctgtgacaaaacggtgcattagtaattttttctattgtatatttttgttagtttctgtacagattgtctttgctcttgatttcttttgctttgatgatttttgcaacttgatagctaatgcaccttttctgtgaggaggaggggatcgtgatttcagaatgaattatgtatcccttctcttttggttttctcttgtttgcagtctgctcagttgttttatgtattctcatatcaactgttaaacttttttttaaggttaaagaatttaatccattgtgaaacacttaactggacaaactgtagttttagtaaattctagctggagttaatatacgcctttatatgtgaaatcttgcccagtcacagaggtagaattgagcactcacagatgctccagtaagaatcacagtgctgggaatctagttgctccaatatgaggcagcttcatgtgcagcttagcacttgttgttgagatcggaccctgctggaagcagggaaaagaagcgtgaagatcgtaggattgagaacttagggaagcacattagcttgcttgaagtgctgattccatttcagccaagcaagggaaagaggaagtggagtcattttgcctttgaaggctgaggaaagattgatacccagttaattttgtttgctaaaggatgggggcaataatcggcccttgaggagctgcagcagtaggcatgtgctcagtctgcaggaattgttacctcactcccacagggtctagactagaaatccatcatctctatcgttgatatccttccatccaggaatagatttttcttactctacatatgtgtgtgtgcgtgcgtgtgtgtgcgtgtgtgggcatggggttgtgtcctggttgtgatattgaggtcttccttcctaacaaattaatactaaaatgaaacagcttttcttgtgtccttaagacaaaataaggaaggaaaacgtagctgcagttgtccacgatggatattggttctttaaaatatatctgaaagtagtagtcagaatgaattatggttggaaaactgaggaatcttctggttgcaggtgcaaagtgactttgtttattcttgtctcagtctccttgatagccacttcactctgctactactcaactttctcctaaaaatacttcatctattttcagtcctttctttctgtctactcaaaatggttctattaactttgcagtcatgagcttgttccagttacagtccctttgaagttcagggtgataaacagaatattcttctgtagaggaagagaaaggagtgaaagtttagcccactgagacctagagctttgtgatttcctaaccttgaaactctgtaatccctaaagttaaaatctccgcaagtggcacaacttcagaactaatagtatcactttgatttttctttttcctcccttagaaagtttctctagttctatagtttatttgttgaaggtactatgaccaaagaatcagctgctctacaggaatagcatggttccagtgaattagagaaaacctgctgtaaagccatggtagtgtctaagtggtatgttattatgatgtactagcatttatttacagaattatttattaacgtttacttccttcccctctgtaaatgtccatgactattgcccagagaaggcttacccctctctagggttgcagttgctttctttgtaataagtattttgccacacctgtaaaaaaaaaaacctcacttttaactctctgccttgtttgggtaaaggcagtaactaagtttatgtttcagaactgcaaaacaaacaggatagttaccaatatggcccatgtatcagattgatttttgtagcctctcactgaatccaacatatccacaagcaagttatctgtctttctacctgataatctaaattatcaggatatttgttttctgcctaaatgtttatactaagccgaggggagagaggtacctagaccatgtcatctacaagcttcagtaactaaagaaaaaggaacttccctgagtggcttgaatgtgtttgcccacagtctatatctatgtatatagaatgtctgtatgtattttacttatttaatatacattgaatggtaccttgctacagtatttctgacatttagagtagtgttgaaatactcggctagcatcagcaccactatagcactgtccgtgtcatatgagtcactaatattaactccagggacttctggataggctaatagatcattggatacgaagggctcttttgaagcttcagtataccatgtttgcatagtttatctttaaaaacaactttaaaggttcttttgtgagccaggatctcagactgccgtagcatgatgctgtccatctttagcgcatgggctgagaacacctcttccctgaggcttctgaaggttgctgtctgtcatgagtgcatgaaggaggccaagagtttatgctatgggaggaaacagtcactgatttgcctagattctgagagtctggcccatagccaaccacattttcctttgggataatttatttcctgtggcatctagccagaagaaattgaggatgtttcctttcacagctgctccaagcctgttgcccaattcacggtacaagggagcaccccttccctttcctctgaaggtacgccacccacctccgtcgcccacctcagcgcccaggagccttgggacttccttccatatgataaatcattcttcttcacgtcaatacacttcatattaatttctagtacagaaaatcttgacagctatcagaatgccttggtcatagtgttgttgcaaaattgaccatacaggtggcccatgtataaaatctgaattttaggggtttgtccccacctcgcatgctggcttttacagggaggtgtctgggattcctcattagcaatcaaaacttaattactgggatgcagagtccttactttatcgccagcccgtaggcatttctgaagtgcacttttttgaaacatcattttgctaactctcagcagtgtctaattaaactgagcaatacttttgtgaattttaattaatctcagcaaaaccatgatgggagagagtcctctgatggaaatgtagtccctggattatgtgtaacctttttattcctcttagatgcagaggatagaaagcattttttggtgcagtggtcttgtggcaaacacaagaccctctatgcgtctccaactgttatcctaatctagaaaatgaggactggcccctgggcaaaagtgacatgaggaatttactctggaagaggaaaatctgggtggctttccaaggctaagataggtttgtatttcaccctgtggccaagctacagaacttctgagattgtggaagaatttttgcaaccagcagggaaagaggcctcttactgcctaaacacaaagttacactgagcttttctactgtcctttgcctattgctccctctatcatgtaaagatctgggaaggatgagaggcagggcctgcttgtcatgagctgcactcttttctttttaactaatcattgacaattggaagaaaattgacgttaaagaagtttctccattgtcttactaacaaaaccttttgggtttcattaattgtccttgaaattgagttcctttggcatttttccttgcagtcatcagttaagcatgttgcatcctgaattcacagaagtttagctttgcaggtttgaatctctgtaatttaactcccgtggacttggtcgagttttcagcaggttgggagccacctctcttcatttcagcagtgagtcatcccttgacttttcaaatgacagaattttttccaattgtaaaattagcactgtaaaacaaagaaccaaagtggcatcctaagagttgttaaacctgaagtctagtttatgaggaattgtccaagttggagtttaaatagtatctgcttttgtctcaaagcatctaagttattctgacagaaaatggtaagtcagctttgcaggcagatgcgcctctgggcctcctaccttgctccacagctttctggccatcttgtctcccaggccatgccactgctctgccacatgtcagcaaatttctttccaccagtcttatagcatcttacatgatcaaatcatcacagaataaccccgtgatagattattgatagcaatagagaggggctttgtcactgatttttctctcagattccttttccatctctcatccataaaggaaggactgaaatccaaaggcattctccttttgtacctacagtatccagaacccacgtgggcagccttctgcttatgacaataattggcccattgcatgcagagagaatgtcttcatagagagaatgtcattaaatacttgaatctgcatgacagtttgacttgaatgcaacagcaggaaaattttgcaagttacataattgtatatacagtaggttttcttaagtctcttcggttcatcctttgtaatttgtgtgtgtatctgtagtattgcaggcttttggagactattcttacaggcagtatgtcagtcatcaaagaaaatgctgtcacctgccattgttgtatttgtgggtatttatagttgtatgtatgtaaatgcatcagtgtgtagattgcatatcagtgtatggtacatgtacatcaaaattatttttgtccttaatcagtgtgatatgaaaagcaagtacaacctcataggactgattatataatgaagttgttgagagtatatatagtggtattgttttattaaacttaaactcaaataatattttgattaaaatttttaataagactttatgctagaaaattctttgagctttgaatcaccagggcaaaaatgactttcaactaaccttgtgaatcttttgcagtgtactgtgtgcaataccaagggcatagctccctgtaatttgggaaatacagaaagaaaagaaaaaaaaaaaaaaaggcagcctgtgcagtcttagtaactttagtattaagagcacttaaagtcaaactgacaattttgggcttattacaaaatgtgatgctttaaagcacacgttctttattgttgttgtaattagtccat

SEQ ID NO: 18267 - protein, 270 aa, Homo sapiens
MIGVNSVQSASKVRVRTSGSVKYSREDSIRRQSHRSKSMKISNSSEFSAKENKALYNSIKNEKLEWAVDDEEKKKSPSESTEEKANGTHPKTISRIGSTTNPFLDIPHDPNAAVYKSGFLARKIHADMDGKKTPRGKRGWKTFYAVLKGTVLYLQKSHESKLKQITTELAEHRSYPPDKKVKAKDVDEYKLKDHYLEFEKTRYEMYVSILKEGGKELLSNDESEAAGLKKSHSSPSLNPDTSPITAKVKRNVSERKDHRPETPSIKQKVT

SEQ ID NO: 18268 - DNA, 2728 bp, Homo sapiens
gagcaacgctcatatccccccgacaagaaggtcaaagccaaggacgtcgatgagtacaaactgaaagaccactatctggagtttgagaaaacccgctatgaaatgtatgtcagcattctcaaggaaggaggcaaagagctactgagtaacgatgaaagcgaggctgcaggactgaagaagtcgcactcgagtccttcgctgaacccggatacttctccaatcactgccaaagtcaagcgtaacgtgtcagagaggaaggatcaccgacctgaaacaccaagcattaagcaaaaagttacttagagtccatctgcggccaggaagtgctggtcatggagcaaaatagggtttttcaagatctttctggtaatccgtgaatatatttaaaaaaaaaaagtctgtgacaaaacggtgcattagtaattttttctattgtatatttttgttagtttctgtacagattgtctttgctcttgatttcttttgctttgatgatttttgcaacttgatagctaatgcaccttttctgtgaggaggaggggatcgtgatttcagaatgaattatgtatcccttctcttttggttttctcttgtttgcagtctgctcagttgttttatgtattctcatatcaactgttaaacttttttttaaggttaaagaatttaatccattgtgaaacacttaactggacaaactgtagttttagtaaattctagctggagttaatatacgcctttatatgtgaaatcttgcccagtcacagaggtagaattgagcactcacagatgctccagtaagaatcacagtgctgggaatctagttgctccaatatgaggcagcttcatgtgcagcttagcacttgttgttgagatcggaccctgctggaagcagggaaaagaagcgtgaagatcgtaggattgagaacttagggaagcacattagcttgcttgaagtgctgattccatttcagccaagcaagggaaagaggaagtggagtcattttgcctttgaaggctgaggaaagattgatacccagttaattttgtttgctaaaggatgggggcaataatcggcccttgaggagctgcagcagtaggcatgtgctcagtctgcaggaattgttacctcactcccacagggtctagactagaaatccatcatctctatcgttgatatccttccatccaggaatagatttttcttactctacatatgtgtgtgtgcgtgcgtgtgtgtgcgtgtgtgggcatggggttgtgtcctggttgtgatattgaggtcttccttcctaacaaattaatactaaaatgaaacagcttttcttgtgtccttaagacaaaataaggaaggaaaacgtagctgcagttgtccacgatggatattggttctttaaaatatatctgaaagtagtagtcagaatgaattatggttggaaaactgaggaatcttctggttgcaggtgcaaagtgactttgtttattcttgtctcagtctccttgatagccacttcactctgctactactcaactttctcctaaaaatacttcatctattttcagtcctttctttctgtctactcaaaatggttctattaactttgcagtcatgagcttgttccagttacagtccctttgaagttcagggtgataaacagaatattcttctgtagaggaagagaaaggagtgaaagtttagcccactgagacctagagctttgtgatttcctaaccttgaaactctgtaatccctaaagttaaaatctccgcaagtggcacaacttcagaactaatagtatcactttgatttttctttttcctcccttagaaagtttctctagttctatagtttatttgttgaaggtactatgaccaaagaatcagctgctctacaggaatagcatggttccagtgaattagagaaaacctgctgtaaagccatggtagtgtctaagtggtatgttattatgatgtactagcatttatttacagaattatttattaacgtttacttccttcccctctgtaaatgtccatgactattgcccagagaaggcttacccctctctagggttgcagttgctttctttgtaataagtattttgccacacctgtaaaaaaaaaaacctcacttttaactctctgccttgtttgggtaaaggcagtaactaagtttatgtttcagaactgcaaaacaaacaggatagttaccaatatggcccatgtatcagattgatttttgtagcctctcactgaatccaacatatccacaagcaagttatctgtctttctacctgataatctaaattatcaggatatttgttttctgcctaaatgtttatactaagccgaggggagagaggtacctagaccatgtcatctacaagcttcagtaactaaagaaaaaggaacttccctgagtggcttgaatgtgtttgcccacagtctatatctatgtatatagaatgtctgtatgtattttacttatttaatatacattgaatggtaccttgctacagtatttctgacatttagagtagtgttgaaatactcggctagcatcagcaccactatagcactgtccgtgtcatatgagtcactaatattaactccagggacttctggataggctaatagatcattggatacgaagggctcttttgaagcttcagtataccatgtttgcatagtttatctttaaaaacaactttaaaggttcttttgtgagcca

SEQ ID NO: 18269 - protein, 66 aa, Homo sapiens [sequence omitted]

SEQ ID NO: 18270 - DNA, 1802 bp, Homo sapiens
gggcttcggagaggaaggatggtccaggcgcaccccaggggttgcgatgggctcttcttggtgtctgtatggttgctgcaatgctggggtgaaaacaacacggctagaagctcattctgaaatggggagcactgaaattttggaaaaggagaccccagaaaatctcagtaatggtaccagcagcaatgtggaagcagccaaaaggttggccaaacgcctttatcagctggacagattcaaaagatcagatgttgcaaaacaccttggcaagaacaacgaatttagcaaactagttgcagaagaatatctgaagttttttgattttacaggaatgacgctggatcagtcactcaggtatttctttaaagcattctctcttgtgggagaaactcaagaacgagagagagttttaatacacttctccaatagatatttttattgtaacccagataccattgcttcacaagatggagtccattgccttacctgtgcaataatgcttcttaataccgatctacatggccaccggtggtggcttttgcagccgtagccaagattaaggctcaggatctttgaggcaagaaggaagaggagctgctaagacagctggacaacctgaaggtagacctgtcccagataatattggaaagaagatgacctgtcaggagttcattgcaaatctgcaaggggtaaatgagggtgttgatttctccaaggatctgctgaaagctctgtacaactcaatcaagaatgagaagcttgaatgggcagtagatgatgaagagaaaaaaaagtctccctcagaaagtactgaggagaaagctaacggaacacatccaaagaccatcagtcgtattggaagtactactaacccatttttggacattcctcatgatccaaatgctgctgtgtacaaaagtggattcttggctcggaaaattcatgcagatatggatggaaagaagactccaagaggaaaacgaggatggaaaaccttttatgctgtactgaagggaacagttctttacttgcaaaaggatgaatacaagccagaaaaggccttgtctgaagaggacttgaaaaacgctgtgagtgtgcaccacgcattggcatccaaggccacggactatgagaagaaaccaaacgtgtttaaacttaaaactgccgactggagggtcttgctttttcaaactcagagcccagaggaaatgcaagggtggataaacaaaatcaattgtgtggcagctgtattttctgcaccaccatttccagcagcaatcggctctcagaagaagtttagccgcccacttctgcctgccactacaacaaaactgtctcaggaggagcaactgaagtcacatgaaagtaagctgaagcagatcaccaccgagctggccgagcaccgctcatatccccccgacaagaaggtcaaagccaaggacgtcgatgagtacaaactgaaagaccactatctggagtttgagaaaacccgctatgaaatgtatgtcagcattctcaaggaaggaggcaaagagctactgagtaacgatgaaagcgaggctgcaggactgaagaagtcgcactcgagtccttcgctgaacccggatacttctccaatcactgccaaagtcaagcgtaacgtgtcagagaggaaggatcaccgacctgaaacaccaagcattaagcaaaaagttacttagagtccatctgcggccaggaagtgctggtcatggagcaaaatagggtttttcaagatctttctggtaatccgtgaatatatttaaaaaaaaaaagtctgtgac

SEQ ID NO: 18271 - protein, 348 aa, Homo sapiens
MTCQEFIANLQGVNEGVDFSKDLLKALYNSIKNEKLEWAVDDEEKKKSPSESTEEKANGTHPKTISRIGSTTNPFLDIPHDPNAAVYKSGFLARKIHADMDGKKTPRGKRGWKTFYAVLKGTVLYLQKDEYKPEKALSEEDLKNAVSVHHALASKATDYEKKPNVFKLKTADWRVLLFQTQSPEEMQGWINKINCVAAVFSAPPFPAAIGSQKKFSRPLLPATTTKLSQEEQLKSHESKLKQITTELAEHRSYPPDKKVKAKDVDEYKLKDHYLEFEKTRYEMYVSILKEGGKELLSNDESEAAGLKKSHSSPSLNPDTSPITAKVKRNVSERKDHRPETPSIKQKVT

SEQ ID NO: 18272 - DNA, 3241 bp, Homo sapiens
aacaaagagcacgcggcgctggccgccggcactcgcgccctgaggctgcggccccggagcgcccggcggcggtttcggcgcgcggccgggctggcgatggaagatggaaggaaggagcgcagcgggtgatcatggaggaagcactttactcccaccaaatgtcacaaatgaatttccagaatatgggaccatggaggaaggtggagaaggcctaagggcttctctggaatttgatggtgaggctctgccatgccacccacaagagcagcagggtgtccagcctcttactggctgccactctgggctcgacagtgttacagaaggaccaaaagatgtcagagaggccccctctcaaagtcatctcaaggaacaaagtttacagcccattgactctttgatttcagctctgaaagccacagaagccagaatcatttccggaacattacaggctacaaaggtactggaccaagatgctgtttctagtttttcagttcagcaggtggaaaaagagctggacactgccagtcgtaaaacacagagagtcaacaaaacgctccctgctggccaaaaaaatttaccagaaatacctctttcagctgaagtaacaacggaggaaagtttttatttgagcatccagaaagatctcaccgcgctgttaactggagacactcaggcagagatttcccagataatgaataatgggaggaaaggggctgtctgtgtgcaggagccatcttgtcctttggcctccctcgggagctcagcagtgacctgccactctgcaggcagtgttggtttcttgaaagagcagaggtctgctcttgggagagagcacccagggggatgtgatcgaagcagctccatgggacgcccaggccgggtcaaacatgtggaatttcaaggagtggaaatactgtggacaggaggagacaagagagagacccagcatcctatagattttgagacatcactgcaaagaacagcctctcctgacagcaaagagtcttccaaagtgccacgccatctcatctcatcagctggtttgtgtaattcaagtagtttaactgagaatgtttgggatgaatcctggaaagctccttcagagaggcctggcactagctcggggacattttcccctgtgcgtcttgatgagagtggagaggatgaagtcttcctacaggaaaacaaacagcatcttgagaagacacctaaaccagagagagacagggaaaggatcagcgaacaagaggagcacgttaagggggaagatgaagacatccttgggcctggatatacggaggactccaccgacgtgtacagctcccagtttgaaaccattttggacaacacttctttatactacagtgcagagtccctggagacattatactcagagcctgatagctattttagctttgaaatgcccctcactccaatgatacaacagcgcattaaagaaggtggtcagttcttggagaggacatcagggggaggacatcaggatatcctgagtgtgtctgcagatggtggcatcgtgatgggctattctagtggcgtcaccaatgggctgaatgatgccagcgactccatctacacgaaaggcaccccggagattgctttctggggaagcaatgctggggtgaaaacaacacggctagaagctcattctgaaatggggagcactgaaattttggaaaaggagaccccagaaaatctcagtaatggtaccagcagcaatgtggaagcagccaaaaggttggccaaacgcctttatcagctggacagattcaaaagatcagatgttgcaaaacaccttggcaagaacaacgaatttagcaaactagttgcagaagaatatctgaagttttttgattttacaggaatgacgctggatcagtcactcaggtatttctttaaagcattctctcttgtgggagaaactcaagaacgagagagagttttaatacacttctccaatagatatttttattgtaacccagataccattgcttcacaagatggagtccattgccttacctgtgcaataatgcttcttaataccgatctacatggccacaatattggaaagaagatgacctgtcaggagttcattgcaaatctgcaaggggtaaatgagggtgttgatttctccaaggatctgctgaaagctctgtacaactcaatcaagaatgagaagcttgaatgggcagtagatgatgaagagaaaaaaaagtctccctcagaaagtactgaggagaaagctaacggaacacatccaaagaccatcagtcgtattggaagtactactaacccatttttggacattcctcatgatccaaatgctgctgtgtacaaaagtggattcttggctcggaaaattcatgcagatatggatggaaagaagactccaagaggaaaacgaggatggaaaaccttttatgctgtactgaagggaacagttctttacttgcaaaaggatgaatacaagccagaaaaggccttgtctgaagaggacttgaaaaacgctgtgagtgtgcaccacgcattggcatccaaggccacggactatgagaagaaaccaaacgtgtttaaacttaaaactgccgactggagggtcttgctttttcaaactcagagcccagaggaaatgcaagggtggataaacaaaatcaattgtgtggcagctgtattttctgcaccaccatttccagcagcaatcggctctcagaagaagtttagccgcccacttctgcctgccactacaacaaaactgtctcaggaggagcaactgaagtcacatgaaagtaagctgaagcagatcaccaccgagctggccgagcaccgctcatatccccccgacaagaaggtcaaagccaaggacgtcgatgagtacaaactgaaagaccactatctggagtttgagaaaacccgctatgaaatgtatgtcagcattctcaaggaaggaggcaaagagctactgagtaacgatgaaagcgaggctgcaggactgaagaagtcgcactcgagtccttcgctgaacccggatacttctccaatcactgccaaagtcaagcgtaacgtgtcagagaggaaggatcaccgacctgaaacaccaagcattaagcaaaaagttacttagagtccatctgcggccaggaagtgctggtcatggagcaaaatagggtttttcaagatctttctggtaatccgtgaatatatttaaaaaaaaaaagtctgtgac

SEQ ID NO: 18273 - protein, 1011 aa, Homo sapiens; identical to SEQ ID NO: 18265

SEQ ID NO: 18274 - DNA, 518 bp, Homo sapiens
ggggagacaccagagcaccaacttctctcacttaaaccttatgacaaccttaagaagtaggcagcatgatccccttcttggaaatgcagaaagagagaatgggggagattgagaggcttgcagaatgtgacatcattagggagaacagtggttgaggtccagcagctcctgcagatgggtggtggtggaaggaggagagaatgggccacaggcaggccaagggcaagcttagcagcactcaacatcctccatgaactcaacagaagtcaagaatgcaggcagctcatgatgaagacctgcagcggcccaggtttaccaagctcattcacaattgcagttggagaattcgtctttggtcattttctactttggaaatacgagacaggatctccctctgttgtgcaggctggtctcaaactcctgccttcaagcgatcttcctgcctggcctcccaaagtgttggaattacaggcatgagccactgcacccgcccagtaaatcctttctgatacaccctt

SEQ ID NO: 18275 - protein, 100 aa, Homo sapiens
MGGGGRRREWATGRPRASLAALNILHELNRSQECRQLMMKTCSGPGLPSSFTIAVGEFVFGHFLLWKYETGSPSVVQAGLKLLPSSDLPAWPPKVLELQA

SEQ ID NO: 18276 - DNA, 483 bp, Homo sapiens
atgtctgcagctttgcaccaggaatggtttatgtccttgcaggaggagaaaagcggggcagcatcaaacccctcccactggggcaacctgctgagcatctccctggccttggcccctggccataccacacaagtgtccaatgagtcactgatcctgaagaacaagagaagactgaccacagaccccaaaaggaagcaggagtacaaccttcgaagttggtgggcaacaagaggtcagaggttgacaagcatccacacagctctaagactagcatcatgtggctacccaggacctgggagagtgctgcagagcaggagcaggaaagggaccggctgttcccatagaacttcatgtcacaggtctgggagccagggggccttggttctagtcccaactctccctctaagttgtcttatggccacaggtgagtgaaatagcttctctggcctcagcttcctcacgattaaaatgacacagttgtgc

SEQ ID NO: 18277 - protein, 143 aa, Homo sapiens
MSAALHQEWFMSLQEEKSGAASNPSHWGNLLSISLALAPGHTTQVSNESLILKNKRRLTTDPKRKQEYNLRSWWATRGQRLTSIHTALRLASCGYPGPGRVLQSRSRKGTGCSHRTSCHRSGSQGALVLVPTLPLSCLMATGE

SEQ ID NO: 18278 - DNA, 538 bp, Homo sapiens
gaagattggaggggatgagtcaggggcaaggaaggattaacagattctgcctcaagtcctggtgaaccaactcctctccccaagacagacacatactagtgaaataaattggatttaaatcatcacctgaggcaatcctgaaagagaaaagcagtcctagaaaagagtggaggaaaagaggacagccccattctctttgtgaccacgaagactgccgccatgtggttgggagccacgtaacttcttttagtgccagctgagattcttctgccctggaactagttcctccgagttattgccaggcctggagattgaattcctgcagctggaaggtggggaaagcaaaatgttgtgagcacctaccatatgccaggcactgttcagtgaactggttgtacaggagtgaatgagatcatcttgattttgagaagtttataatctactcaagggaaacacgtgtaatcaactatgtttcagacataacccctcaaaaccaaagcagaacctcttcaaggagctgagagatgcaagcctggta

SEQ ID NO: 18279 - protein, 49 aa, Homo sapiens
DSSALELVPPSYCQAWRLNSCSWKVGKAKCCEHLPYARHCSVNWLYRSE

SEQ ID NO: 18280 - DNA, 2946 bp, Homo sapiens
agtcaccccggcatgtgggcgcggcggggcggcgcgggcgggacggctacaagagctgttttgcgtccgggccggagtatttgctcagcccgcctgcgccgcttgggacgcctctgcctttccctccctcccttccccgacggcttctggcggccaagtggatgtggcgggtgatcgagccaccctgcccaggggcgcccagcactggttcagtgaacagcattttggacaggacatttggtgccaggtctgagtagccagtttgctgaattattgtcccagtcagccaggattgtgagctgtttgggaagtttcgtggaaacgcccaagtgccagcacaggtggagggacacctggaggccagtttcaggaacttttgccacaagtataaaagacttcagaagtgcaaagatgctgaaacagatactgtcggagatgtacatagatcctgatctactggcagagctcagcgaagaacagaaacagatcctgttcttcaagatgagagaggaacagatccgacgatggaaagaaagagaagcagctatggaaagaaaggagtccctgccagtgaaacccagaccaaagaaagagaatggcaaatcggttcattggaaacttggagctgataaggaagtctgggtatgggtgatgggcgaacaccatctagataaaccctatgatgtgctctgtaatgaaattattgctgagagggcccggctgaaagcagaacaggaggcagaagagcccagaaaaactcactctgaagaattcaccaatagcttgaaaacaaaatcacagtaccatgatctgcaggctccggataaccagcagactaaagacatctggaagaaagtggcagaaaaggaggaactggagcaaggatcgaggccagcaccaaccctggaagaagagaaaatccgatcactctccagttcttcaagaaatattcaacaaatgttggcagattcaatcaatcgtatgaaggcatatgcatttcaccagaagaaagaatctatgaagaaaaaacaagatgaagaaataaatcaaatagaagaagagagaacgaagcagatttgtaagagctggaaagaagactcggaatggcaggcatctctgcgaaaatccaaagcagctgatgagaagagacgctccttggctaaacaagcacgagaagactacaagaggttatccctcggggcccagaaaggaagaggcggtgagaggctgcaaagccccttgcgtgttccgcagaaaccagaaagacctccccttccacccaagcctcagttcctaaactcaggggcatatcctcaaaaacctcttagaaatcagggagtggtgaggacactgtccagctctgcccaagaggacatcatccggtggtttaaagaggagcagctaccacttcgagcgggctaccagaaaacctcagacaccatagccccctggttccatggaattctcacactcaagaaagcaaatgaacttcttctgagcacaggcatgcccggcagttttctcatccgagtcagtgaaaggatcaaaggctatgccctgtcctatctgtcggaggacggctgtaaacatttcctcatcgatgcctctgcagacgcctacagcttcctgggcgtggaccagctacagcatgccaccttggcggatttggtggaatatcacaaggaggaacccatcacttccctggggaaggagctccttctctatccctgtggtcagcaggaccagctgcctgactacctggagctgtttgagtgacagcctccatcagggtcatcctacagcctccaagcgggctttcccctggacaaatgccactgcaacatttatgtgtgaagccaaaatcaccctgcagcagagccaatactgatcaactgaaagtaaagtatccatggagtcctcattgacacctcttttctgcacaaatactggaattcaatgtcaagagaaaatgacctctgctcaaaagggagaagagtctcaatttcagcaagtacctgtcatgaagggtatgaccttaatgatgtacataaaataaaacaaatgaagaaatggaaaacttttagaaattaaggtgtacttgaaaacgaatatctatcatatgacccctgcactccctctgtatcatctcaggaggtttcaggggcctgttgacatgaagtttcgaagtttcatgttggctttggaatggtagcaaaagcctttcctggctgagatgatgcttaaaacacacctcacttattgtacatgttggaaccaggacatgagagacatagaaaaacagaagtcatgaatgtaaattgaatgagaggcttaacatgcatgaaaatacagatggacctgcaggaaagtgagcaaacatcgctgagtttgttttcttgttcgggagaatggggccggggctggcctggcctcccctggatatactctatagtgcaccaaaaggataaagcatctgtacatgtatttttttattttttatcagaagtgcttagacaagaacagaataagcaggctgtttggatgctacttgtggttgaattgtgttcccccaaaatatatggtgaagtcttaacccccatccccgtgaatgggaccttgtttggaaatagggtctttgcagatatagtcaagatgaggtcacattggattagggtgggccccaaatccaatgactggcatccttaggagaagagagagttttggtaatagacacaaatgcagtgggaagaagaccaggggacaagaggcaagttggagtgatgcagccggaagggaagggacaccaaggatctccggccaccagcagaagccagcagagaggcatgggacaggttccccacaagccttagaaggaagcatggccctgacttcagaattccagactccagaactggaagaataaatgtctgttgttttaagctgctt

SEQ ID NO: 18281 - protein, 454 aa, Homo sapiens; identical to SEQ ID NO: 2206

SEQ ID NO: 18282 - DNA, 4232 bp, Homo sapiens
agatgcgctcggtcctcaccagcggcgttgtgcggcgaaccctgcggtgcttcgggaaggcggtcgttcctccctgctcccaccgttttccagcgtgtgcgctcttaccttctctggggaaaaaaggaaattttttattttttaacatttcatttcatgaaaccgttttttttaagtggtggcgctgaacacagtccttgcagaggggggcagcactttccctcctgaccccaacctggaaaccccagtgtgacttcagcgctgtcagagcattggaagcagagctgcgagttaggaagcggctcgctggcagctgggcacgtttctttcctgcgagatcggcttttttgatttgctctttttcacatgaaaatgttcagcttcatttttagacacctttagacatggttatcactgtttaaagccttgatttttttttaaacaaatagtttgcattttattcattgaaacagggagagaacaaataccatcctgctttttgggctgccttcctatttcaaggaaagacgccaaggtaattttgacccagaggagcaatgatgtagccacctcctaaccttcccttcttgaacccccagacataaagggagcagtaggcataaaatgtggggagctgaccatctgccggtccggtcctgaccttccactagtagtgagaccaatccagctcttgctgctgctgtggctttgtgaggaggtcccctcttgctgttggctgcacatcaggaaggctgtgatgggaatgaaggtgaaaacttggagatttcacttcagtcattgcttctgcctgcaagatcatcctttaaaagtagagaagctgctctgtgtggtggttaactccaagaggcagaactcgttctagaaggaaatggatgcaagcagctccgggggccccaaacgcatgcttcctgtggtctagcccagggaagcccttccgtgggggccccggctttgagggatgccaccggttctggacgcatggctgattcctgaatgatgatggttcgccgggggctgcttgcgtggatttcccgggtggtggttttgctggtgctcctctgctgtgctatctctgtcctgtacatgttggcctgcaccccaaaaggtgacgaggagcagctggcactgcccagggccaacagccccacggggaaggaggggtaccaggccgtccttcaggagtgggaggagcagcaccgcaactacgtgagcagcctgaagcggcagatcgcacagctcaaggaggagctgcaggagaggagtgagcagctcaggaatgggcagtaccaagccagcgatgctgctggcctgggtctggacaggagccccccagagaaaacccaggccgacctcctggccttcctgcactcgcaggtggacaaggcagaggtgaatgctggcgtcaagctggccacagagtatgcagcagtgcctttcgatagctttactctacagaaggtgtaccagctggagactggccttacccgccaccccgaggagaagcctgtgaggaaggacaagcgggatgagttggtggaagccattgaatcagccttggagaccctgaacagtcctgcagagaacagccccaatcaccgtccttacacggcctctgatttcatagaagggatctaccgaacagaaagggacaaagggacattgtatgagctcaccttcaaaggggaccacaaacacgaattcaaacggctcatcttatttcgaccattcggccccatcatgaaagtgaaaaatgaaaagctcaacatggccaacacgcttatcaatgttatcgtgcctctagcaaaaagggtggacaagttccggcagttcatgcagaatttcagggagatgtgcattgagcaggatgggagagtccatctcactgttgtttactttgggaaagaagaaataaatgaagtcaaaggaatacttgaaaacacttccaaagctgccaacttcaggaactttaccttcatccagctgaatggagaattttctcggggaaagggacttgatgttggagcccgcttctggaagggaagcaacgtccttctctttttctgtgatgtggacatctacttcacatctgaattcctcaatacgtgtaggctgaatacacagccagggaagaaggtattttatccagttcttttcagtcagtacaatcctggcataatatacggccaccatgatgcagtccctcccttggaacagcagctggtcataaagaaggaaactggattttggagagactttggatttgggatgacgtgtcagtatcggtcagacttcatcaatataggtgggtttgatctggacatcaaaggctggggcggagaggatgtgcacctttatcgcaagtatctccacagcaacctcatagtggtacggacgcctgtgcgaggactcttccacctctggcatgagaagcgctgcatggacgagctgacccccgagcagtacaagatgtgcatgcagtccaaggccatgaacgaggcatcccacggccagctgggcatgctggtgttcaggcacgagatagaggctcaccttcgcaaacagaaacagaagacaagtagcaaaaaaacatgaactcccagagaaggattgtgggagacactttttctttccttttgcaattactgaaagtggctgcaacagagaaaagacttccataaaggacgacaaaagaattggactgatgggtcagagatgagaaagcctccgatttctctctgttgggctttttacaacagaaatcaaaatctccgctttgcctgcaaaagtaacccagttgcaccctgtgaagtgtctgacaaaggcagaatgcttgtgagattataagcctaatggtgtggaggttttgatggtgtttacaacacactgagacctgttgttttgtgtgctcattgaaatattcatgatttaagagcagttttgtaaaaaattcattagcatgaaaggcaagcatatttctcctcatatgaatgagcctatcagcagggctctagtttctaggaatgctaaaatatcagaaggcaggagaggagataggcttattatgatactagtgagtacattaagtaaaataaaatggaccagaaaagaaaagaaaccataaatatcgtgtcatattttccccaagattaaccaaaaataatctgcttatctttttggttgtccttttaactgtctccgtttttttcttttatttaaaaatgcactttttttcccttgtgagttatagtctgcttatttaattaccactttgcaagccttacaagagagcacaagttggcctacatttttatattttttaagaagatactttgagatgcattatgagaactttcagttcaaagcatcaaattgatgccatatccaaggacatgccaaatgctgattctgtcaggcactgaatgtcaggcattgagacatagggaaggaatggtttgtactaatacagacgtacagatactttctctgaagagtattttcgaagaggagcaactgaacactggaggaaaagaaaatgacactttctgctttacagaaaaggaaactcattcagactggtgatatcgtgatgtacctaaaagtcagaaaccacattttctcctcagaagtagggaccgctttcttacctgtttaaataaaccaaagtataccgtgtgaaccaaacaatctcttttcaaaacagggtgctcctcctggcttctggcttccataagaagaaatggagaaaaaaatatatatatatatattgtgaaagatcaatccatctgccagaatctagtgggatggaagtttttgctacatgttatccaccccaggccaggtggaagtaactgaattattttttaaattaagcagttctactcgatcaccaagatgcttctgaaaattgcattttattaccatttcaaactattttttaaaaataaatacagttaacatagagtggtttcttcattcatgtgaaaattattagccagcaccagatgcatgagctaattatctctttgagtccttgcttctgtttgctcacagtaaactcattgtttaaaagcttcaagaacattcaagctgttggtgtgttaaaaaatgcattgtattgatttgtactggtagtttatgaaatttaattaaaacacaggccatgaatggaaggtggtattgcacagctaataaaatatgatttgtggatatga

SEQ ID NO: 18283 - protein, 532 aa, Homo sapiens
MMMVRRGLLAWISRVVVLLVLLCCAISVLYMLACTPKGDEEQLALPRANSPTGKEGYQAVLQEWEEQHRNYVSSLKRQIAQLKEELQERSEQLRNGQYQASDAAGLGLDRSPPEKTQADLLAFLHSQVDKAEVNAGVKLATEYAAVPFDSFTLQKVYQLETGLTRHPEEKPVRKDKRDELVEAIESALETLNSPAENSPNHRPYTASDFIEGIYRTERDKGTLYELTFKGDHKHEFKRLILFRPFGPIMKVKNEKLNMANTLINVIVPLAKRVDKFRQFMQNFREMCIEQDGRVHLTVVYFGKEEINEVKGILENTSKAANFRNFTFIQLNGEFSRGKGLDVGARFWKGSNVLLFFCDVDIYFTSEFLNTCRLNTQPGKKVFYPVLFSQYNPGIIYGHHDAVPPLEQQLVIKKETGFWRDFGFGMTCQYRSDFINIGGFDLDIKGWGGEDVHLYRKYLHSNLIVVRTPVRGLFHLWHEKRCMDELTPEQYKMCMQSKAMNEASHGQLGMLVFRHEIEAHLRKQKQKTSSKKT

SEQ ID NO: 18284 - DNA, 3872 bp, Homo sapiens
ctccttaggtggaaaccctgggagtagagtactgacagcaaagaccgggaaagaccatacgtccccgggcaggggtgacaacaggtgtcatctttttgatctcgtgtgtggctgccttcctatttcaaggaaagacgccaaggtaattttgacccagaggagcaatgatgtagccacctcctaaccttcccttcttgaacccccagttatgccaggatttactagagagtgtcaactcaaccagcaagcggctccttcggcttaacttgtggttggaggagagaacctttgtggggctgcgttctcttagcagtgctcagaagtgacttgcctgagggtggaccagaagaaaggaaaggtcccctcttgctgttggctgcacatcaggaaggctgtgatgggaatgaaggtgaaaacttggagatttcacttcagtcattgcttctgcctgcaagatcatcctttaaaagtagagaagctgctctgtgtggtggttaactccaagaggcagaactcgttctagaaggaaatggatgcaagcagctccgggggccccaaacgcatgcttcctgtggtctagcccagggaagcccttccgtgggggccccggctttgagggatgccaccggttctggacgcatggctgattcctgaatgatgatggttcgccgggggctgcttgcgtggatttcccgggtggtggttttgctggtgctcctctgctgtgctatctctgtcctgtacatgttggcctgcaccccaaaaggtgacgaggagcagctggcactgcccagggccaacagccccacggggaaggaggggtaccaggccgtccttcaggagtgggaggagcagcaccgcaactacgtgagcagcctgaagcggcagatcgcacagctcaaggaggagctgcaggagaggagtgagcagctcaggaatgggcagtaccaagccagcgatgctgctggcctgggtctggacaggagccccccagagaaaacccaggccgacctcctggccttcctgcactcgcaggtggacaaggcagaggtgaatgctggcgtcaagctggccacagagtatgcagcagtgcctttcgatagctttactctacagaaggtgtaccagctggagactggccttacccgccaccccgaggagaagcctgtgaggaaggacaagcgggatgagttggtggaagccattgaatcagccttggagaccctgaacagtcctgcagagaacagccccaatcaccgtccttacacggcctctgatttcatagaagggatctaccgaacagaaagggacaaagggacattgtatgagctcaccttcaaaggggaccacaaacacgaattcaaacggctcatcttatttcgaccattcggccccatcatgaaagtgaaaaatgaaaagctcaacatggccaacacgcttatcaatgttatcgtgcctctagcaaaaagggtggacaagttccggcagttcatgcagaatttcagggagatgtgcattgagcaggatgggagagtccatctcactgttgtttactttgggaaagaagaaataaatgaagtcaaaggaatacttgaaaacacttccaaagctgccaacttcaggaactttaccttcatccagctgaatggagaattttctcggggaaagggacttgatgttggagcccgcttctggaagggaagcaacgtccttctctttttctgtgatgtggacatctacttcacatctgaattcctcaatacgtgtaggctgaatacacagccagggaagaaggtattttatccagttcttttcagtcagtacaatcctggcataatatacggccaccatgatgcagtccctcccttggaacagcagctggtcataaagaaggaaactggattttggagagactttggatttgggatgacgtgtcagtatcggtcagacttcatcaatataggtgggtttgatctggacatcaaaggctggggcggagaggatgtgcacctttatcgcaagtatctccacagcaacctcatagtggtacggacgcctgtgcgaggactcttccacctctggcatgagaagcgctgcatggacgagctgacccccgagcagtacaagatgtgcatgcagtccaaggccatgaacgaggcatcccacggccagctgggcatgctggtgttcaggcacgagatagaggctcaccttcgcaaacagaaacagaagacaagtagcaaaaaaacatgaactcccagagaaggattgtgggagacactttttctttccttttgcaattactgaaagtggctgcaacagagaaaagacttccataaaggacgacaaaagaattggactgatgggtcagagatgagaaagcctccgatttctctctgttgggctttttacaacagaaatcaaaatctccgctttgcctgcaaaagtaacccagttgcaccctgtgaagtgtctgacaaaggcagaatgcttgtgagattataagcctaatggtgtggaggttttgatggtgtttacaacacactgagacctgttgttttgtgtgctcattgaaatattcatgatttaagagcagttttgtaaaaaattcattagcatgaaaggcaagcatatttctcctcatatgaatgagcctatcagcagggctctagtttctaggaatgctaaaatatcagaaggcaggagaggagataggcttattatgatactagtgagtacattaagtaaaataaaatggaccagaaaagaaaagaaaccataaatatcgtgtcatattttccccaagattaaccaaaaataatctgcttatctttttggttgtccttttaactgtctccgtttttttcttttatttaaaaatgcactttttttcccttgtgagttatagtctgcttatttaattaccactttgcaagccttacaagagagcacaagttggcctacatttttatattttttaagaagatactttgagatgcattatgagaactttcagttcaaagcatcaaattgatgccatatccaaggacatgccaaatgctgattctgtcaggcactgaatgtcaggcattgagacatagggaaggaatggtttgtactaatacagacgtacagatactttctctgaagagtattttcgaagaggagcaactgaacactggaggaaaagaaaatgacactttctgctttacagaaaaggaaactcattcagactggtgatatcgtgatgtacctaaaagtcagaaaccacattttctcctcagaagtagggaccgctttcttacctgtttaaataaaccaaagtataccgtgtgaaccaaacaatctcttttcaaaacagggtgctcctcctggcttctggcttccataagaagaaatggagaaaaaaatatatatatatatattgtgaaagatcaatccatctgccagaatctagtgggatggaagtttttgctacatgttatccaccccaggccaggtggaagtaactgaattattttttaaattaagcagttctactcgatcaccaagatgcttctgaaaattgcattttattaccatttcaaactattttttaaaaataaatacagttaacatagagtggtttcttcattcatgtgaaaattattagccagcaccagatgcatgagctaattatctctttgagtccttgcttctgtttgctcacagtaaactcattgtttaaaagcttcaagaacattcaagctgttggtgtgttaaaaaatgcattgtattgatttgtactggtagtttatgaaatttaattaaaacacaggccatgaatggaaggtggtattgcacagctaataaaatatgatttgtggatatga

SEQ ID NO: 18285 - protein, 532 aa, Homo sapiens; identical to SEQ ID NO: 18283

SEQ ID NO: 18286 - DNA, 3962 bp, Homo sapiens
gggcttgttctgggatccgcagccttgctcaggctgtgcattggtgtggccccgaattgcacggagctgccttcctatttcaaggaaagacgccaaggtaattttgacccagaggagcaatgatgtagccacctcctaaccttcccttcttgaacccccaggtcccctcttgctgttggctgcacatcaggaaggctgtgatgggaatgaaggtgaaaacttggagatttcacttcagtcattgcttctgcctgcaagatcatcctttaaaagtagagaagctgctctgtgtggtggttaactccaagaggcagaactcgttctagaaggaaatggatgcaagcagctccgggggccccaaacgcatgcttcctgtggtctagcccagggaagcccttccgtgggggccccggctttgagggatgccaccggttctggacgcatggctgattcctgaatgatgatggttcgccgggggctgcttgcgtggatttcccgggtggtggttttgctggtgctcctctgctgtgctatctctgtcctgtacatgttggcctgcaccccaaaaggtgacgaggagcagctggcactgcccagggccaacagccccacggggaaggaggggtaccaggccgtccttcaggagtgggaggagcagcaccgcaactacgtgagcagcctgaagcggcagatcgcacagctcaaggaggagctgcaggagaggagtgagcagctcaggaatgggcagtaccaagccagcgatgctgctggcctgggtctggacaggagccccccagagaaaacccaggccgacctcctggccttcctgcactcgcaggtggacaaggcagaggtgaatgctggcgtcaagctggccacagagtatgcagcagtgcctttcgatagctttactctacagaaggtgtaccagctggagactggccttacccgccaccccgaggagaagcctgtgaggaaggacaagcgggatgagttggtggaagccattgaatcagccttggagaccctgaacagtcctgcagagaacagccccaatcaccgtccttacacggcctctgatttcatagaagggatctaccgaacagaaagggacaaagggacattgtatgagctcaccttcaaaggggaccacaaacacgaattcaaacggctcatcttatttcgaccattcggccccatcatgaaagtgaaaaatgaaaagctcaacatggccaacacgcttatcaatgttatcgtgcctctagcaaaaagggtggacaagttccggcagttcatgcagaatttcaggcctgctgatgaagtttttagatgtgtgcctttaagcccttgattgtgcggtgttggatcttagaagctgtgatggctcagatgcacatattggctgaggataaccagctaagtgatttcaccagcttgttttaaacatagaaaatcctactgtctaattataaatcttgaaagatcaagctgattttttatttctttttttttgagatggagtcttactctgtcacccaggctggagtgcagtggcacgaactctgctcactgcaaccttcacctcccaggttcagggagatgtgcattgagcaggatgggagagtccatctcactgttgtttactttgggaaagaagaaataaatgaagtcaaaggaatacttgaaaacacttccaaagctgccaacttcaggaactttaccttcatccagctgaatggagaattttctcggggaaagggacttgatgttggagcccgcttctggaagggaagcaacgtccttctctttttctgtgatgtggacatctacttcacatctgaattcctcaatacgtgtaggctgaatacacagccagggaagaaggtattttatccagttcttttcagtcagtacaatcctggcataatatacggccaccatgatgcagtccctcccttggaacagcagctggtcataaagaaggaaactggattttggagagactttggatttgggatgacgtgtcagtatcggtcagacttcatcaatataggtgggtttgatctggacatcaaaggctggggcggagaggatgtgcacctttatcgcaagtatctccacagcaacctcatagtggtacggacgcctgtgcgaggactcttccacctctggcatgagaagcgctgcatggacgagctgacccccgagcagtacaagatgtgcatgcagtccaaggccatgaacgaggcatcccacggccagctgggcatgctggtgttcaggcacgagatagaggctcaccttcgcaaacagaaacagaagacaagtagcaaaaaaacatgaactcccagagaaggattgtgggagacactttttctttccttttgcaattactgaaagtggctgcaacagagaaaagacttccataaaggacgacaaaagaattggactgatgggtcagagatgagaaagcctccgatttctctctgttgggctttttacaacagaaatcaaaatctccgctttgcctgcaaaagtaacccagttgcaccctgtgaagtgtctgacaaaggcagaatgcttgtgagattataagcctaatggtgtggaggttttgatggtgtttacaacacactgagacctgttgttttgtgtgctcattgaaatattcatgatttaagagcagttttgtaaaaaattcattagcatgaaaggcaagcatatttctcctcatatgaatgagcctatcagcagggctctagtttctaggaatgctaaaatatcagaaggcaggagaggagataggcttattatgatactagtgagtacattaagtaaaataaaatggaccagaaaagaaaagaaaccataaatatcgtgtcatattttccccaagattaaccaaaaataatctgcttatctttttggttgtccttttaactgtctccgtttttttcttttatttaaaaatgcactttttttcccttgtgagttatagtctgcttatttaattaccactttgcaagccttacaagagagcacaagttggcctacatttttatattttttaagaagatactttgagatgcattatgagaactttcagttcaaagcatcaaattgatgccatatccaaggacatgccaaatgctgattctgtcaggcactgaatgtcaggcattgagacatagggaaggaatggtttgtactaatacagacgtacagatactttctctgaagagtattttcgaagaggagcaactgaacactggaggaaaagaaaatgacactttctgctttacagaaaaggaaactcattcagactggtgatatcgtgatgtacctaaaagtcagaaaccacattttctcctcagaagtagggaccgctttcttacctgtttaaataaaccaaagtataccgtgtgaaccaaacaatctcttttcaaaacagggtgctcctcctggcttctggcttccataagaagaaatggagaaaaaaatatatatatatatattgtgaaagatcaatccatctgccagaatctagtgggatggaagtttttgctacatgttatccaccccaggccaggtggaagtaactgaattattttttaaattaagcagttctactcgatcaccaagatgcttctgaaaattgcattttattaccatttcaaactattttttaaaaataaatacagttaacatagagtggtttcttcattcatgtgaaaattattagccagcaccagatgcatgagctaattatctctttgagtccttgcttctgtttgctcacagtaaactcattgtttaaaagcttcaagaacattcaagctgttggtgtgttaaaaaatgcattgtattgatttgtactggtagtttatgaaatttaattaaaacacaggccatgaatggaaggtggtattgcacagctaataaaatatgatttgtggatatga

SEQ ID NO: 18287 - protein, 297 aa, Homo sapiens
MMMVRRGLLAWISRVVVLLVLLCCAISVLYMLACTPKGDEEQLALPRANSPTGKEGYQAVLQEWEEQHRNYVSSLKRQIAQLKEELQERSEQLRNGQYQASDAAGLGLDRSPPEKTQADLLAFLHSQVDKAEVNAGVKLATEYAAVPFDSFTLQKVYQLETGLTRHPEEKPVRKDKRDELVEAIESALETLNSPAENSPNHRPYTASDFIEGIYRTERDKGTLYELTFKGDHKHEFKRLILFRPFGPIMKVKNEKLNMANTLINVIVPLAKRVDKFRQFMQNFRPADEVFRCVPLSP

SEQ ID NO: 18288 - DNA, 465 bp, Homo sapiens
cggtagaatagggatattttcagacagaaatgcaaggtctcaaaaattagcctcctctgcaccctttcttgggaagtttctggagaaggcactatgctgagtacgtcatgaggactctataagacaagcctttctgtgctcctcaggtctgggagacaaaggcttcaagaaaccaaacaactgcagggctcaaatggtctcaacctcagagcctgtaatgtcaaccactgcattgactgctaggagaaagggaaatacaagatgtggaagcaacttacaacgtcagaacaaatggacacatgaagtcttaccacgacgcagggattggtagagcagatgcttgcctgtgcagtaatttgaagaatgccagcagagctctgttttcaaagtccccctctcttatcttccattcctgcaggcagagcaaagtttgcaggtccatgaaaccaaacttgtctttctcct

SEQ ID NO: 18289 - protein, 54 aa, Homo sapiens
MKSYHDAGIGRADACLCSNLKNASRALFSKSPSLIFHSCRQSKVCRSMKPNLSF

SEQ ID NO: 18290 - DNA, 1462 bp, Homo sapiens
gatgcctactagggtagggggtggaggtacctggccttttggggagtatgacctggcacagagcagctcagcctccaagacccaggcagggggccataagtgtgtggataatactttctagaaaagttctggtacgctcatttagaactgggcagtggtgaggcaggccagctgtttcccattaactgccttcgccttctctctcttcttctccccagtcggcccccacaaggaatttgctgtgaccatgagacctacagaagccagtgagaggtgccacctgcgggggtcctataccctccgggctggggagagtgccctggagctgtggggtgggcccgagccagggacccagctgtacgactggccctacaggtttctgcggcgctttgggcgggacaaggtaaccttttcctttgaggcaggccgtcgctgcgtctctggagagggcaactttgagttcgaaacccggcaaggcaatgagatcttcttggccctggaagaggccatctctgcccagaagaatgctgcacccgctacaccccaaccgcagccagccacaatccccgcgtcgctgccccggcctgatagcccctactctcggccgcatgactcactgccgccgccttcacccaccacaccggtgcctgctccacggcctcggggccaggagggggagtatgccgtgcccttcgatgcggtggcccgttccttggggaagaacttcaggggcatcttggcagtccctcctcagctcctggccgaccctctgtacgacagcattgaggagaccctgccccctcgacctgaccacatatacgatgagcccgagggagtggctgccctgtccctctatgacagcccgcaggagccccggggtgaggcatggaggaggcaggcgacagctgacagggaccctgctggcctccagcatgtccagccagccgggcaggatttctctgcttctggctggcagccaggaactgagtatgacaatgttgtactaaagaaaggcccaaagtgacagaggcagcagagggatggtccaccgccccttggcttctgctggtgactcctcctggccactgcatcagaagaacctcctctgccccttctggagcccgaggcctggcctgtcttcgttggggctgataaattgcctctcccagggcctgctgggtgagtcaccatcccaaagcaggaagggtgccctggagagaaccaccctcctcctactctttttccacttcctcctctttctttccccagctgaggaggaacctggggcatttagggcagaggacaaaaggatgtcagcaattgcttgggctgcttggctatgcaagcctcctgcctgctgatggccacttcagggacagcctgggcccaggcacccagggggatggcggcagcttcctgcacctttcagatttcttggtggcattaaagcattttcagaaca

SEQ ID NO: 18291 - protein, 258 aa, Homo sapiens
MRPTEASERCHLRGSYTLRAGESALELWGGPEPGTQLYDWPYRFLRRFGRDKVTFSFEAGRRCVSGEGNFEFETRQGNEIFLALEEAISAQKNAAPATPQPQPATIPASLPRPDSPYSRPHDSLPPPSPTTPVPAPRPRGQEGEYAVPFDAVARSLGKNFRGILAVPPQLLADPLYDSIEETLPPRPDHIYDEPEGVAALSLYDSPQEPRGEAWRRQATADRDPAGLQHVQPAGQDFSASGWQPGTEYDNVVLKKGPK

SEQ ID NO: 18292 - DNA, 1583 bp, Homo sapiens
atctccccgtctctgggtggctccctcccgcccccgcctcccacgcctctggcacagaaatggcgccgcttcggcgcctcactgtatggagggtcggactgcgccttggcccggctggagctgcaggagggcccggagaagcctcgtcggtgtgaggctgcccggaaggtcatccgcctcagtgactgcctgcgggtggccgaggccggcggagaggccagcagcccccgggacaccagtgccttcttcctggagaccaaggagcgcctgtacctcctggcggcccctgcagcggagcgcggcgactgggtgcaggccatctgcctcctggccttcccctcggcccccacaaggaatttgctgtgaccatgagacctacagaagccagtgagaggtgccacctgcgggggtcctataccctccgggctggggagagtgccctggagctgtggggtgggcccgagccagggacccagctgtacgactggccctacaggtttctgcggcgctttgggcgggacaaggtaaccttttcctttgaggcaggccgtcgctgcgtctctggagagggcaactttgagttcgaaacccggcaaggcaatgagatcttcttggccctggaagaggccatctctgcccagaagaatgctgcacccgctacaccccaaccgcagccagccacaatccccgcgtcgctgccccggcctgatagcccctactctcggccgcatgactcactgccgccgccttcacccaccacaccggtgcctgctccacggcctcggggccaggagggggagtatgccgtgcccttcgatgcggtggcccgttccttggggaagaacttcaggggcatcttggcagtccctcctcagctcctggccgaccctctgtacgacagcattgaggagaccctgccccctcgacctgaccacatatacgatgagcccgagggagtggctgccctgtccctctatgacagcccgcaggagccccggggtgaggcatggaggaggcaggcgacagctgacagggaccctgctggcctccagcatgtccagccagccgggcaggatttctctgcttctggctggcagccaggaactgagtatgacaatgttgtactaaagaaaggcccaaagtgacagaggcagcagagggatggtccaccgccccttggcttctgctggtgactcctcctggccactgcatcagaagaacctcctctgccccttctggagcccgaggcctggcctgtcttcgttggggctgataaattgcctctcccagggcctgctgggtgagtcaccatcccaaagcaggaagggtgccctggagagaaccaccctcctcctactctttttccacttcctcctctttctttccccagctgaggaggaacctggggcatttagggcagaggacaaaaggatgtcagcaattgcttgggctgcttggctatgcaagcctcctgcctgctgatggccacttcagggacagcctgggcccaggcacccagggggatggcggcagcttcctgcacctttcagatttcttggtggcattaaagcattttcagaaca

SEQ ID NO: 18293 - protein, 258 aa, Homo sapiens; identical to SEQ ID NO: 18291

SEQ ID NO: 18294 - DNA, 1395 bp, Homo sapiens
gagaagggaaacacacggctaagaagagagaggcaagggcaggagtgaaggagagagctgaagcctggggctccgagatggtcagaggatgggagacggggcagtgaaacaaggcttcttgtatcttcagcagcagcagacgtttggaaagtcggcccccacaaggaatttgctgtgaccatgagacctacagaagccagtgagaggtgccacctgcgggggtcctataccctccgggctggggagagtgccctggagctgtggggtgggcccgagccagggacccagctgtacgactggccctacaggtttctgcggcgctttgggcgggacaaggtaaccttttcctttgaggcaggccgtcgctgcgtctctggagagggcaactttgagttcgaaacccggcaaggcaatgagatcttcttggccctggaagaggccatctctgcccagaagaatgctgcacccgctacaccccaaccgcagccagccacaatccccgcgtcgctgccccggcctgatagcccctactctcggccgcatgactcactgccgccgccttcacccaccacaccggtgcctgctccacggcctcggggccaggagggggagtatgccgtgcccttcgatgcggtggcccgttccttggggaagaacttcaggggcatcttggcagtccctcctcagctcctggccgaccctctgtacgacagcattgaggagaccctgccccctcgacctgaccacatatacgatgagcccgagggagtggctgccctgtccctctatgacagcccgcaggagccccggggtgaggcatggaggaggcaggcgacagctgacagggaccctgctggcctccagcatgtccagccagccgggcaggatttctctgcttctggctggcagccaggaactgagtatgacaatgttgtactaaagaaaggcccaaagtgacagaggcagcagagggatggtccaccgccccttggcttctgctggtgactcctcctggccactgcatcagaagaacctcctctgccccttctggagcccgaggcctggcctgtcttcgttggggctgataaattgcctctcccagggcctgctgggtgagtcaccatcccaaagcaggaagggtgccctggagagaaccaccctcctcctactctttttccacttcctcctctttctttccccagctgaggaggaacctggggcatttagggcagaggacaaaaggatgtcagcaattgcttgggctgcttggctatgcaagcctcctgcctgctgatggccacttcagggacagcctgggcccaggcacccagggggatggcggcagcttcctgcacctttcagatttcttggtggcattaaagcattttcagaaca

SEQ ID NO: 18295 - protein, 258 aa, Homo sapiens; identical to SEQ ID NO: 18291

SEQ ID NO: 18296 - DNA, 1682 bp, Homo sapiens
cttcagagaagggaaacacacggctaagaagagagaggcaagggcaggagtgaaggagagagctgaagcctggggctccgagatggtcagaggatgggagacggggcagtgaaacaaggcttcttgtatcttcagcagcagcagacgtttggaaagaaatggcgccgcttcggcgcctcactgtatggagggtcggactgcgccttggcccggctggagctgcaggagggcccggagaagcctcgtcggtgtgaggctgcccggaaggtcatccgcctcagtgactgcctgcgggtggccgaggccggcggagaggccagcagcccccgggacaccagtgccttcttcctggagaccaaggagcgcctgtacctcctggcggcccctgcagcggagcgcggcgactgggtgcaggccatctgcctcctggccttcccctcggcccccacaaggaatttgctgtgaccatgagacctacagaagccagtgagaggtgccacctgcgggggtcctataccctccgggctggggagagtgccctggagctgtggggtgggcccgagccagggacccagctgtacgactggccctacaggtttctgcggcgctttgggcgggacaaggtaaccttttcctttgaggcaggccgtcgctgcgtctctggagagggcaactttgagttcgaaacccggcaaggcaatgagatcttcttggccctggaagaggccatctctgcccagaagaatgctgcacccgctacaccccaaccgcagccagccacaatccccgcgtcgctgccccggcctgatagcccctactctcggccgcatgactcactgccgccgccttcacccaccacaccggtgcctgctccacggcctcggggccaggagggggagtatgccgtgcccttcgatgcggtggcccgttccttggggaagaacttcaggggcatcttggcagtccctcctcagctcctggccgaccctctgtacgacagcattgaggagaccctgccccctcgacctgaccacatatacgatgagcccgagggagtggctgccctgtccctctatgacagcccgcaggagccccggggtgaggcatggaggaggcaggcgacagctgacagggaccctgctggcctccagcatgtccagccagccgggcaggatttctctgcttctggctggcagccaggaactgagtatgacaatgttgtactaaagaaaggcccaaagtgacagaggcagcagagggatggtccaccgccccttggcttctgctggtgactcctcctggccactgcatcagaagaacctcctctgccccttctggagcccgaggcctggcctgtcttcgttggggctgataaattgcctctcccagggcctgctgggtgagtcaccatcccaaagcaggaagggtgccctggagagaaccaccctcctcctactctttttccacttcctcctctttctttccccagctgaggaggaacctggggcatttagggcagaggacaaaaggatgtcagcaattgcttgggctgcttggctatgcaagcctcctgcctgctgatggccacttcagggacagcctgggcccaggcacccagggggatggcggcagcttcctgcacctttcagatttcttggtggcattaaagcattttcagaaca

SEQ ID NO: 18297 - protein, 258 aa, Homo sapiens; identical to SEQ ID NO: 18291

SEQ ID NO: 18298 - DNA, 1770 bp, Homo sapiens
cttcagagaagggaaacacacggctaagaagagagaggcaagggcaggagtgaaggagagagctgaagcctggggctccgagatggtcagaggatgggagacggggcagtgaaacaaggcttcttgtatcttcagcagcagcagacgtttggaaagaaatggcgccgcttcggcgcctcactgtatggagggtcggactgcgccttggcccggctggagctgcaggagggcccggagaagcctcgtcggtgtgaggctgcccggaaggtcatccgcctcagtgactgcctgcgggtggccgaggccggcggagaggccagcagcccccgggacaccagtgccttcttcctggagaccaaggagcgcctgtacctcctggcggcccctgcagcggagcgcggcgactgggtgcaggccatctgcctcctggccttccccgggcagaggaaggagctctcggggccagagggaaagcagagccggccctgcatggaggaaaatgaattgtacagcagcgcagtcacagtcggcccccacaaggaatttgctgtgaccatgagacctacagaagccagtgagaggtgccacctgcgggggtcctataccctccgggctggggagagtgccctggagctgtggggtgggcccgagccagggacccagctgtacgactggccctacaggtttctgcggcgctttgggcgggacaaggtaaccttttcctttgaggcaggccgtcgctgcgtctctggagagggcaactttgagttcgaaacccggcaaggcaatgagatcttcttggccctggaagaggccatctctgcccagaagaatgctgcacccgctacaccccaaccgcagccagccacaatccccgcgtcgctgccccggcctgatagcccctactctcggccgcatgactcactgccgccgccttcacccaccacaccggtgcctgctccacggcctcggggccaggagggggagtatgccgtgcccttcgatgcggtggcccgttccttggggaagaacttcaggggcatcttggcagtccctcctcagctcctggccgaccctctgtacgacagcattgaggagaccctgccccctcgacctgaccacatatacgatgagcccgagggagtggctgccctgtccctctatgacagcccgcaggagccccggggtgaggcatggaggaggcaggcgacagctgacagggaccctgctggcctccagcatgtccagccagccgggcaggatttctctgcttctggctggcagccaggaactgagtatgacaatgttgtactaaagaaaggcccaaagtgacagaggcagcagagggatggtccaccgccccttggcttctgctggtgactcctcctggccactgcatcagaagaacctcctctgccccttctggagcccgaggcctggcctgtcttcgttggggctgataaattgcctctcccagggcctgctgggtgagtcaccatcccaaagcaggaagggtgccctggagagaaccaccctcctcctactctttttccacttcctcctctttctttccccagctgaggaggaacctggggcatttagggcagaggacaaaaggatgtcagcaattgcttgggctgcttggctatgcaagcctcctgcctgctgatggccacttcagggacagcctgggcccaggcacccagggggatggcggcagcttcctgcacctttcagatttcttggtggcattaaagcattttcagaaca

SEQ ID NO: 18299 - protein, 412 aa, Homo sapiens; identical to SEQ ID NO: 2210

SEQ ID NO: 18300 - DNA, 3750 bp, Homo sapiens
aggcgcagcggcgacggcgtcggcggcggcggcggcagcggctccggccgaggtgcgcgctgggggggagggggggccggagaggagcatgaatggagcaaaatggcggatcatgtgcagagcctggcccaactagagaatctgtgcaaacagctgtatgaaaccacagacacaaccactcgactccaggcagagaaagccttggttgaatttaccaacagccctgattgcctgagcaagtgccagctactcctcgaaagaggaagttcctcttactcccagttactggcagctacatgccttaccaagcttgtatcacgcacaaacaaccccctaccattggaacagcgaatagatattcggaactatgtgctcaactaccttgccactcggccgaagttggctactttcgtgacacaagcacttattcagttatatgccagaatcacaaaactgggctggtttgactgtcagaaggatgactatgtcttcagaaatgcaatcacagacgtcacaaggtttttacaggatagtgttgaatactgcatcattggtgtcacaattttatctcagctaaccaatgaaattaatcaagcagacaccacccatcctttaaccaagcacagaaaaatagcctcttcttttcgcgattcatcattatttgatatcttcacactttcctgcaatttactaaaacaggcttcaggaaagaatctaaacttgaatgatgaaagtcagcatggcttgctcatgcaactgctcaagctcactcataactgcctcaactttgacttcatcggcacttccactgatgagtcctcagacgacctgtgtacagtgcagattcccaccagctggagatcagccttcttagattcttcaaccttgcagctgttttttgacctgtatcattccatccctccttcattttcacctctggtattatcctgcttggtacagatcgcttcagtcagaagatccctgtttaacaatgcagagagggccaagtttctctctcatcttgttgatggtgttaaacgaatactggaaaacccacagagtttatcagacccaaacaattaccatgagttttgcagactactggcccgattgaagagtaactatcaactgggagaattggtaaaggtggaaaactaccctgaggtcatccgattgatagccaacttcacagtgaccagcctacagcactgggaatttgctccaaatagtgtgcactatcttctgagcctgtggcagcggctggcagcctctgtgccgtatgtcaaagccacagagccccacatgctggaaacttacactcctgaggtcaccaaagcctacatcacatcccggttggaatctgtgcacatcatactgagagatggcctggaagatcccctggaggatacggggctggtccagcagcagttggaccagctgtccaccattgggcgttgtgaatatgagaagacgtgtgcactcctcgtgcagttgtttgaccagtcggcccagtcgtaccaggagctgctacagagcgccagcgcaagcccaatggacattgcagtgcaggagggaaggctgacatggctggtttacattattggagcagtgatcggtggccgggtttcttttgccagcactgatgagcaagacgccatggatggtgagcttgtctgtcgggtgctccagctgatgaacctaacagattctcgtttggcccaggcgggtaatgagaagctagagttggccatgctgagcttttttgaacagtttcgtaagatctacattggggaccaagtgcagaaatcctctaagctgtaccgccgactctcagaagttctgggcttgaatgatgagaccatggtcctaagcgtcttcataggaaaaatcatcaccaacttgaagtactggggccgttgtgaaccaatcacctccaagacactacagcttctcaatgacctgtccattggatatctagcgtaaggaagctagtgaagcttagtgcggtacagttcatgctgaacaatcacacgagcgagcacttttcatttttgggtattaacaatcagtccaacctgacagacatgcggtgtcggactaccttctacacagcacttgggcgtctcctcatggtggatttaggagaggatgaagatcagtatgagcagttcatgctgccactcacagcagcatttgaggctgtggcccagatgtttagcaccaatagtttcaacgagcaggaggcaaagcgaactctagttggcctagtaagagacctgagagggatcgctttcgctttcaatgccaagaccagcttcatgatgctctttgaatggatatatccatcctatatgccaattctccaacgggcaattgagctctggtaccatgatccagcctgtactacacctgtactcaagttgatggctgaattggttcataataggtcccagcgactccagtttgatgtctcttcccccaatggcatcttactcttccgagaaaccagcaagatgataacaatgtatggcaatcgcatcctgacactaggagaggtcccaaaggatcaggtctatgctctgaagctcaagggcatctccatctgcttctccatgctgaaggctgctctcagtgggagttacgtcaatttcggagtctttcgtctctatggagacgatgccctggacaatgctctgcagaccttcatcaagctgctcctctctattcctcacagtgatctcttggattaccccaagctcagccagtcttattattcactactggaagtcctgacccaggaccatatgaactttattgcaagcctggaacctcacgtcatcatgtatattctctcttccatttctgaaggacttactgcacttgacaccatggtatgcacaggctgctgctcctgcctggaccacattgtgacatacctcttcaagcagctgtcacgtagcaccaagaagaggaccacacccctgaaccaggagagcgaccgctttctgcacatcatgcagcagcatccagagatgatccagcagatgctgtccacggtgctgaacatcatcatctttgaagactgtaggaaccagtggtctatgtcccgaccactacttggcttgatattgcttaatgaaaagtatttttctgacctaagaaacagtattgtgaacagccagccaccggagaagcagcaggccatgcacctgtgttttgagaacctgatggaaggcatcgagcgaaatcttcttacgaaaaacagagacaggttcacccagaacctgtcagcattccgtcgagaagtcaacgactcaatgaagaattccacttatggcgtgaatagcaatgacatgatgagctgacacctccttggactctacctgtacagagcagcgtccctttggtttggcccagaggggcgaacaattgcaagggagagggcctggctgatcctggctcttttctccaggggtgtggggaaaatggcaaaggtcaactagctgcttccccagggaataggggtgtgagtacactcactagggggcagggcgctgctggttcctgggggactgggtgggaagggtggtgggaggagataagagatacaaactgagactccagcctctcctcctggggccacccaagtggggagaacccctagtgtcctgccacaacctgccttgtataaacatgtacattttttcataacattttgaacaaggtttatattgactcaagtttaaaaac

SEQ ID NO: 18301 - protein, 626 aa, Homo sapiens
MADHVQSLAQLENLCKQLYETTDTTTRLQAEKALVEFTNSPDCLSKCQLLLERGSSSYSQLLAATCLTKLVSRTNNPLPLEQRIDIRNYVLNYLATRPKLATFVTQALIQLYARITKLGWFDCQKDDYVFRNAITDVTRFLQDSVEYCIIGVTILSQLTNEINQADTTHPLTKHRKIASSFRDSSLFDIFTLSCNLLKQASGKNLNLNDESQHGLLMQLLKLTHNCLNFDFIGTSTDESSDDLCTVQIPTSWRSAFLDSSTLQLFFDLYHSIPPSFSPLVLSCLVQIASVRRSLFNNAERAKFLSHLVDGVKRILENPQSLSDPNNYHEFCRLLARLKSNYQLGELVKVENYPEVIRLIANFTVTSLQHWEFAPNSVHYLLSLWQRLAASVPYVKATEPHMLETYTPEVTKAYITSRLESVHIILRDGLEDPLEDTGLVQQQLDQLSTIGRCEYEKTCALLVQLFDQSAQSYQELLQSASASPMDIAVQEGRLTWLVYIIGAVIGGRVSFASTDEQDAMDGELVCRVLQLMNLTDSRLAQAGNEKLELAMLSFFEQFRKIYIGDQVQKSSKLYRRLSEVLGLNDETMVLSVFIGKIITNLKYWGRCEPITSKTLQLLNDLSIGYLA

SEQ ID NO: 18302 - DNA, 4323 bp, Homo sapiens
aggcgcagcggcgacggcgtcggcggcggcggcggcagcggctccggccgaggtgcgcgctgggggggagggggggccggagaggagcatgaatggagcaaaatggcggatcatgtgcagagcctggcccaactagagaatctgtgcaaacagctgtatgaaaccacagacacaaccactcgactccaggcagagaaagccttggttgaatttaccaacagccctgattgcctgagcaagtgccagctactcctcgaaagaggaagttcctcttactcccagttactggcagctacatgccttaccaagcttgtatcacgcacaaacaaccccctaccattggaacagcgaatagatattcggaactatgtgctcaactaccttgccactcggccgaagttggctactttcgtgacacaagcacttattcagttatatgccagaatcacaaaactgggctggtttgactgtcagaaggatgactatgtcttcagaaatgcaatcacagacgtcacaaggtttttacaggatagtgttgaatactgcatcattggtgtcacaattttatctcagctaaccaatgaaattaatcaagcagacaccacccatcctttaaccaagcacagaaaaatagcctcttcttttcgcgattcatcattatttgatatcttcacactttcctgcaatttactaaaacaggcttcaggaaagaatctaaacttgaatgatgaaagtcagcatggcttgctcatgcaactgctcaagctcactcataactgcctcaactttgacttcatcggcacttccactgatgagtcctcagacgacctgtgtacagtgcagattcccaccagctggagatcagccttcttagattcttcaaccttgcagctctgtccaccattgggcgttgtgaatatgagaagacgtgtgcactcctcgtgcagttgtttgaccagtcggcccagtcgtaccaggagctgctacagagcgccagcgcaagcccaatggacattgcagtgcaggagggaaggctgacatggctggtttacattattggagcagtgatcggtggccgggtttcttttgccagcactgatgagcaagacgccatggatggtgagcttgtctgtcgggtgctccagctgatgaacctaacagattctcgtttggcccaggcgggtaatgagaagctagagttggccatgctgagcttttttgaacagtttcgtaagatctacattggggaccaagtgcagaaatcctctaagctgtaccgccgactctcagaagttctgggcttgaatgatgagaccatggtcctaagcgtcttcataggaaaaatcatcaccaacttgaagtactggggccgttgtgaaccaatcacctccaagacactacagcttctcaatgacctgtccattggatatctagcgtaaggaagctagtgaagcttagtgcggtacagttcatgctgaacaatcacacgagcgagcacttttcatttttgggtattaacaatcagtccaacctgacagacatgcggtgtcggactaccttctacacagcacttgggcgtctcctcatggtggatttaggagaggatgaagatcagtatgagcagttcatgctgccactcacagcagcatttgaggctgtggcccagatgtttagcaccaatagtttcaacgagcaggaggcaaagcgaactctagttggcctagtaagagacctgagagggatcgctttcgctttcaatgccaagaccagcttcatgatgctctttgaatggatatatccatcctatatgccaattctccaacgggcaattgagctctggtaccatgatccagcctgtactacacctgtactcaagttgatggctgaattggttcataataggtcccagcgactccagtttgatgtctcttcccccaatggcatcttactcttccgagaaaccagcaagatgataacaatgtatggcaatcgcatcctgacactaggagaggtcccaaaggatcaggtctatgctctgaagctcaagggcatctccatctgcttctccatgctgaaggctgctctcagtgggagttacgtcaatttcggagtctttcgtctctatggagacgatgccctggacaatgctctgcagaccttcatcaagctgctcctctctattcctcacagtgatctcttggattaccccaagctcagccagtcttattattcactactggaagtcctgacccaggaccatatgaactttattgcaagcctggaacctcacgtcatcatgtatattctctcttccatttctgaaggacttactgcacttgacaccatggtatgcacaggctgctgctcctgcctggaccacattgtgacatacctcttcaagcagctgtcacgtagcaccaagaagaggaccacacccctgaaccaggagagcgaccgctttctgcacatcatgcagcagcatccagagatgatccagcagatgctgtccacggtgctgaacatcatcatctttgaagactgtaggaaccagtggtctatgtcccgaccactacttggcttgatattgcttaatgaaaagtatttttctgacctaagaaacagtattgtgaacagccagccaccggagaagcagcaggccatgcacctgtgttttgagaacctgatggaaggcatcgagcgaaatcttcttacgaaaaacagagacaggttcacccagaacctgtcagcattccgtcgagaagtcaacgactcaatgaagaattccacttatggcgtgaatagcaatgacatgatgagctgacacctccttggactctacctgtacagagcagcgtccctttggtttggcccagaggggcgaacaattgcaagggagagggcctggctgatcctggctcttttctccaggggtgtggggaaaatggcaaaggtcaactagctgcttccccagggaataggggtgtgagtacactcactagggggcagggcgctgctggttcctgggggactgggtgggaagggtggtgggaggagataagagatacaaactgagactccagcctctcctcctggggccacccaagtggggagaacccctagtgtcctgccacaacctgccttgtataaacatgtacattttttcataacattttgaacaaggtttatattgactcaagtttaaaaacaaaaagtgtgactgaaaaatttttacagagtctagtgcaccaatgctgatgtgaggggttgtgtatgcgagtgaagaaaatgtgtattctggtggcctgaagctttactggacaaggatgtgtgagagtgcagagatatatttagtgacacagtagagaggcaaaaaaaaagctaaaattccaaatgtatattttttcgtattgccctgtcctcacccagaaatgatcaattcctgttactgtattaacccttgttattaggaactctaagccatgccagaacaccgtccctccccttggaccgtgtagattctgccctgggtccctagccccttgcagtgataaataactccagctaaaagtgtttggtgttcttatctccaccctctttcctactttgcttaccctcatcctcagacagatgcctcttgcttttaaaagttggatttaacgacgtgttgtagggttcttggtctgtgtgaaggcagagaccagagagaaggaagtgagcccactgctctcctgggagcaatgtgggtgagtccaccagaggccctgctgtgtgtggccaataaattttagtcttccccagccctcgaggcagtgtgtgtggatgtatgcgtgtggatatttatatatgtaccctgcactcatgaatgtatgaactggaggaagttactacagtggaagggttcttaataacaaggtctacctagcatgaagtatttaacattctcccatcccttaaaaaatatacatttttataaaatgaaaaccataataaatgttttgaatattaaaaaaaataataacctacagaggaaaattaatggagacagctatttgccttgtactttttccacaattgttgctgctagttgtacacatctctagttcagctcttgcccacgggacactcatcaattaggttttatttttatttctttcctctacccccagaaacaagcctgttaattttttttccttctcctctggcgactgtgtgatgaatcctttcttgcgtgatcaggttgcggatagacttgtaagggtgtttgctgcatacagtgtaagcattgtgaccgccaataaacttcaatggtttctactgacctgg

SEQ ID NO: 18303 - protein, 449 aa, Homo sapiens
MLNNHTSEHFSFLGINNQSNLTDMRCRTTFYTALGRLLMVDLGEDEDQYEQFMLPLTAAFEAVAQMFSTNSFNEQEAKRTLVGLVRDLRGIAFAFNAKTSFMMLFEWIYPSYMPILQRAIELWYHDPACTTPVLKLMAELVHNRSQRLQFDVSSPNGILLFRETSKMITMYGNRILTLGEVPKDQVYALKLKGISICFSMLKAALSGSYVNFGVFRLYGDDALDNALQTFIKLLLSIPHSDLLDYPKLSQSYYSLLEVLTQDHMNFIASLEPHVIMYILSSISEGLTALDTMVCTGCCSCLDHIVTYLFKQLSRSTKKRTTPLNQESDRFLHIMQQHPEMIQQMLSTVLNIIIFEDCRNQWSMSRPLLGLILLNEKYFSDLRNSIVNSQPPEKQQAMHLCFENLMEGIERNLLTKNRDRFTQNLSAFRREVNDSMKNSTYGVNSNDMMS

SEQ ID NO: 18304 - DNA, 4867 bp, Homo sapiens
aggcgcagcggcgacggcgtcggcggcggcggcggcagcggctccggccgaggtgcgcgctgggggggagggggggccggagaggagcatgaatggagcaaaatggcggatcatgtgcagagcctggcccaactagagaatctgtgcaaacagctgtatgaaaccacagacacaaccactcgactccaggcagagaaagccttggttgaatttaccaacagccctgattgcctgagcaagtgccagctactcctcgaaagaggaagttcctcttactcccagttactggcagctacatgccttaccaagcttgtatcacgcacaaacaaccccctaccattggaacagcgaatagatattcggaactatgtgctcaactaccttgccactcggccgaagttggctactttcgtgacacaagcacttattcagttatatgccagaatcacaaaactgggctggtttgactgtcagaaggatgactatgtcttcagaaatgcaatcacagacgtcacaaggtttttacaggatagtgttgaatactgcatcattggtgtcacaattttatctcagctaaccaatgaaattaatcaagcagacaccacccatcctttaaccaagcacagaaaaatagcctcttcttttcgcgattcatcattatttgatatcttcacactttcctgcaatttactaaaacaggcttcaggaaagaatctaaacttgaatgatgaaagtcagcatggcttgctcatgcaactgctcaagctcactcataactgcctcaactttgacttcatcggcacttccactgatgagtcctcagacgacctgtgtacagtgcagattcccaccagctggagatcagccttcttagattcttcaaccttgcagctgttttttgacctgtatcattccatccctccttcattttcacctctggtattatcctgcttggtacagatcgcttcagtcagaagatccctgtttaacaatgcagagagggccaagtttctctctcatcttgttgatggtgttaaacgaatactggaaaacccacagagtttatcagacccaaacaattaccatgagttttgcagactactggcccgattgaagagtaactatcaactgggagaattggtaaaggtggaaaactaccctgaggtcatccgattgatagccaacttcacagtgaccagcctacagcactgggaatttgctccaaatagtgtgcactatcttctgagcctgtggcagcggctggcagcctctgtgccgtatgtcaaagccacagagccccacatgctggaaacttacactcctgaggtcaccaaagcctacatcacatcccggttggaatctgtgcacatcatactgagagatggcctggaagatcccctggaggatacggggctggtccagcagcagttggaccagctgtccaccattgggcgttgtgaatatgagaagacgtgtgcactcctcgtgcagttgtttgaccagtcggcccagtcgtaccaggagctgctacagagcgccagcgcaagcccaatggacattgcagtgcaggagggaaggctgacatggctggtttacattattggagcagtgatcggtggccgggtttcttttgccagcactgatgagcaagacgccatggatggtgagcttgtctgtcgggtgctccagctgatgaacctaacagattctcgtttggcccaggcgggtaatgagaagctagagttggccatgctgagcttttttgaacagtttcgtaagatctacattggggaccaagtgcagaaatcctctaagctgtaccgccgactctcagaagttctgggcttgaatgatgagaccatggtcctaagcgtcttcataggaaaaatcatcaccaacttgaagtactggggccgttgtgaaccaatcacctccaagacactacagcttctcaatgacctgtccattggatatctagcgtaaggaagctagtgaagcttagtgcggtacagttcatgctgaacaatcacacgagcgagcacttttcatttttgggtattaacaatcagtccaacctgacagacatgcggtgtcggactaccttctacacagcacttgggcgtctcctcatggtggatttaggagaggatgaagatcagtatgagcagttcatgctgccactcacagcagcatttgaggctgtggcccagatgtttagcaccaatagtttcaacgagcaggaggcaaagcgaactctagttggcctagtaagagacctgagagggatcgctttcgctttcaatgccaagaccagcttcatgatgctctttgaatggatatatccatcctatatgccaattctccaacgggcaattgagctctggtaccatgatccagcctgtactacacctgtactcaagttgatggctgaattggttcataataggtcccagcgactccagtttgatgtctcttcccccaatggcatcttactcttccgagaaaccagcaagatgataacaatgtatggcaatcgcatcctgacactaggagaggtcccaaaggatcaggtctatgctctgaagctcaagggcatctccatctgcttctccatgctgaaggctgctctcagtgggagttacgtcaatttcggagtctttcgtctctatggagacgatgccctggacaatgctctgcagaccttcatcaagctgctcctctctattcctcacagtgatctcttggattaccccaagctcagccagtcttattattcactactggaagtcctgacccaggaccatatgaactttattgcaagcctggaacctcacgtcatcatgtatattctctcttccatttctgaaggacttactgcacttgacaccatggtatgcacaggctgctgctcctgcctggaccacattgtgacatacctcttcaagcagctgtcacgtagcaccaagaagaggaccacacccctgaaccaggagagcgaccgctttctgcacatcatgcagcagcatccagagatgatccagcagatgctgtccacggtgctgaacatcatcatctttgaagactgtaggaaccagtggtctatgtcccgaccactacttggcttgatattgcttaatgaaaagtatttttctgacctaagaaacagtattgtgaacagccagccaccggagaagcagcaggccatgcacctgtgttttgagaacctgatggaaggcatcgagcgaaatcttcttacgaaaaacagagacaggttcacccagaacctgtcagcattccgtcgagaagtcaacgactcaatgaagaattccacttatggcgtgaatagcaatgacatgatgagctgacacctccttggactctacctgtacagagcagcgtccctttggtttggcccagaggggcgaacaattgcaagggagagggcctggctgatcctggctcttttctccaggggtgtggggaaaatggcaaaggtcaactagctgcttccccagggaataggggtgtgagtacactcactagggggcagggcgctgctggttcctgggggactgggtgggaagggtggtgggaggagataagagatacaaactgagactccagcctctcctcctggggccacccaagtggggagaacccctagtgtcctgccacaacctgccttgtataaacatgtacattttttcataacattttgaacaaggtttatattgactcaagtttaaaaacaaaaagtgtgactgaaaaatttttacagagtctagtgcaccaatgctgatgtgaggggttgtgtatgcgagtgaagaaaatgtgtattctggtggcctgaagctttactggacaaggatgtgtgagagtgcagagatatatttagtgacacagtagagaggcaaaaaaaaagctaaaattccaaatgtatattttttcgtattgccctgtcctcacccagaaatgatcaattcctgttactgtattaacccttgttattaggaactctaagccatgccagaacaccgtccctccccttggaccgtgtagattctgccctgggtccctagccccttgcagtgataaataactccagctaaaagtgtttggtgttcttatctccaccctctttcctactttgcttaccctcatcctcagacagatgcctcttgcttttaaaagttggatttaacgacgtgttgtagggttcttggtctgtgtgaaggcagagaccagagagaaggaagtgagcccactgctctcctgggagcaatgtgggtgagtccaccagaggccctgctgtgtgtggccaataaattttagtcttccccagccctcgaggcagtgtgtgtggatgtatgcgtgtggatatttatatatgtaccctgcactcatgaatgtatgaactggaggaagttactacagtggaagggttcttaataacaaggtctacctagcatgaagtatttaacattctcccatcccttaaaaaatatacatttttataaaatgaaaaccataataaatgttttgaatattaaaaaaaataataacctacagaggaaaattaatggagacagctatttgccttgtactttttccacaattgttgctgctagttgtacacatctctagttcagctcttgcccacgggacactcatcaattaggttttatttttatttctttcctctacccccagaaacaagcctgttaattttttttccttctcctctggcgactgtgtgatgaatcctttcttgcgtgatcaggttgcggatagacttgtaagggtgtttgctgcatacagtgtaagcattgtgaccgccaataaacttcaatggtttctactgacctgg

SEQ ID NO: 18305 - protein, 626 aa, Homo sapiens; identical to SEQ ID NO: 18301

SEQ ID NO: 18306 - DNA, 414 bp, Homo sapiens
actgcttgctgtatgttcaacattgtggaatatcatgggaagataagttataatcttattaaacaaagatgctgggattacaggtgtgacacaccgtactgggccctaggctgtgtttttaaaaagcacttggccttggtgtcttcagtctcttgctctcaggtattgttcagttctgaacttgactgaccactgttggtcatttttgttagagatttgcaggtaaacatttaacgtattgtagtttgggaaatcttttacgtttctgaagagagtgtgggtagttgtaaggactttgctttaaacctaatcaccaaagcaggaacagaaatttaagttccaaaataaatttttaaggtcatttttaatctcacttgtttcatagacgttcaaggacattttcaaagaaacacc

SEQ ID NO: 18307 - protein, 58 aa, Homo sapiens
MFNIVEYHGKISYNLIKQRCWDYRCDTPYWALGCVFKKHLALVSSVSCSQVLFSSELD

SEQ ID NO: 18308 - DNA, 549 bp, Homo sapiens
ctttttttgtggtcgtgatgtctgtgaattggtggtgcagatgtgtggtgacttttgatgaatgactttcttcttctcccagccctcaaggaaaccagcaaatcaaaagggtctcctgcttttttttttctttttgtcctccagcatcaccaacttgaagtactggggccgttgtgaaccaatcacctccaagacactacagcttctcaatgacctgtccattggatatctagcgtaaggaagctagtgaagcttagtgcggtacagttcatgctgaacaatcacacggtgagtgattttagctttttttcctggccctcctaccacccacacatacactttctcgacacataaaggagatatgtaaactgaggtcccgggtattgctacagcaaagacggtggtcctgattcccacgatactgccagattatacttacgtcatcagagtggctctttgagatccagatgatgtgagttatggtgaagtcacctactgctactcatactgcagataaattagtagtagtgacaacggtagcctgccttc

SEQ ID NO: 18309 - protein, 58 aa, Homo sapiens
MTFFFSQPSRKPANQKGLLLFFFFLSSSITNLKYWGRCEPITSKTLQLLNDLSIGYLA

SEQ ID NO: 18310 - DNA, 514 bp, Homo sapiens
ctgggtccattacatttatcttgggtgtcttcaccctgaactcactggtcgcctgccacttgggtgcttttcaggaagagcagatcaactaaaggaatcagctgccagacaatgggacgtgagactgtcaaggtagaggatgacatcaagtttggaaaatcattccccttcctcagaaaagccttctggttctcaggacagcctgactgctaccctttgtcatctgttcatcaaatacttattcagcatctattatgggccaggtatctttttgatggtcaggaatggaaaaggaaattacaaaagcaccatgcacaattattttaattctacttgatagccatgaagacaactcagcgcacttaagcatacggcagcatgcatatggcctaaaagaatggcaagtggggaatctccttacccttgctattgaatcacagagttagcaagtcagagcctctggattcgaggtctggaagacagactcacaggatacaaactaatggacagtgga

SEQ ID NO: 18311 - protein, 71 aa, Homo sapiens [sequence omitted]

SEQ ID NO: 18312 - DNA, 1874 bp, Homo sapiens
agtgtgctccccgccccctgccgcggcgcctcgcctcccggctcacctccccaccccacctgcccgctgcggctctccgcgggagatctcaccgttctggagacagggctcgctcgctctcacggtaggctggaagaacgggctgtctgggccttaggaaaggcccatgctgtataaggcatggggaaaggaaaggaagaaaggcaacgaacaagaaggagggcttccaactgcagcttcctgccggctgcaggcctcccttcctaagctgagctgaggcttcctctccatgggctggggagggggcgccaggaggcctcggcgggtccgcaattggccgggacagcttctcacgaaaggtcctgggccggcatcatcagcctcacctgggaactggttagaactacaaattccctcggccccacccagaccgacgccaagggcagctgtggagtggggcgcggcaatgcgccccttaacagccctccaggcttcttagcccgggcttggacagccgccttccggccagaggggatgaggttgcgctgcgctccgggagcgccgatggcgtgactggccccgcgcggagcagcgacagtaaggctgtgtggggggagctgggacctaagccgcgcgcacacccctttctctgcgtctggtggaggtgcacagaggcttttgagtcaggcccaagcgcagccaggtgacctccccgcggcctttcaagcctgagctcggtggacagctccctctcccgtgagtcccgctgtcctgtacgcgcccggtcgagccccgggctgcgcaccccgctaggaggtgggtactcgtcctccaggagttgccggtgagcccttgaccgtggcaggtcccctccagccgcgagcgacccctcagtacctgccgatgcctgctggtctctggcatcctccagtcgagggtcagggtcagggagcaaggcctcacgcgggcgccctccttgcagctgcccggccagcccgcttctctgcccggagccatgaatctcagtagcgccagtagcacggaggaaaaggcagtgacgaccgtgctctggggctgcgagctcagtcaggagaggcggacttggaccttcagaccccagctggaggggaagcagagctgcaggctgttgcttcatacgatttgcttgggggagaaagccaaagaggagatgcatcgcgtggagatcctgcccccagcaaaccaggaggacaagaagatgcagccggtcaccattgcctcactccaggcctcagtcctccccatggtctccatggtaggagtgcagctttctcccccagttactttccagctccgggctggctcaggacccgtgttcctcagtggccaggaacgttatgaagcatcagacctaacctgggaggaggaggaggaagaagaaggggaggaggaggaagaggaagaggaagatgatgaggatgaggatgcagatatatctctggaggagcaaagccctgtcaaacaagtcaaaaggctggtgccccagaagcaggcgagcgtggctaagaaaaaaaagctggaaaaagaagaagaggaaataagagccagcgttagagacaagagccctgtgaaaaaggccaaagccacagccagagccaagaagccaggattcaagaaatgaggagccacgccttggggggcacggtgcaaagtgggccttccctgggctgtgctgcaggcacagggtgcccctgtccagcccctccacctgtgtctgaatgcaacaggggtgttgcgggggcaacatgagagcccctcacccccaactctccactttcaggaggcccccagtgaagagccccacctcggggtcacaataaagttgcctggtcagg

SEQ ID NO: 18313 - protein, 214 aa, Homo sapiens; identical to SEQ ID NO: 2214

SEQ ID NO: 18314 - DNA, 1189 bp, Homo sapiens
agggggcgccaggaggcctcggcgggtccgcaattggccgggacagcttctcacgaaaggtcctgggccggcatcatcagcctcacctgggaactggttagaactacaaattccctcggccccacccagaccgacgccaagggcagctgtggagtggggcgcggcaatgcgccccttaacagccctccaggcttcttagcccgggcttggacagccgccttccggccagaggggatgaggttgcgctgcgctccgggagcgccgatggcgtgactggccccgcgcggagcagcgacactgcccggccagcccgcttctctgcccggagccatgaatctcagtagcgccagtagcacggaggaaaaggcagtgacgaccgtgctctggggctgcgagctcagtcaggagaggcggacttggaccttcagaccccagctggaggggaagcagagctgcaggctgttgcttcatacgatttgcttgggggagaaagccaaagaggagatgcatcgcgtggagatcctgcccccagcaaaccaggaggacaagaagatgcagccggtcaccattgcctcactccaggcctcagtcctccccatggtctccatggtaggagtgcagctttctcccccagttactttccagctccgggctggctcaggacccgtgttcctcagtggccaggaacgttatgaagcatcagacctaacctgggaggaggaggaggaagaagaaggggaggaggaggaagaggaagaggaagatgatgaggatgaggatgcagatatatctctggaggagcaaagccctgtcaaacaagtcaaaaggctggtgccccagaagcaggcgagcgtggctaagaaaaaaaagctggaaaaagaagaagaggaaataagagccagcgttagagacaagagccctgtgaaaaaggccaaagccacagccagagccaagaagccaggattcaagaaatgaggagccacgccttggggggcacggtgcaaagtgggccttccctgggctgtgctgcaggcacagggtgcccctgtccagcccctccacctgtgtctgaatgcaacaggggtgttgcgggggcaacatgagagcccctcacccccaactctccactttcaggaggcccccagtgaagagccccacctcggggtcacaataaagttgcctggtcagg

SEQ ID NO: 18315 - protein, 214 aa, Homo sapiens; identical to SEQ ID NO: 2214

SEQ ID NO: 18316 - DNA, 1099 bp, Homo sapiens
ggggggagctgggacctaagccgcgcgcacacccctttctctgcgtctggtggaggtgcacagaggcttttgagtcaggcccaagcgcagccaggtgacctccccgcggcctttcaagcctgagctcggtggacagctccctctcccgtgagtcccgctgtcctgtacgcgcccggtcgagccccgggctgcgcaccccgctaggagctgcccggccagcccgcttctctgcccggagccatgaatctcagtagcgccagtagcacggaggaaaaggcagtgacgaccgtgctctggggctgcgagctcagtcaggagaggcggacttggaccttcagaccccagctggaggggaagcagagctgcaggctgttgcttcatacgatttgcttgggggagaaagccaaagaggagatgcatcgcgtggagatcctgcccccagcaaaccaggaggacaagaagatgcagccggtcaccattgcctcactccaggcctcagtcctccccatggtctccatggtaggagtgcagctttctcccccagttactttccagctccgggctggctcaggacccgtgttcctcagtggccaggaacgttatgaagcatcagacctaacctgggaggaggaggaggaagaagaaggggaggaggaggaagaggaagaggaagatgatgaggatgaggatgcagatatatctctggaggagcaaagccctgtcaaacaagtcaaaaggctggtgccccagaagcaggcgagcgtggctaagaaaaaaaagctggaaaaagaagaagaggaaataagagccagcgttagagacaagagccctgtgaaaaaggccaaagccacagccagagccaagaagccaggattcaagaaatgaggagccacgccttggggggcacggtgcaaagtgggccttccctgggctgtgctgcaggcacagggtgcccctgtccagcccctccacctgtgtctgaatgcaacaggggtgttgcgggggcaacatgagagcccctcacccccaactctccactttcaggaggcccccagtgaagagccccacctcggggtcacaataaagttgcctggtcagg

SEQ ID NO: 18317 - protein, 214 aa, Homo sapiens; identical to SEQ ID NO: 2214

SEQ ID NO: 18318 - DNA, 925 bp, Homo sapiens
gctgggacctaagccgcgcgcacacccctttctctgcgtctggtggaggtgcacagaggcttttgagtcaggcccaagcgcagccaggtgacctccccgcggcctttcaagcctgagctcggtggacagctccctctcccgtgagtcccgctgtcctgtacgcgcccggtcgagccccgggctgcgcaccccgctaggagctgcccggccagcccgcttctctgcccggagccatgaatctcagtagcgccagtagcacggaggaaaaggcagtgacgaccgtgctctggggctgcgagctcagtcaggagaggcggacttggaccttcagaccccagctggaggggaagcagagctgcaggctgttgcttcatacgatttgcttgggggagaaagccaaagaggagatgcatcgcgtggagatcctgcccccagcaaaccaggaggacaagaagatgcagccggtcaccattgcctcactccaggcctcagtcctccccatggtctccatggtaggagtgcagctttctcccccagttactttccagctccgggctggctcaggacccgtgttcctcagtggccaggaacgttatgaaaaaaaagctggaaaaagaagaagaggaaataagagccagcgttagagacaagagccctgtgaaaaaggccaaagccacagccagagccaagaagccaggattcaagaaatgaggagccacgccttggggggcacggtgcaaagtgggccttccctgggctgtgctgcaggcacagggtgcccctgtccagcccctccacctgtgtctgaatgcaacaggggtgttgcgggggcaacatgagagcccctcacccccaactctccactttcaggaggcccccagtgaagagccccacctcggggtcacaataaagttgcctggtcagg

SEQ ID NO: 18319 - protein, 136 aa, Homo sapiens
MNLSSASSTEEKAVTTVLWGCELSQERRTWTFRPQLEGKQSCRLLLHTICLGEKAKEEMHRVEILPPANQEDKKMQPVTIASLQASVLPMVSMVGVQLSPPVTFQLRAGSGPVFLSGQERYEKKAGKRRRGNKSQR

SEQ ID NO: 18320 - DNA, 866 bp, Homo sapiens
caaaaggctggtgccccagaagcaggcgagcgtggctaagaaaaaaaagctggaaaaagaagaagaggaaataaggaagcagaggttgcagtgagctgagatcgcgccattgcactccagcctgaacaacaagaatgaaactccgtctcaaaaaagaaaaatttgcaaagggagggaacagcatggagctctctgttcaccggtctccaggacctcggattccacctttaatcctgaaaacccaggaaggcttctgtatccctacaatgaagcaggtttggggctggatctgcagggtggcaactcaatccatgcagaacagaagaagcatggacttttccattctggctattccattcactagctgggccattctgagcaaactacctcccaatgtgcctcagtttcctcatctgcaaaatgggctagtcgctggcattgtaccgagcagtatgagaccggaggtcatgggaagaggctggtaggcacttcatcccaggcagctgctcagggacatgggacacagggaggggactccgagctgctcctagctcagagaggctctagggacaggcactggaaggaaggggatgcagaatggtgagtggagctgggtctcagaacacagacatcttgaagtctgctatgtgctgatttcacacttgaccccccaacaccctgaggcattactgtcctcatttctcagatggaactacagaggcccaaggaaaaggggcttaggccaggacacccagctcttctccaagtgtctgtctcaggctagcttttgcaactctccattgggattcttcctagatctccatctgtacctgccaacccacctctgacccccaacctgttgcgcc

SEQ ID NO: 18321 - protein, 116 aa, Homo sapiens
MKLRLKKEKFAKGGNSMELSVHRSPGPRIPPLILKTQEGFCIPTMKQVWGWICRVATQSMQNRRSMDFSILAIPFTSWAILSKLPPNVPQFPHLQNGLVAGIVPSSMRPEVMGRGW

SEQ ID NO: 18322 - DNA, 1189 bp, Homo sapiens
gaacctctccagcgatgggagccgcccgcctgctgcccaacctcactctgtgcttacagctgctgattctctgctgtcaaactcagtacgtgagggaccagggcgccatgaccgaccagctgagcaggcggcagatccgcgagtaccaactctacagcaggaccagtggcaagcacgtgcaggtcaccgggcgtcgcatctccgccaccgccgaggacggcaacaagtttgccaagctcatagtggagacggacacgtttggcagccgggttcgcatcaaaggggctgagagtgagaagtacatctgtatgaacaagaggggcaagctcatcgggaagcccagcgggaagagcaaagactgcgtgttcacggagatcgtgctggagaacaactatacggccttccagaacgcccggcacgagggctggttcatggccttcacgcggcaggggcggccccgccaggcttcccgcagccgccagaaccagcgcgaggcccacttcatcaagcgcctctaccaaggccagctgcccttccccaaccacgccgagaagcagaagcagttcgagtttgtgggctccgcccccacccgccggaccaagcgcacacggcggccccagcccctcacgtagtctgggaggcagggggcagcagcccctgggccgcctccccacccctttcccttcttaatccaaggactgggctggggtggcgggaggggagccagatccccgagggaggaccctgagggccgcgaagcatccgagcccccagctgggaaggggcaggccggtgccccaggggcggctggcacagtgcccccttcccggacgggtggcaggccctggagaggaactgagtgtcaccctgatctcaggccaccagcctctgccggcctcccagccgggctcctgaagcccgctgaaaggtcagcgactgaaggccttgcagacaaccgtctggaggtggctgtcctcaaaatctgcttctcggatctccctcagtctgcccccagcccccaaactcctcctggctagactgtaggaagggacttttgtttgtttgtttgtttcaggaaaaaagaaagggagagagaggaaaatagagggttgtccactcctcacattccacgacccaggcctgcaccccacccccaactcccagccccggaataaaaccattttcctgc

SEQ ID NO: 18323 - protein, 205 aa, Homo sapiens
MGAARLLPNLTLCLQLLILCCQTQYVRDQGAMTDQLSRRQIREYQLYSRTSGKHVQVTGRRISATAEDGNKFAKLIVETDTFGSRVRIKGAESEKYICMNKRGKLIGKPSGKSKDCVFTEIVLENNYTAFQNARHEGWFMAFTRQGRPRQASRSRQNQREAHFIKRLYQGQLPFPNHAEKQKQFEFVGSAPTRRTKRTRRPQPLT

SEQ ID NO: 18324 - DNA, 663 bp, Homo sapiens
acctctccagcgatgggagccgcccgcctgctgcccaacctcactctgtgcttacagctgctgattctctgctgtcaaactcagggggagaatcacccgtctcctaattttaaccagtacgtgagggaccagggcgccatgaccgaccagctgagcaggcggcagatccgcgagtaccaactctacagcaggaccagtggcaagcacgtgcaggtcaccgggcgtcgcatctccgccaccgccgaggacggcaacaagtttgccaagctcatagtggagacggacacgtttggcagccgggttcgcatcaaaggggctgagagtgagaagtacatctgtatgaacaagaggggcaagctcatcgggaagcccagcgggaagagcaaagactgcgtgttcacggagatcgtgctggagaacaactatacggccttccagaacgcccggcacgagggctggttcatggccttcacgcggcaggggcggccccgccaggcttcccgcagccgccagaaccagcgcgaggcccacttcatcaagcgcctctaccaaggccagctgcccttccccaaccacgccgagaagcagaagcagttcgagtttgtgggctccgcccccacccgccggaccaagcgcacacggcggccccagcccctcacgtag

SEQ ID NO: 18325 - protein, 216 aa, Homo sapiens; identical to SEQ ID NO: 2216

SEQ ID NO: 18326 - DNA, 2578 bp, Homo sapiens
ccagggtggggcgaggggcaggtcttgcagaggctaggcagaggctgctctatggggaggtgcaattggaaatgagcaacggtgcacagtaagtgttaaccccgcgcaggttaaatgtccagctctgagagctgctccctcactccccctgcctcaaaggtgatatttcccaccccctccctaggagagagtagcccctaacagatgctaatctgggtctagctctgtccagatggctgaggttgggcctgggataaaggtggaattagggatttggggcaggggctgagaaaagctgtcccagcacaggcagcggcatccaggtggagacaaaaccagcaaaaaaggtacattctcatgctagagctgaggctgttgccaggagccaggaaacctagcccgggtcgcaccttgcaggatggaggggaagaagtactcagtctctcccactcagccttacagatgggtaacgagagacctagctgggaggcggtactcctcctggctttgcacagtgcgtggggggaaatggttcctctcccccaacccaaaggggaagcaggtgggcgggcgcatcccaccaactggccaggagcctctgttacattgtggctaaggagctgcctgccaggggcagccattgggccaccgctgatagtgcctgtcctcttggtactgcctctgcctccctccgctaaggaggcaccttgcctgcctgctgtcccatagtgcccagccccagccccagccccagctccagcccatagaggagggaggaacactggaagggccctgagcaccagggggcaaggccgggaagaagatgggtatgagctcaggattccacagttagtgcttcaaagaaatgctcatgggaccctgcaggagctttcagagtcccccacatgctctctggtgaccctaactcgcagcaccatctgctctgtgcccgtgtgctgggcaaggggtctttcaaggccagtggggaggatgaggaaggaatctggttgtcctggctaatggagcatgtccttggagttctgggggagatgacaggctctggtctaagaggtagggacaggggttctgtccctaatgagctgtgtgccccgtgcacctccttcatagaatacgaggacgggatagaaccctgagggctccttccagctcccagagtcctgattccagggctgtgctctgtcaataagtgtcccccagcctgggcagaccccagtcccttctgtaaggtagacgcaaagcaaagaggttatgaccggctcacccaggggcctgggaaggctatggccatatgcccacttcactctgcaggacaagtggcctgtccccactatattcacctcctcacccctctcccttggatggaccagtggtggtgtcacccaaagcaaattgacactatttttcccttggtaaccgcaaagggggagaatcacccgtctcctaattttaaccagtacgtgagggaccagggcgccatgaccgaccagctgagcaggcggcagatccgcgagtaccaactctacagcaggaccagtggcaagcacgtgcaggtcaccgggcgtcgcatctccgccaccgccgaggacggcaacaagtttgccaagctcatagtggagacggacacgtttggcagccgggttcgcatcaaaggggctgagagtgagaagtacatctgtatgaacaagaggggcaagctcatcgggaagcccagcgggaagagcaaagactgcgtgttcacggagatcgtgctggagaacaactatacggccttccagaacgcccggcacgagggctggttcatggccttcacgcggcaggggcggccccgccaggcttcccgcagccgccagaaccagcgcgaggcccacttcatcaagcgcctctaccaaggccagctgcccttccccaaccacgccgagaagcagaagcagttcgagtttgtgggctccgcccccacccgccggaccaagcgcacacggcggccccagcccctcacgtagtctgggaggcagggggcagcagcccctgggccgcctccccacccctttcccttcttaatccaaggactgggctggggtggcgggaggggagccagatccccgagggaggaccctgagggccgcgaagcatccgagcccccagctgggaaggggcaggccggtgccccaggggcggctggcacagtgcccccttcccggacgggtggcaggccctggagaggaactgagtgtcaccctgatctcaggccaccagcctctgccggcctcccagccgggctcctgaagcccgctgaaaggtcagcgactgaaggccttgcagacaaccgtctggaggtggctgtcctcaaaatctgcttctcggatctccctcagtctgcccccagcccccaaactcctcctggctagactgtaggaagggacttttgtttgtttgtttgtttcaggaaaaaagaaagggagagagaggaaaatagagggttgtccactcctcacattccacgacccaggcctgcaccccacccccaactcccagccccggaataaaaccattttcctgc

SEQ ID NO: 18327 - protein, 239 aa, Homo sapiens
MAICPLHSAGQVACPHYIHLLTPLPWMDQWWCHPKQIDTIFPLVTAKGENHPSPNFNQYVRDQGAMTDQLSRRQIREYQLYSRTSGKHVQVTGRRISATAEDGNKFAKLIVETDTFGSRVRIKGAESEKYICMNKRGKLIGKPSGKSKDCVFTEIVLENNYTAFQNARHEGWFMAFTRQGRPRQASRSRQNQREAHFIKRLYQGQLPFPNHAEKQKQFEFVGSAPTRRTKRTRRPQPLT

SEQ ID NO: 18328 - DNA, 2527 bp, Homo sapiens
gtgaccttgtggggaaaggagccaagaacggggcgtcggggggcctgggacccccctgcctgagagatacaggaatcctggccccgtgttgtggacacaagcgcccatcctcaaggtcctgagaactcctgaacttccaaagcctggagagtcaccgccgagggatgaggacgcgccagcccgggggaacgcgccagctgctttcgcggccccaagcgcgcagcgcccagcagccgcgccgagcctgacacgctgtcctctcccctcgcgcacagggctctgcgagtgacccggcgggcgagctccgtgctgcatggaacggctgcagaagcaaccacttacctcccccgggagcgtgagcccctcccgagattccagtgtgcctggctctccctccagcatcgtggccaagatggacaatcaggtgctgggctacaaggacctggctgccatccccaaggacaaggccatcctggacatcgagcggcccgacctcatgatctacgagcctcacttcacttattccctcctggaacacgtggagctgcctcgcagccgcgagcgctcgctgtcacccaaatccacatcccccccaccatccccagaggtgtgggcggacagccggtcgcctggaatcatctctcaggcctcggcccccagaaccactggaaccccccggaccagcctgccccatttccaccaccctgagacctcccgcccagattccaacatctacaagaagcctcccatctataagcagagagagtccgtgggaggcagccctcagaccaagcacctcatcgaggatctcatcatcgagtcatccaagtttcctgcagcccagcccccagaccccaaccagccagccaaaatcgaaaccgactactggccatgccccccgtctctggctgttgtggagacagaatggaggaagcggaaggcgtctcggaggggagcagaggaagaggaggaggaggaagatgacgactctggagaggagatgaaggctctcagggagcgtcagagagaggaactcagtaaggttacttccaacttgggaaagatgatcttgaaagaagagatggaaaagtcattgccgatccgaaggaaaacccgctctctgcctgaccggacacccttccatacctccttgcaccagggaacgtctaaatcttcctctctccccgcctatggcaggaccaccctgagccggctacagtccacagagttcagcccatcagggagtgagactggaagcccagccccagatctatccctatgaaatgctagtggtgaccaacaaggggcgaaccaagctgccaccgggggtggatcggatgcggcttgagaggcatctgtctgccgaggacttctcaagggtatttgccatgtcccctgaagagtttggcaagctggctctgtggaagcggaatgagctcaagaagaaggcctctctcttctgatggcccccacctgctccgggacggcccccttacccctgctgcttcagggtttttccccggcgggttgggaggggcaggaggtggggtggaaatagggtgggctcctttcctcaggtagagtggggggccaaaacctctgcagtccccggcagtgagctatggactttcttccccctcacaaggctgggggcctcctgctctcgtccctggccctccctgcacagggcaaagccagtctgggctctggcacacagagttcatgtttgcgccctctccctgcccctcaccccagagggtgaggaggaatgaggggcattggtggttaggccggttggctgtcttgaacagctggagggaagatgcaggggtgggaagcggccaggcagaaagagctccaggctcttgtgtcgcccacccagccctcccatactcactcctgacagctttcctgcactgcagcctcctgctcctctgactctagtgggaacaggccccagctcagcctccggcagggaggtcacccctccacttcagcttgccctgacctccgctcgcaaaccccgagcttccaagccttttgctccagccctgcggcttccccagaagcctgggcttagggtggagatgccgcctacacacgatcctggccctccacctgcctccaggccacgaaatgggaattccagcactaagccaggcaccgggcagaagctgggccttccgcctcccttggatggggtcaagaggccaggcctggcacattttggagtgtcctggctaccagctctcacctacacccacgcacccccccacacactatgctctctcaagaatgtaatttattggggcccccccagctgctttcctcacctgcccctgccctaccttacacccccagcttgacttctttccagtccacgtgtgtatataatgatatctatatttttgcccaggtctgggtattgctcctgcccagaccctgacatccctttccactgtgtgtgtgaccatgctgggggagggggactctgcttggaattaaaaggttgcattgggtccctaca

SEQ ID NO: 18329 - protein, 322 aa, Homo sapiens
MERLQKQPLTSPGSVSPSRDSSVPGSPSSIVAKMDNQVLGYKDLAAIPKDKAILDIERPDLMIYEPHFTYSLLEHVELPRSRERSLSPKSTSPPPSPEVWADSRSPGIISQASAPRTTGTPRTSLPHFHHPETSRPDSNIYKKPPIYKQRESVGGSPQTKHLIEDLIIESSKFPAAQPPDPNQPAKIETDYWPCPPSLAVVETEWRKRKASRRGAEEEEEEEDDDSGEEMKALRERQREELSKVTSNLGKMILKEEMEKSLPIRRKTRSLPDRTPFHTSLHQGTSKSSSLPAYGRTTLSRLQSTEFSPSGSETGSPAPDLSL

SEQ ID NO: 18330 - DNA, 2445 bp, Homo sapiens
cgcggctgagccgggcctgagctgccggcaggttgtcttggcaacaggaggtggagaggagatgcgccgagggatggaggtgtatgtcaccgaggaggctgctgcgctcctgccccacgccctgggcccttgaagcctggagagtcaccgccgagggatgaggacgcgccagcccgggggaacgcgccagctgctttcgcggccccaagcgcgcagcgcccagcagccgcgccgagcctgacacgctgtcctctcccctcgcgcacagggctctgcgagtgacccggcgggcgagctccgtgctgcatggaacggctgcagaaggccaagatggacaatcaggtgctgggctacaaggacctggctgccatccccaaggacaaggccatcctggacatcgagcggcccgacctcatgatctacgagcctcacttcacttattccctcctggaacacgtggagctgcctcgcagccgcgagcgctcgctgtcacccaaatccacatcccccccaccatccccagaggtgtgggcggacagccggtcgcctggaatcatctctcaggcctcggcccccagaaccactggaaccccccggaccagcctgccccatttccaccaccctgagacctcccgcccagattccaacatctacaagaagcctcccatctataagcagagagagtccgtgggaggcagccctcagaccaagcacctcatcgaggatctcatcatcgagtcatccaagtttcctgcagcccagcccccagaccccaaccagccagccaaaatcgaaaccgactactggccatgccccccgtctctggctgttgtggagacagaatggaggaagcggaaggcgtctcggaggggagcagaggaagaggaggaggaggaagatgacgactctggagaggagatgaaggctctcagggagcgtcagagagaggaactcagtaaggttacttccaacttgggaaagatgatcttgaaagaagagatggaaaagtcattgccgatccgaaggaaaacccgctctctgcctgaccggacacccttccatacctccttgcaccagggaacgtctaaatcttcctctctccccgcctatggcaggaccaccctgagccggctacagtccacagagttcagcccatcagggagtgagactggaagcccagccccagatctatccctatgaaatgctagtggtgaccaacaaggggcgaaccaagctgccaccgggggtggatcggatgcggcttgagaggcatctgtctgccgaggacttctcaagggtatttgccatgtcccctgaagagtttggcaagctggctctgtggaagcggaatgagctcaagaagaaggcctctctcttctgatggcccccacctgctccgggacggcccccttacccctgctgcttcagggtttttccccggcgggttgggaggggcaggaggtggggtggaaatagggtgggctcctttcctcaggtagagtggggggccaaaacctctgcagtccccggcagtgagctatggactttcttccccctcacaaggctgggggcctcctgctctcgtccctggccctccctgcacagggcaaagccagtctgggctctggcacacagagttcatgtttgcgccctctccctgcccctcaccccagagggtgaggaggaatgaggggcattggtggttaggccggttggctgtcttgaacagctggagggaagatgcaggggtgggaagcggccaggcagaaagagctccaggctcttgtgtcgcccacccagccctcccatactcactcctgacagctttcctgcactgcagcctcctgctcctctgactctagtgggaacaggccccagctcagcctccggcagggaggtcacccctccacttcagcttgccctgacctccgctcgcaaaccccgagcttccaagccttttgctccagccctgcggcttccccagaagcctgggcttagggtggagatgccgcctacacacgatcctggccctccacctgcctccaggccacgaaatgggaattccagcactaagccaggcaccgggcagaagctgggccttccgcctcccttggatggggtcaagaggccaggcctggcacattttggagtgtcctggctaccagctctcacctacacccacgcacccccccacacactatgctctctcaagaatgtaatttattggggcccccccagctgctttcctcacctgcccctgccctaccttacacccccagcttgacttctttccagtccacgtgtgtatataatgatatctatatttttgcccaggtctgggtattgctcctgcccagaccctgacatccctttccactgtgtgtgtgaccatgctgggggagggggactctgcttggaattaaaaggttgcattgggtccctaca

SEQ ID NO: 18331 - protein, 297 aa, Homo sapiens
MERLQKAKMDNQVLGYKDLAAIPKDKAILDIERPDLMIYEPHFTYSLLEHVELPRSRERSLSPKSTSPPPSPEVWADSRSPGIISQASAPRTTGTPRTSLPHFHHPETSRPDSNIYKKPPIYKQRESVGGSPQTKHLIEDLIIESSKFPAAQPPDPNQPAKIETDYWPCPPSLAVVETEWRKRKASRRGAEEEEEEEDDDSGEEMKALRERQREELSKVTSNLGKMILKEEMEKSLPIRRKTRSLPDRTPFHTSLHQGTSKSSSLPAYGRTTLSRLQSTEFSPSGSETGSPAPDLSL

SEQ ID NO: 18332 - DNA, 407 bp, Homo sapiens
ctaggctcctgggggaagtgacagcccgtggatctggcctacgcctctcgggcctctgtggcctcagagcgtctgggccacactgtctgggaagagcctggagagtcaccgccgagggatgaggacgcgccagcccgggggaacgcgccagctgctttcgcggccccaagcgcgcagcgcccagcagccgcgccgagcctgacacgctgtcctctcccctcgcgcacagggctctgcgagtgacccggcgggcgagctccgtgctgcatggaacggctgcagaaggccaagatggacaatcaggtgctgggctacaaggacctggctgccatccccaaggacaaggccatcctggacatcgagcggcccgacctcatgatctacgagcctcacttcacttattccct

SEQ ID NO: 18333 - protein, 45 aa, Homo sapiens
MERLQKAKMDNQVLGYKDLAAIPKDKAILDIERPDLMIYEPHFTY

SEQ ID NO: 18334 - DNA, 2556 bp, Homo sapiens
gttgcctggttgtgagagtcaggggagcagggacaggtccaagacaaggaaggcagttgggctgtgggaatggggagcccagggaaggcctccagagctggcctggagagtcaccgccgagggatgaggacgcgccagcccgggggaacgcgccagctgctttcgcggccccaagcgcgcagcgcccagcagccgcgccgagcctgacacgctgtcctctcccctcgcgcacagggctctgcgagtgacccggcgggcgagctccgtgctgcatggaacggctgcagaagcaaccacttacctcccccgggagcgtgagcccctcccgagattccagtgtgcctggctctccctccagcatcgtggccaagatggacaatcaggtgctgggctacaaggacctggctgccatccccaaggacaaggccatcctggacatcgagcggcccgacctcatgatctacgagcctcacttcacttattccctcctggaacacgtggagctgcctcgcagccgcgagcgctcgctgtcacccaaatccacatcccccccaccatccccagaggtgtgggcggacagccggtcgcctggaatcatctctcaggcctcggcccccagaaccactggaaccccccggaccagcctgccccatttccaccaccctgagacctcccgcccagattccaacatctacaagaagcctcccatctataagcagagagagtccgtgggaggcagccctcagaccaagcacctcatcgaggatctcatcatcgagtcatccaagtttcctgcagcccagcccccagaccccaaccagccagccaaaatcgaaaccgactactggccatgccccccgtctctggctgttgtggagacagaatggaggaagcggaaggcgtctcggaggggagcagaggaagaggaggaggaggaagatgacgactctggagaggagatgaaggctctcagggagcgtcagagagaggaactcagtaaggttacttccaacttgggaaagatgatcttgaaagaagagatggaaaagtcattgccgatccgaaggaaaacccgctctctgcctgaccggacacccttccatacctccttgcaccagggaacgtctaaatcttcctctctccccgcctatggcaggaccaccctgagccggctacagtccacagagttcagcccatcagggagtgagactggaagcccaggtctccccagaacggagagggccagagggggaggatggaccgggggaactccctgccctgtgtgctggagcagaagatctatccctatgaaatgctagtggtgaccaacaaggggcgaaccaagctgccaccgggggtggatcggatgcggcttgagaggcatctgtctgccgaggacttctcaagggtatttgccatgtcccctgaagagtttggcaagctggctctgtggaagcggaatgagctcaagaagaaggcctctctcttctgatggcccccacctgctccgggacggcccccttacccctgctgcttcagggtttttccccggcgggttgggaggggcaggaggtggggtggaaatagggtgggctcctttcctcaggtagagtggggggccaaaacctctgcagtccccggcagtgagctatggactttcttccccctcacaaggctgggggcctcctgctctcgtccctggccctccctgcacagggcaaagccagtctgggctctggcacacagagttcatgtttgcgccctctccctgcccctcaccccagagggtgaggaggaatgaggggcattggtggttaggccggttggctgtcttgaacagctggagggaagatgcaggggtgggaagcggccaggcagaaagagctccaggctcttgtgtcgcccacccagccctcccatactcactcctgacagctttcctgcactgcagcctcctgctcctctgactctagtgggaacaggccccagctcagcctccggcagggaggtcacccctccacttcagcttgccctgacctccgctcgcaaaccccgagcttccaagccttttgctccagccctgcggcttccccagaagcctgggcttagggtggagatgccgcctacacacgatcctggccctccacctgcctccaggccacgaaatgggaattccagcactaagccaggcaccgggcagaagctgggccttccgcctcccttggatggggtcaagaggccaggcctggcacattttggagtgtcctggctaccagctctcacctacacccacgcacccccccacacactatgctctctcaagaatgtaatttattggggcccccccagctgctttcctcacctgcccctgccctaccttacacccccagcttgacttctttccagtccacgtgtgtatataatgatatctatatttttgcccaggtctgggtattgctcctgcccagaccctgacatccctttccactgtgtgtgtgaccatgctgggggagggggactctgcttggaattaaaaggttgcattgggtccctaca

SEQ ID NO: 18335 - protein, 348 aa, Homo sapiens [sequence omitted]

SEQ ID NO: 18336 - DNA, 2659 bp, Homo sapiens
aagacaggaggaagaaagggagagagggccaggcagtcgcactgtgaacagaacaggagaaggcgaagcggggcaaagttccctgcccaccgacgccagcctgcttggatgacttgcctcgtttcataattcacttactgtctgcaccagccggcctccagcctggctggaccctgctgcctgtgtggcccggagccagaggcccccacactcccagctgctcttctacagatgccatcaacgagcaggactctgggtggctccactgtctaagcctggagagtcaccgccgagggatgaggacgcgccagcccgggggaacgcgccagctgctttcgcggccccaagcgcgcagcgcccagcagccgcgccgagcctgacacgctgtcctctcccctcgcgcacagggctctgcgagtgacccggcgggcgagctccgtgctgcatggaacggctgcagaagcaaccacttacctcccccgggagcgtgagcccctcccgagattccagtgtgcctggctctccctccagcatcgtggccaagatggacaatcaggtgctgggctacaaggacctggctgccatccccaaggacaaggccatcctggacatcgagcggcccgacctcatgatctacgagcctcacttcacttattccctcctggaacacgtggagctgcctcgcagccgcgagcgctcgctgtcacccaaatccacatcccccccaccatccccagaggtgtgggcggacagccggtcgcctggaatcatctctcaggcctcggcccccagaaccactggaaccccccggaccagcctgccccatttccaccaccctgagacctcccgcccagattccaacatctacaagaagcctcccatctataagcagagagagtccgtgggaggcagccctcagaccaagcacctcatcgaggatctcatcatcgagtcatccaagtttcctgcagcccagcccccagaccccaaccagccagccaaaatcgaaaccgactactggccatgccccccgtctctggctgttgtggagacagaatggaggaagcggaaggcgtctcggaggggagcagaggaagaggaggaggaggaagatgacgactctggagaggagatgaaggctctcagggagcgtcagagagaggaactcagtaaggttacttccaacttgggaaagatgatcttgaaagaagagatggaaaagtcattgccgatccgaaggaaaacccgctctctgcctgaccggacacccttccatacctccttgcaccagggaacgtctaaatcttcctctctccccgcctatggcaggaccaccctgagccggctacagtccacagagttcagcccatcagggagtgagactggaagcccagccccagatctatccctatgaaatgctagtggtgaccaacaaggggcgaaccaagctgccaccgggggtggatcggatgcggcttgagaggcatctgtctgccgaggacttctcaagggtatttgccatgtcccctgaagagtttggcaagctggctctgtggaagcggaatgagctcaagaagaaggcctctctcttctgatggcccccacctgctccgggacggcccccttacccctgctgcttcagggtttttccccggcgggttgggaggggcaggaggtggggtggaaatagggtgggctcctttcctcaggtagagtggggggccaaaacctctgcagtccccggcagtgagctatggactttcttccccctcacaaggctgggggcctcctgctctcgtccctggccctccctgcacagggcaaagccagtctgggctctggcacacagagttcatgtttgcgccctctccctgcccctcaccccagagggtgaggaggaatgaggggcattggtggttaggccggttggctgtcttgaacagctggagggaagatgcaggggtgggaagcggccaggcagaaagagctccaggctcttgtgtcgcccacccagccctcccatactcactcctgacagctttcctgcactgcagcctcctgctcctctgactctagtgggaacaggccccagctcagcctccggcagggaggtcacccctccacttcagcttgccctgacctccgctcgcaaaccccgagcttccaagccttttgctccagccctgcggcttccccagaagcctgggcttagggtggagatgccgcctacacacgatcctggccctccacctgcctccaggccacgaaatgggaattccagcactaagccaggcaccgggcagaagctgggccttccgcctcccttggatggggtcaagaggccaggcctggcacattttggagtgtcctggctaccagctctcacctacacccacgcacccccccacacactatgctctctcaagaatgtaatttattggggcccccccagctgctttcctcacctgcccctgccctaccttacacccccagcttgacttctttccagtccacgtgtgtatataatgatatctatatttttgcccaggtctgggtattgctcctgcccagaccctgacatccctttccactgtgtgtgtgaccatgctgggggagggggactctgcttggaattaaaaggttgcattgggtccctaca

SEQ ID NO: 18337 - protein, 322 aa, Homo sapiens; identical to SEQ ID NO: 18329

SEQ ID NO: 18338 - DNA, 2729 bp, Homo sapiens
aagacaggaggaagaaagggagagagggccaggcagtcgcactgtgaacagaacaggagaaggcgaagcggggcaaagttccctgcccaccgacgccagcctgcttggatgacttgcctcgtttcataattcacttactgtctgcaccagccggcctccagcctggctggaccctgctgcctgtgtggcccggagccagaggcccccacactcccagctgctcttctacagatgccatcaacgagcaggactctgggtggctccactgtctaagcctggagagtcaccgccgagggatgaggacgcgccagcccgggggaacgcgccagctgctttcgcggccccaagcgcgcagcgcccagcagccgcgccgagcctgacacgctgtcctctcccctcgcgcacagggctctgcgagtgacccggcgggcgagctccgtgctgcatggaacggctgcagaagcaaccacttacctcccccgggagcgtgagcccctcccgagattccagtgtgcctggctctccctccagcatcgtggccaagatggacaatcaggtgctgggctacaaggacctggctgccatccccaaggacaaggccatcctggacatcgagcggcccgacctcatgatctacgagcctcacttcacttattccctcctggaacacgtggagctgcctcgcagccgcgagcgctcgctgtcacccaaatccacatcccccccaccatccccagaggtgtgggcggacagccggtcgcctggaatcatctctcaggcctcggcccccagaaccactggaaccccccggaccagcctgccccatttccaccaccctgagacctcccgcccagattccaacatctacaagaagcctcccatctataagcagagagagtccgtgggaggcagccctcagaccaagcacctcatcgaggatctcatcatcgagtcatccaagtttcctgcagcccagcccccagaccccaaccagccagccaaaatcgaaaccgactactggccatgccccccgtctctggctgttgtggagacagaatggaggaagcggaaggcgtctcggaggggagcagaggaagaggaggaggaggaagatgacgactctggagaggagatgaaggctctcagggagcgtcagagagaggaactcagtaaggttacttccaacttgggaaagatgatcttgaaagaagagatggaaaagtcattgccgatccgaaggaaaacccgctctctgcctgaccggacacccttccatacctccttgcaccagggaacgtctaaatcttcctctctccccgcctatggcaggaccaccctgagccggctacagtccacagagttcagcccatcagggagtgagactggaagcccaggtctccccagaacggagagggccagagggggaggatggaccgggggaactccctgccctgtgtgctggagcagaagatctatccctatgaaatgctagtggtgaccaacaaggggcgaaccaagctgccaccgggggtggatcggatgcggcttgagaggcatctgtctgccgaggacttctcaagggtatttgccatgtcccctgaagagtttggcaagctggctctgtggaagcggaatgagctcaagaagaaggcctctctcttctgatggcccccacctgctccgggacggcccccttacccctgctgcttcagggtttttccccggcgggttgggaggggcaggaggtggggtggaaatagggtgggctcctttcctcaggtagagtggggggccaaaacctctgcagtccccggcagtgagctatggactttcttccccctcacaaggctgggggcctcctgctctcgtccctggccctccctgcacagggcaaagccagtctgggctctggcacacagagttcatgtttgcgccctctccctgcccctcaccccagagggtgaggaggaatgaggggcattggtggttaggccggttggctgtcttgaacagctggagggaagatgcaggggtgggaagcggccaggcagaaagagctccaggctcttgtgtcgcccacccagccctcccatactcactcctgacagctttcctgcactgcagcctcctgctcctctgactctagtgggaacaggccccagctcagcctccggcagggaggtcacccctccacttcagcttgccctgacctccgctcgcaaaccccgagcttccaagccttttgctccagccctgcggcttccccagaagcctgggcttagggtggagatgccgcctacacacgatcctggccctccacctgcctccaggccacgaaatgggaattccagcactaagccaggcaccgggcagaagctgggccttccgcctcccttggatggggtcaagaggccaggcctggcacattttggagtgtcctggctaccagctctcacctacacccacgcacccccccacacactatgctctctcaagaatgtaatttattggggcccccccagctgctttcctcacctgcccctgccctaccttacacccccagcttgacttctttccagtccacgtgtgtatataatgatatctatatttttgcccaggtctgggtattgctcctgcccagaccctgacatccctttccactgtgtgtgtgaccatgctgggggagggggactctgcttggaattaaaaggttgcattgggtccctaca

SEQ ID NO: 18339 - protein, 348 aa, Homo sapiens [sequence omitted]

SEQ ID NO: 18340 - DNA, 2401 bp, Homo sapiens
ataattcacttactgtctgcaccagccggcctccagcctggctggaccctgctgcctgtgtggcccggagccagaggcccccacactcccagctgctcttctacagatgccatcaacgagcaggactctgggtggctccactgtctaagggctctgcgagtgacccggcgggcgagctccgtgctgcatggaacggctgcagaagcaaccacttacctcccccgggagcgtgagcccctcccgagattccagtgtgcctggctctccctccagcatcgtggccaagatggacaatcaggtgctgggctacaaggacctggctgccatccccaaggacaaggccatcctggacatcgagcggcccgacctcatgatctacgagcctcacttcacttattccctcctggaacacgtggagctgcctcgcagccgcgagcgctcgctgtcacccaaatccacatcccccccaccatccccagaggtgtgggcggacagccggtcgcctggaatcatctctcaggcctcggcccccagaaccactggaaccccccggaccagcctgccccatttccaccaccctgagacctcccgcccagattccaacatctacaagaagcctcccatctataagcagagagagtccgtgggaggcagccctcagaccaagcacctcatcgaggatctcatcatcgagtcatccaagtttcctgcagcccagcccccagaccccaaccagccagccaaaatcgaaaccgactactggccatgccccccgtctctggctgttgtggagacagaatggaggaagcggaaggcgtctcggaggggagcagaggaagaggaggaggaggaagatgacgactctggagaggagatgaaggctctcagggagcgtcagagagaggaactcagtaaggttacttccaacttgggaaagatgatcttgaaagaagagatggaaaagtcattgccgatccgaaggaaaacccgctctctgcctgaccggacacccttccatacctccttgcaccagggaacgtctaaatcttcctctctccccgcctatggcaggaccaccctgagccggctacagtccacagagttcagcccatcagggagtgagactggaagcccagccccagatctatccctatgaaatgctagtggtgaccaacaaggggcgaaccaagctgccaccgggggtggatcggatgcggcttgagaggcatctgtctgccgaggacttctcaagggtatttgccatgtcccctgaagagtttggcaagctggctctgtggaagcggaatgagctcaagaagaaggcctctctcttctgatggcccccacctgctccgggacggcccccttacccctgctgcttcagggtttttccccggcgggttgggaggggcaggaggtggggtggaaatagggtgggctcctttcctcaggtagagtggggggccaaaacctctgcagtccccggcagtgagctatggactttcttccccctcacaaggctgggggcctcctgctctcgtccctggccctccctgcacagggcaaagccagtctgggctctggcacacagagttcatgtttgcgccctctccctgcccctcaccccagagggtgaggaggaatgaggggcattggtggttaggccggttggctgtcttgaacagctggagggaagatgcaggggtgggaagcggccaggcagaaagagctccaggctcttgtgtcgcccacccagccctcccatactcactcctgacagctttcctgcactgcagcctcctgctcctctgactctagtgggaacaggccccagctcagcctccggcagggaggtcacccctccacttcagcttgccctgacctccgctcgcaaaccccgagcttccaagccttttgctccagccctgcggcttccccagaagcctgggcttagggtggagatgccgcctacacacgatcctggccctccacctgcctccaggccacgaaatgggaattccagcactaagccaggcaccgggcagaagctgggccttccgcctcccttggatggggtcaagaggccaggcctggcacattttggagtgtcctggctaccagctctcacctacacccacgcacccccccacacactatgctctctcaagaatgtaatttattggggcccccccagctgctttcctcacctgcccctgccctaccttacacccccagcttgacttctttccagtccacgtgtgtatataatgatatctatatttttgcccaggtctgggtattgctcctgcccagaccctgacatccctttccactgtgtgtgtgaccatgctgggggagggggactctgcttggaattaaaaggttgcattgggtccctaca

SEQ ID NO: 18341 - protein, 322 aa, Homo sapiens; identical to SEQ ID NO: 18329

SEQ ID NO: 18342 - DNA, 471 bp, Homo sapiens
tgatggcccccacctgctccgggacggcccccttacccctgctgcttcagggtttttccccggcgggttgggaggggcaggaggtggggtggaaatagggtgggctcctttcctcaggtagagtggggggccaaaacctctgcagtccccggcagtgagctatggactttcttccccctcacaaggctgggggcctcctgctctcgtccctggccctccctgcacagggcaaagccagtctgggctctggcacacagagttcatgtttgcgccctctccctgcccctgccctaccttacacccccagcttgacttctttccagtccacgtgtgtatataatgatatctatatttttgcccaggtctgggtattgctcctgcccagaccctgacatccctttccactgtgtgtgtgaccatgctgggggagggggactctgcttggaattaaaaggttgcattgggtcccta

SEQ ID NO: 18343 - protein, 76 aa, Homo sapiens
MDFLPPHKAGGLLLSSLALPAQGKASLGSGTQSSCLRPLPAPALPYTPSLTSFQSTCVYNDIYIFAQVWVLLLPRP

SEQ ID NO: 18344 - DNA, 2864 bp, Homo sapiens
ctgcctcctccgcctagagcgctgccgccgccgctttcgcccgggagccgggggccgggcgccatcatgctgagccggctcggggcgctgctgcaggaagccgtgggggcgcgcgagcccagcattgacctgctgcaggccttcgtggagcactggaagggcatcacgcactactacatcgagagcacagatgaaagcacccccgccaagaagacagacattccctggcggctgaagcagatgctggatatcctggtgtatgaagagcagcagcaggcggccgcgggtgaggcagggccctgcctggagtacctgctgcagcacaagatcctggagactctctgcacgctgggcaaggccgagtaccccccaggcatgcggcagcaggtgttccagttcttcagcaaggttctggcgcaggtgcagcaccccctgctgcattacctcagcgtccacaggcctgtgcagaaactcctccgacttggtgggactgcttccggatccgttacagaaaaggaggaggtgcagttcaccaccgtcctctgctccaagatccagcaggacccagagctgctcgcctacatcctggaaggtaaaaagattgtaggtaggaagaaagcatgcggagaacccactgccctgcctaaggacacaaccagccacggggacaaggactgctcccacgatggtgctcctgccaggccccagctggacggggagtcctgtggggcccaggccttgaacagccacatgcctgctgagaccgaggagctggacggtgggaccacagagagcaacctgattacctccctgcttgggctgtgccagagcaagaagagtcgggtggccttgaaggcccaggagaacctgctgctcctggtgagcatggcctccccagcagctgccacctacctggtacagagcagcgcctgctgccctgcgatcgtccggcactttgccagttgtaccggtccatgcctgtcttcctggaccccgcagacattgccaccttagagggcatcagctggaggttacccagtgccccgtctgatgaggcttccttccctggcaaggaggccttggctgccttcttgggctggtttgattactgcgaccacctcatcacagaggcacacacggtggttgcggacgccttggcgaaggctgtggctgagaacttcttcgtggagaccctgcagccccagctcctgcacgtgtccgagcagagcatcttgacctccaccgccctcctcacagccatgctgcgccagcttcgctcccctgcgctgctgcgggaggccgtggctttcctcctgggcacagaccggcagcctgaagcccccggggacaacccccacaccctgtatgctcatctcatcgggcattgtgaccacctctctgatgagatcagcatcaccacactccggctgtttgaggagctgctgcagaagccccacgaggggatcatccacagcctggtcctgcgcaaccttgagggccgcccttacgtggcctggggctcaccagagcctgagagctatgaggacaccctagacctggaggaagacccctacttcaccgacagcttcctggattccggctttcaaactcccgcaaagcctcgcctagctcctgctaccagttacgatggcaaaacagcagtgaccgagatcgtcaacagtttcctgtgcctggtccccgaggaagccaagacctctgccttcctggaggagacaggctatgacacatacgtccacgatgcttatggcctgttccaggagtgcagctcccgcgtcgcctcctggggctggcctctgacccccacacctttggacccccatgagcccgagcgacctttcttcgagggccacttcctccgagtgctgtttgaccgcatgtcccggattctggatcagccatacagcctgaacctgcaggtgacctcggtcctgtcccggcttgccctcttcccccacccccatattcatgagtacctgctggatccgtacatcagcctggcccccggctgcaggagcctattctccgtgttggtgagggtgatcggggacttgatgcagagaatccagagggtaccccagttcccaggcaagctgctcctggtgcgcaagcagttgacgggccaggctcctggggagcagctggaccaccagaccctcctccagggcgtggtggtgctggaggagttctgcaaggagctggctgccattgccttcgtcaagtttcccccacatgatcctcgccagaacgtctccccagccccggaagggcaggtctgagccagcaccagggcggtgggagactcctgtccacacctctgccccagagctgcctcctgcctggcactgccgccacactcccctcctgggatggggcttctgctcccgggctcactcaaggagactgcggcatgttgaccacaccagactgggtttcagggaatgggcatgccaggtgccaaggagccaaacagatggctttccaggcagcaaggtccttggggccttcttggaggagcttgggtgacagccagaagccaggcacaggttgccaagaggtgacacgaaacaggaggaaactcagtgacctctgcctctcccacattcctccccgcgggggaggacctcgccgctctgaagagcaccgtgcacatgtgggtgcacaaacgtgggtgttggtgtggacggggcgcagatctccgtggatgaactgcgtctggactcttagattcataaaatattcgagggtttgggagtcacagaccctcccctctcctcagtgcactttggcatttgcacggtgtcttccccggacagcacagcaataaatggtgtgattgcgtggac

SEQ ID NO: 18345 - protein, 440 aa, Homo sapiens
MPVFLDPADIATLEGISWRLPSAPSDEASFPGKEALAAFLGWFDYCDHLITEAHTVVADALAKAVAENFFVETLQPQLLHVSEQSILTSTALLTAMLRQLRSPALLREAVAFLLGTDRQPEAPGDNPHTLYAHLIGHCDHLSDEISITTLRLFEELLQKPHEGIIHSLVLRNLEGRPYVAWGSPEPESYEDTLDLEEDPYFTDSFLDSGFQTPAKPRLAPATSYDGKTAVTEIVNSFLCLVPEEAKTSAFLEETGYDTYVHDAYGLFQECSSRVASWGWPLTPTPLDPHEPERPFFEGHFLRVLFDRMSRILDQPYSLNLQVTSVLSRLALFPHPHIHEYLLDPYISLAPGCRSLFSVLVRVIGDLMQRIQRVPQFPGKLLLVRKQLTGQAPGEQLDHQTLLQGVVVLEEFCKELAAIAFVKFPPHDPRQNVSPAPEGQV

SEQ ID NO: 18346 - DNA, 2702 bp, Homo sapiens
agagcgctgccgccgccgctttcgcccgggagccgggggccgggcgccatcatgctgagccggctcggggcgctgctgcaggaagccgtgggggcgcgcgagcccagcattgacctgctgcaggccttcgtggagcactggaagggcatcacgcactactacatcgagagcacaggtgcggcctggccctccccagcccagggaccctggagggagcggggaggaaggagtgtgcagagtgtcaccattcaggtgtcctgggaaaggtaacctgcccagtcgttcagaattggagccgagttcacggagacagagaaccagacagacagaagacccagagccctgggccactccactcctgatgatttagctgccggtcccactctgaccttttggaaagaggctgtgtgaggaaggagtagcctggttgggggtctcactggcctgactctgcaaggaagaggtggctgcacttcccccagcttccagctccagaccttcaggccccaggtgcttgtgcctaggatttaatgatcaaaagaaaagaatttaataaattcccctttcccctgagccagcttaggggcaatgtccttgtagagatctggggtaggaggagaacgaaaaccaaggtgggtaacatgcctgggtccctctctccaagctgacaccccaaagagccaaagccttggcacctggtcccatcaggaccgctcactgaggggatggcatctgagtggctgctctgcagtcatgaggctgccatgggtggatacggactggttgccaggtaaccatatcctgcatccctcacttttcccttcctggagttcatactggggcttgatcccagcccacacctttcctacaggctttctttccagcccgggccagcccaggaaattcagaaatctgtgggaccctctgagggttctgctagaccaggtttctcaatcttggcacagttggcattggacctggagccttccctgcgcggggctgtcctgggcggtgtgggatgtgcagcagtaattctggcctctacccactaggtgccagtagcacaccccacccccgaattgggacaaccaggaaggtctccagacattgcctcatgttccctgggggggaaaagcgcacccctggttctgaacctatctcttcaggttaaagatctcttgaaggagagcctcagtccaccagctcagtaagatcagatcagaactggctgaaattcacctggggcttcccccatccagccctttcatttccagaatggtccctagaccagaagggttggaagtgcgtggggcaggccgccctactcaagctcctgttccttaaaggaaagctagggggtgctccaagtctagccctgaagcaccagaactttctttaaaacacacactgagactctgactgcaaaagcccccactaagtagcttccccgtcagggcgttggtacagggagcaggactgggtcagacctgaaggtggtggcacagatgtttttttctgctttgtgaaaaacagaggcttgccttctctgagtgtcagtgggggaggccccaggaggttctctctcaggcagctgctggaattacagcttctaagttatgtgacaagagccctgagcccacagtgtccactcaggcccagagctgacagcagccttctgtgggcccaggaccatgtgtccctgtctctgtacccatcctagggtttgaaggaaaccgatgctgctgccccctgataaagggctgggcatgcatgcgttctcagaggactgtgtcctgagcctggaaggacttttgtcttcttaaatattgaagcattcactgtaaacttccatttcccagttgccagcagctgtcttcccccacctctcccagacaggacctcccctttctgggctttggcaggagagggtgaagttttcaagccggggtgcccctctttaccctactcacccttgtttcccaaacatcattagatgaaagcacccccgccaagaagacagacattccctggcggctgaagcagatgctggatatcctggtgtatgaagagcagcagcaggcggccgcgggtgaggcagggccctgcctggagtacctgctgcagcacaagatcctggagactctctgcacgctgggcaaggccgaggtgggaggccctctgcgcgctgggccaggccgaggtgggaggcctctgcgcgcttggccaggccgaggtgggaggcctctgtgcgctgggccaggccgaggtgggagaccctctgagtgctgggccaggctgaggtgggcggtgggcagtgggcagcctggggctccctggattccaggcctttctgcctatgctcttcccagtcctgacactgaaagtggcagttcgggcgagaggagcaaacaggacgggcactgtggctgtctcacttagaacactccaccatcccagcgctcctgttcccagttcactccacaaagatgggcctgccatgtgccaggctctgctctagatgctggggacacagcagggattcatactgacaagagccaggcatggtgatgcgtgcctgtagccccagctacgtgggaggccgaggtgggtggattgcttgagcccaggagatggaggctgcagtgaactgttatcgtgagaccgcactcctgcctaggaggcagagcaagacactgtctctt

SEQ ID NO: 18347 - protein, 72 aa, Homo sapiens
MLSRLGALLQEAVGAREPSIDLLQAFVEHWKGITHYYIESTGAAWPSPAQGPWRERGGRSVQSVTIQVSWER

SEQ ID NO: 18348 - DNA, 3732 bp, Homo sapiens
agagcgctgccgccgccgctttcgcccgggagccgggggccgggcgccatcatgctgagccggctcggggcgctgctgcaggaagccgtgggggcgcgcgagcccagcattgacctgctgcaggccttcgtggagcactggaagggcatcacgcactactacatcgagagcacagatgaaagcacccccgccaagaagacagacattccctggcggctgaagcagatgctggatatcctggtgtatgaagagcagcagcaggcggccgcgggtgaggcagggccctgcctggagtacctgctgcagcacaagatcctggagactctctgcacgctgggcaaggccgagtaccccccaggcatgcggcagcaggtgttccagttcttcagcaaggttctggcgcaggtgcagcaccccctgctgcattacctcagcgtccacaggcctgtgcagaaactcctccgacttggtgggactgcttccggatccgttacagaaaaggaggaggtgcagttcaccaccgtcctctgctccaagatccagcaggacccagagctgctcgcctacatcctggaaggtaaaaagattgtaggtaggaagaaagcatgcggagaacccactgccctgcctaaggacacaaccagccacggggacaaggactgctcccacgatggtgctcctgccaggccccagctggacggggagtcctgtggggcccaggccttgaacagccacatgcctgctgagaccgaggagctggacggtgggaccacagagagcaacctgattacctccctgcttgggctgtgccagagcaagaagagtcgggtggccttgaaggcccaggagaacctgctgctcctggtgagcatggcctccccagcagctgccacctacctggtacagagcagcgcctgctgccctgcgatcgtccggcactttgccagttgtaccggtccatgcctgtcttcctggaccccgcagacattgccaccttagagggcatcagctggaggttacccagtgccccgtctgatgaggcttccttccctggcaaggaggccttggctgccttcttgggctggtttgattactgcgaccacctcatcacagaggcacacacggtggttgcggacgccttggcgaaggctgtggctgagaacttcttcgtggagaccctgcagccccagctcctgcacgtgtccgagcagagcatcttgacctccaccgccctcctcacagccatgctgcgccagcttcgctcccctgcgctgctgcgggaggccgtggctttcctcctgggcacagaccggcagcctgaagcccccggggacaacccccacaccctgtatgctcatctcatcgggcattgtgaccacctctctgatgagatcagcatcaccacactccggctgtttgaggagctgctgcagaagccccacgaggggatcatccacagcctggtcctgcgcaaccttgagggccgcccttacgtggcctggggctcaccagagcctgagagctatgaggacaccctagacctggaggaagacccctacttcaccgacagcttcctggattccggctttcaaactcccgcaaagcctcgcctagctcctgctaccagttacgatggcaaaacagcagtgaccgagatcgtcaacagtttcctgtgcctggtccccgaggaagccaagacctctgccttcctggaggagacaggctatgacacatacgtccacgatgcttatggcctgttccaggagtgcagctcccgcgtcgcctcctggggctggcctctgacccccacacctttggacccccatgagcccgagcgacctttcttcgagggccacttcctccgagtgctgtttgaccgcatgtcccggattctggatcagccatacagcctgaacctgcaggtgacctcggtcctgtcccggcttgccctcttcccccacccccatattcatgagtacctgctggatccgtacatcagcctggcccccggctgcaggagcctattctccgtgttggtgagggtgatcggggacttgatgcagagaatccagagggtaccccagttcccaggcaagctgctcctggtgcgcaagcagttgacgggccaggctcctggggagcagctggaccaccagaccctcctccagggcgtggtggtgctggaggagttctgcaaggagctggctgccattgccttcgtcaagtttcccccacatgatcctcgccagaacgtctccccagccccggaagggcaggtctgagccagcaccagggcggtgggagactcctgtccacacctctgccccagagctgcctcctgcctggcactgccgccacactcccctcctgggatggggcttctgctcccgggctcactcaaggagactgcggcatgttgaccacaccagactgggtttcagggaatgggcatgccaggtgccaaggagccaaacagatggctttccaggcagcaaggtccttggggccttcttggaggagcttgggtgacagccaggtgagcacccagaccccagaccctcatgtgctgtgtgcctggccccttctgtactggccatttgtggccagggccaagcctgtgactcaactccaggggcaagatggggagtgagctgatggctccgagactggtcaggagcccaggccagtgagatggggcctggagccttgtctgtgtcacattaggtaccatgggagctgctgagacctgacattttgtcccctgcctacatggcttggcccatggagaaggagcagtgaatgggatcgtcggggaagcccctcttcctgctctgctcccctggaaactgttgcaaaactcccagccgcctcatggcaaatgcccaaagcatgttccgcacccaggcgggggcccctgctaatgagaaccttggtgcagctgcagccaggaggggagcgggcccaggagccaggctcaggtccagctggttcctctctggcgccttctgaacccgtctcagcaggtccacagcacctgggcagaggtcagagaccaggggaggccgggccttgccctcccttctgcccagggcccagtgttcttgatagaagacccttctggggagccagggagctcaggggacagataagggaaggacgccccctgactccaggcccctgagcctggcgggaagtggctgcggcccaggcagccagtcctggtggtgttctccctgcatgccctccgtggctgggctgccaccccacccggcccgaatctgtcttgacctgcaggaatacacgggcggcgccaggcattacctcacagcgggactacacagttgctggctttgctcctgggcaaggaggagcaggccagagcctcttttgcttccttttcttgcccatgccgcttctagaagccaggcacaggttgccaagaggtgacacgaaacaggaggaaactcagtgacctctgcctctcccacattcctccccgcgggggaggacctcgccgctctgaagagcaccgtgcacatgtgggtgcacaaacgtgggtgttggtgtggacggggcgcagatctccgtggatgaactgcgtctggactcttagattcataaaatattcgagggtttgggagtcacagaccctcccctctcctcagtgcactttggcatttgcacggtgtcttccccggacagcacagcaataaatggtgtgattgcgtggac

SEQ ID NO: 18349 - protein, 440 aa, Homo sapiens; identical to SEQ ID NO: 18345

SEQ ID NO: 18350 - DNA, 307 bp, Homo sapiens
ccaggaccttgttggggtgcaggacgcccttcccgtcaccccgggacgtgggaagtgcaggccctgccggtccaagtccccacgaaggcgcgagcccagcattgacctgctgcaggccttcgtggagcactggaagggcatcacgcactactacatcgagagcacaggtgcggcctggccctccccagcccagggaccctggagggagcggggaggaaggagtgtgcagagtgtcaccattcaggtgtcctgggaaagatgaaagcacccccgccaagaagacagacattccctggcggctgaagca

SEQ ID NO: 18351 - protein, 100 aa, Homo sapiens
RTLLGCRTPFPSPRDVGSAGPAGPSPHEGASPALTCCRPSWSTGRASRTTTSRAQVRPGPPQPRDPGGSGEEGVCRVSPFRCPGKDESTPAKKTDIPWRL

SEQ ID NO: 18352 - DNA, 442 bp, Homo sapiens
ctatgaggacaccctagacctggaggaagacccctacttcaccgacagcttcctggattccggctttcaaactcccgcaaagcctcgcctagctcctgctaccagttacgatggcaaaacagcagtgaccgagatcgtcaacaggtggggagcaagttaggcagtctgaaccacttgagttttattttattttattttattttttgagatagagtctcgctccgtcacccaggatggagtgcagtggtacaatctcggctcactgcaacctccacctcccgggttccggatccaagcgattcctgtgcctcagcctcccgagtacctgggattacagacatgcaccaccacacccagctaatttttatagttttagtagagactgggtttccccatgttggccaggcaggtctcgaactcctgacctcaggtgatccgccca

SEQ ID NO: 18353 - protein, 66 aa, Homo sapiens
MECSGTISAHCNLHLPGSGSKRFLCLSLPSTWDYRHAPPHPANFYSFSRDWVSPCWPGRSRTPDLR

SEQ ID NO: 18354 - DNA, 1707 bp, Homo sapiens
tctccgtgttggtgagggtgatcggggacttgatgcagagaatccagagggtaccccagttcccaggcaagctgctcctggtgcgcaagcagttgacgggccaggctcctggggagcagctggaccaccagaccctcctccagggcgtggtggtgctggaggagttctgcaaggagctggctgccattgccttcgtcaagtttcccccacatgatcctcgccagaacgtctccccagccccggaagggcaggtctgagccagcaccagggcggtgggagactcctgtccacacctctgccccagagctgcctcctgcctggcactgccgccacactcccctcctgggatggggcttctgctcccgggctcactcaaggagactgcggcatgttgaccacaccagactgggtttcagggaatgggcatgccaggtgccaaggagccaaacagatggctttccaggcagcaaggtccttggggccttcttggaggagcttgggtgacagccaggtgagcacccagaccccagaccctcatgtgctgtgtgcctggccccttctgtactggccatttgtggccagggccaagcctgtgactcaactccaggggcaagatggggagtgagctgatggctccgagactggtcaggagcccaggccagtgagatggggcctggagccttgtctgtgtcacattaggtaccatgggagctgctgagacctgacattttgtcccctgcctacatggcttggcccatggagaaggagcagtgaatgggatcgtcggggaagcccctcttcctgctctgctcccctggaaactgttgcaaaactcccagccgcctcatggcaaatgcccaaagcatgttccgcacccaggcgggggcccctgctaatgagaaccttggtgcagctgcagccaggaggggagcgggcccaggagccaggctcaggtccagctggttcctctctggcgccttctgaacccgtctcagcaggtccacagcacctgggcagaggtcagagaccaggggaggccgggccttgccctcccttctgcccagggcccagtgttcttgatagaagacccttctggggagccagggagctcaggggacagataagggaaggacgccccctgactccaggcccctgagcctggcgggaagtggctgcggcccaggcagccagtcctggtggtgttctccctgcatgccctccgtggctgggctgccaccccacccggcccgaatctgtcttgacctgcaggaatacacgggcggcgccaggcattacctcacagcgggactacacagttgctggctttgctcctgggcaaggaggagcaggccagagcctcttttgcttccttttcttgcccatgccgcttctagaagccaggcacaggttgccaagaggtgacacgaaacaggaggaaactcagtgacctctgcctctcccacattcctccccgcgggggaggacctcgccgctctgaagagcaccgtgcacatgtgggtgcacaaacgtgggtgttggtgtggacggggcgcagatctccgtggatgaactgcgtctggactcttagattcataaaatattcgagggtttgggagtcacagaccctcccctctcctcagtgcactttggcatttgcacggtgtcttccccggacagcacagcaataaatggtgtgattgcgtggac

SEQ ID NO: 18355 - protein, 74 aa, Homo sapiens
MQRIQRVPQFPGKLLLVRKQLTGQAPGEQLDHQTLLQGVVVLEEFCKELAAIAFVKFPPHDPRQNVSPAPEGQV

SEQ ID NO: 18356 - DNA, 2116 bp, Homo sapiens
ccgcagggactgggagcgggctccgcagcgcactctagcccgcggctcggctcagtcggtctgcgaggatccggcccgccgccccccgggggacccgatggcctcggagggcctggcgggggcgctggcttccgtgctggctggccaggggtccagcgtgcacagctgcgactcggcgccggccggggagccgccggcgccccgtgcgggctgcggaagaacgtgtgctacgtggtgctggccgtgttcctcagcgagcaggatgaggtgctactgatccaggaggccaagagggagtgccgggggtcgtggtacctgcctgcggggagaatggagccaggggagaccatcgtggaggcgctgcagcgggaggtgaaggaggaggcggggctgcactgtgagcccgagacactgctgctgcctggtacccacggacctccctgcccactccgctgcgagcccatgacatcctgcacctggttgaactagccgcccagtatcgccagcaagccaggcaccctctcattctgccccaagagctaccctgtgatctggtctgccagcggctcgtggctacctttaccagcgcccagacagtgtgggtgttagtgggcacagtggggatgcctcacttgcctgtcactgcctgtggcctcgaccctatggagcagaggggtggcatgaagatggccgtcctgcggctgctgcaggagtgtctgaccctgcaccacttggtggtggagatcaaggggttgcttggactgcagcacctgggccgagatcacagtgatggcatctgtttgaatgtgctggtgaccgtggcttttcggagcccagggatccaggatgaacccccaaaagttcggggtgagaacttctcttggtggaaggtgatggaggaagacctgcaaagccagctcctccagcggcttcagggatcctctgttgtcccagtgaacagatagagaggtgggggaggtgacagggagctaggcagccgtgctccctccagtgcggacttgtctccctctgagggaggcaagaggctggcgatcagggatcttgttgcattgggagcaggggcggctctcctggtccccaggagagatgctttgaggagcattcctctagattgcacaagggacagtgcctttaaccaagcgaggagtccaaagctcaggacctgactaccctgagggcacgctgacgcctcttcccagggggatggggagctttctgcacccccagtggcatctcctcatcacgttctgtgccgtccttgggaaaggcctgcattctgatccttccaggcccttcgagcatggaggggcactggggaaggtcccccgagggaggagcacgttgctgagtaaagaggtgttactcaccttgcctccctgcctacacgtctctgtggggagaaagtgatggggactactgtccaggagctgctgctcccctcgtgttacccacaggcacccatgcctttcccagtgcactgacagtgcgggccagtctgctgtccagcacggcccctggggctccctccagttggcctgctggcccgggatgtgactctgaggggacccatccctaatgaaacacagctctgagccctccaagggttgggcagtgggcggccccagaggaacttcaagtgggacaggagctgcaggtgctgcctctgctctctccttgagcctccctggcgcagaccactccccctggctctcctgcctctgccttttcacaacttcagcccatgccagaccaaaccttttcttcatttcccctcagcctcgctgaatcatggtaggatttttttttttttttttttttttttttgctaagtggccgggcacagtggctcacacctgtaatcccaacactttggtaggctgacacaggtggatcacttgaggtcagggagttcgagaccagcctggccaacatggcaaaaccccatctctactaaaaatacaaaaaactagccgggcatgttggcagatgcctgtaatctcagatacttaggaggctgaggcaggagaatcgcttgaaccccggaggcaaaggttgcagtgagccgagctccagcctgggtgatagacttcgtctg

SEQ ID NO: 18357 - protein, 59 aa, Homo sapiens
MASEGLAGALASVLAGQGSSVHSCDSAPAGEPPAPRAGCGRTCATWCWPCSSASRMRCY

SEQ ID NO: 18358 - DNA, 2470 bp, Homo sapiens
ccggcccgctgccgcagggactgggagcgggctccgcagcgcactctagcccgcggctcggctcagtcggtctgcgaggatccggcccgccgccccccgggggacccgatggcctcggagggcctggcgggggcgctggcttccgtgctggctggccaggggtccagcgtgcacagctgcgactcggcgccggccggggagccgccggcgccccgtgcgggctgcggaagaacgtgtgctacgtggtgctggccgtgttcctcagcgagcaggatgaggtgctactgatccaggaggccaagagggagtgccgggggtcgtggtacctgcctgcggggagaatggagccaggggagaccatcgtggaggcgctgcagcgggaggtgaaggaggaggcggggctgcactgtgagcccgagacactgctgtccgtggaggagcggggcccctcctgggtccgcttcgtgttcctcgctcgccccacaggtatggcccacctggaggcagtgtgaacagggccagttgacacctttcccccagctcctcggtgaggtgagcccctctacagccagtcctgttatggctggcacagcctggcatgggcagattccagcctttgggctgggggcctctctcctgggtcagggatgtctgttgactctgccagagctgcacttctctccacacagaccctccctgccccatcccccacatctcccccaggtggaattctcaagacttccaaggaggccgatgcggagtccctgcaggctgcctggtacccacggacctccctgcccactccgctgcgagcccatgacatcctgcacctggttgaactagccgcccagtatcgccagcaagccaggcaccctctcattctgccccaagagctaccctgtgatctggtctgccagcggctcgtggctacctttaccagcgcccagacagtgtgggtgttagtgggcacagtggggatgcctcacttgcctgtcactgcctgtggcctcgaccctatggagcagaggggtggcatgaagatggccgtcctgcggctgctgcaggagtgtctgaccctgcaccacttggtggtggagatcaaggggttgcttggactgcagcacctgggccgagatcacagtgatggcatctgtttgaatgtgctggtgaccgtggcttttcggagcccagggatccaggatgaacccccaaaagttcggggtgagaacttctcttggtggaaggtgatggaggaagacctgcaaagccagctcctccagcggcttcagggatcctctgttgtcccagtgaacagatagagaggtgggggaggtgacagggagctaggcagccgtgctccctccagtgcggacttgtctccctctgagggaggcaagaggctggcgatcagggatcttgttgcattgggagcaggggcggctctcctggtccccaggagagatgctttgaggagcattcctctagattgcacaagggacagtgcctttaaccaagcgaggagtccaaagctcaggacctgactaccctgagggcacgctgacgcctcttcccagggggatggggagctttctgcacccccagtggcatctcctcatcacgttctgtgccgtccttgggaaaggcctgcattctgatccttccaggcccttcgagcatggaggggcactggggaaggtcccccgagggaggagcacgttgctgagtaaagaggtgttactcaccttgcctccctgcctacacgtctctgtggggagaaagtgatggggactactgtccaggagctgctgctcccctcgtgttacccacaggcacccatgcctttcccagtgcactgacagtgcgggccagtctgctgtccagcacggcccctggggctccctccagttggcctgctggcccgggatgtgactctgaggggacccatccctaatgaaacacagctctgagccctccaagggttgggcagtgggcggccccagaggaacttcaagtgggacaggagctgcaggtgctgcctctgctctctccttgagcctccctggcgcagaccactccccctggctctcctgcctctgccttttcacaacttcagcccatgccagaccaaaccttttcttcatttcccctcagcctcgctgaatcatggtaggatttttttttttttttttttttttttttgctaagtggccgggcacagtggctcacacctgtaatcccaacactttggtaggctgacacaggtggatcacttgaggtcagggagttcgagaccagcctggccaacatggcaaaaccccatctctactaaaaatacaaaaaactagccgggcatgttggcagatgcctgtaatctcagatacttaggaggctgaggcaggagaatcgcttgaaccccggaggcaaaggttgcagtgagccgagctccagcctgggtgatagacttcgtctg

SEQ ID NO: 18359 - protein, 59 aa, Homo sapiens; identical to SEQ ID NO: 18357

SEQ ID NO: 18360 - DNA, 2975 bp, Homo sapiens
agtgctgaggtggggtgaaggaggaaaggccgagctgggagaggagcaggcgctcgccacaaccacccccaccctgctctccacgcgccaggtcctgcacgctgggtgggagggtgacgacaaggatggaggagcagggccccacccccgccctcccagggcgcaccatctgcagcagagagggccttgagctgcgtgggaaatgcgaatctccttcaaggcaggggtttatgtcccccaccccacgggccatgtgacatttataactctttggtggaatgagaagaaaggtatttgggatatgatcaactccggcaatgccattgtgtgtttacggcaacagcgggacagtggttccagggggcggccccgggcctccgtgacgtcaccggattgtcgcgtcaccgtcgcctaccccggcggcgcaacgcgccctgcaggaaagatgacgtcaccgtcggagctcctgcagaccagtgcgcgctcggggagttggcgagcgggtggcggctgggagacgtcccgagcgcacgggactgacaggcggcagaagccgggcggggtccgctgggctccggacccgtgcccccccagttccagggcggccccgggcggccccgccccctcggtgaatgccgcgggccggccaatccgggcaggccgcggcgccgcgcagcctatcagcggccagagctcgcgtgcgcttccgcgttcgcgtgcgcttccgcgttctcgtgagctcccggcccgctgccgcagggactgggagcgggctccgcagcgcactctagcccgcggctcggctcagtcggtctgcgaggatccggcccgccgccccccgggggacccgatggcctcggagggcctggcgggggcgctggcttccgtgctggctggccaggggtccagcgtgcacagctgcgactcggcgccggccggggagccgccggcgccccgtgcgggctgcggaagaacgtgtgctacgtggtgctggccgtgttcctcagcgagcaggatgaggtgctactgatccaggaggccaagagggagtgccgggggtcgtggtacctgcctgcggggagaatggagccaggggagaccatcgtggaggcgctgcagcgggaggtgaaggaggaggcggggctgcactgtgagcccgagacactgctgtccgtggaggagcggggcccctcctgggtccgcttcgtgttcctcgctcgccccacaggtggaattctcaagacttccaaggaggccgatgcggagtccctgcaggctgcctggtacccacggacctccctgcccactccgctgcgagcccatgacatcctgcacctggttgaactagccgcccagtatcgccagcaagccaggcaccctctcattctgccccaagagctaccctgtgatctggtctgccagcggctcgtggctacctttaccagcgcccagacagtgtgggtgttagtgggcacagtggggatgcctcacttgcctgtcactgcctgtggcctcgaccctatggagcagaggggtggcatgaagatggccgtcctgcggctgctgcaggagtgtctgaccctgcaccacttggtggtggagatcaaggggttgcttggactgcagcacctgggccgagatcacagtgatggcatctgtttgaatgtgctggtgaccgtggcttttcggagcccagggatccaggatgaacccccaaaagttcggggtgagaacttctcttggtggaaggtgatggaggaagacctgcaaagccagctcctccagcggcttcagggatcctctgttgtcccagtgaacagatagagaggtgggggaggtgacagggagctaggcagccgtgctccctccagtgcggacttgtctccctctgagggaggcaagaggctggcgatcagggatcttgttgcattgggagcaggggcggctctcctggtccccaggagagatgctttgaggagcattcctctagattgcacaagggacagtgcctttaaccaagcgaggagtccaaagctcaggacctgactaccctgagggcacgctgacgcctcttcccagggggatggggagctttctgcacccccagtggcatctcctcatcacgttctgtgccgtccttgggaaaggcctgcattctgatccttccaggcccttcgagcatggaggggcactggggaaggtcccccgagggaggagcacgttgctgagtaaagaggtgttactcaccttgcctccctgcctacacgtctctgtggggagaaagtgatggggactactgtccaggagctgctgctcccctcgtgttacccacaggcacccatgcctttcccagtgcactgacagtgcgggccagtctgctgtccagcacggcccctggggctccctccagttggcctgctggcccgggatgtgactctgaggggacccatccctaatgaaacacagctctgagccctccaagggttgggcagtgggcggccccagaggaacttcaagtgggacaggagctgcaggtgctgcctctgctctctccttgagcctccctggcgcagaccactccccctggctctcctgcctctgccttttcacaacttcagcccatgccagaccaaaccttttcttcatttcccctcagcctcgctgaatcatggtaggatttttttttttttttttttttttttttgctaagtggccgggcacagtggctcacacctgtaatcccaacactttggtaggctgacacaggtggatcacttgaggtcagggagttcgagaccagcctggccaacatggcaaaaccccatctctactaaaaatacaaaaaactagccgggcatgttggcagatgcctgtaatctcagatacttaggaggctgaggcaggagaatcgcttgaaccccggaggcaaaggttgcagtgagccgagctccagcctgggtgatagacttcgtctg

SEQ ID NO: 18361 - protein, 275 aa, Homo sapiens
MRISFKAGVYVPHPTGHVTFITLWWNEKKGIWDMINSGNAIVCLRQQRDSGSRGRPRASVTSPDCRVTVAYPGGATRPAGKMTSPSELLQTSARSGSWRAGGGWETSRAHGTDRRQKPGGVRWAPDPCPPSSRAAPGGPAPSVNAAGRPIRAGRGAAQPISGQSSRALPRSRALPRSRELPARCRRDWERAPQRTLARGSAQSVCEDPARRPPGDPMASEGLAGALASVLAGQGSSVHSCDSAPAGEPPAPRAGCGRTCATWCWPCSSASRMRCY

SEQ ID NO: 18362 - DNA, 1393 bp, Homo sapiens
ccgcagggactgggagcgggctccgcagcgcactctagcccgcggctcggctcagtcggtctgcgaggatccggcccgccgccccccgggggacccgatggcctcggagggcctggcgggggcgctggcttccgtgctggctggccaggggtccagcgtgcacagctgcgactcggcgccggccggggagccgccggcgccccgtgcgggctgcggaagaacgtgtgctacgtggtgctggccgtgttcctcagcgagcaggatgaggtgctactgatccaggaggccaagagggagtgccgggggtcgtggtacctgcctgcggggagaatggagccaggggagaccatcgtggaggcgctgcagcgggaggtgaaggaggaggcggggctgcactgtgagcccgagacactgctgctgcctggtacccacggacctccctgcccactccgctgcgagcccatgacatcctgcacctggttgaactagccgcccagtatcgccagcaagccaggcaccctctcattctgccccaagagctaccctgtgatctggtctgccagcggctcgtggctacctttaccagcgcccagacagtgtgggtgttagtgggcacagtggggatgcctcacttgcctgtcactgcctgtggcctcgaccctatggagcagaggggtggcatgaagatggccgtcctgcggctgctgcaggagtgtctgaccctgcaccacttggtggtggagatcaaggggttgcttggactgcagcacctgggccgagatcacagtgatggcatctgtttgaatgtgctggtgaccgtggcttttcggagcccagggatccaggatgaacccccaaaagttcggggtgagaacttctcttggtggaaggtgatggaggaagacctgcaaagccagctcctccagcggcttcagggatcctctgttgtcccagtgaacagatagagaggtgggggaggtgacagggagctaggcagccgtgctccctccagtgcggacttgtctccctctgagggaggcaagaggctggcgatcagggatcttgttgcattgggagcaggggcggctctcctggtccccaggagagatgctttgaggagcattcctctagattgcacaagggacagtgcctttaaccaagcgaggagtccaaagctcaggacctgactaccctgagggcacgctgacgcctcttcccagggggatggggagctttctgcacccccagtggcatctcctcatcacgttctgtgccgtccttgggaaaggcctgcattctgatccttccaggcccttcgagcatggaggggcactggggaaggtcccccgagggaggagcacgttgctgagtaaagaggtgttactcaccttgc

SEQ ID NO: 18363 - protein, 59 aa, Homo sapiens; identical to SEQ ID NO: 18357

SEQ ID NO: 18364 - DNA, 1747 bp, Homo sapiens
ccggcccgctgccgcagggactgggagcgggctccgcagcgcactctagcccgcggctcggctcagtcggtctgcgaggatccggcccgccgccccccgggggacccgatggcctcggagggcctggcgggggcgctggcttccgtgctggctggccaggggtccagcgtgcacagctgcgactcggcgccggccggggagccgccggcgccccgtgcgggctgcggaagaacgtgtgctacgtggtgctggccgtgttcctcagcgagcaggatgaggtgctactgatccaggaggccaagagggagtgccgggggtcgtggtacctgcctgcggggagaatggagccaggggagaccatcgtggaggcgctgcagcgggaggtgaaggaggaggcggggctgcactgtgagcccgagacactgctgtccgtggaggagcggggcccctcctgggtccgcttcgtgttcctcgctcgccccacaggtatggcccacctggaggcagtgtgaacagggccagttgacacctttcccccagctcctcggtgaggtgagcccctctacagccagtcctgttatggctggcacagcctggcatgggcagattccagcctttgggctgggggcctctctcctgggtcagggatgtctgttgactctgccagagctgcacttctctccacacagaccctccctgccccatcccccacatctcccccaggtggaattctcaagacttccaaggaggccgatgcggagtccctgcaggctgcctggtacccacggacctccctgcccactccgctgcgagcccatgacatcctgcacctggttgaactagccgcccagtatcgccagcaagccaggcaccctctcattctgccccaagagctaccctgtgatctggtctgccagcggctcgtggctacctttaccagcgcccagacagtgtgggtgttagtgggcacagtggggatgcctcacttgcctgtcactgcctgtggcctcgaccctatggagcagaggggtggcatgaagatggccgtcctgcggctgctgcaggagtgtctgaccctgcaccacttggtggtggagatcaaggggttgcttggactgcagcacctgggccgagatcacagtgatggcatctgtttgaatgtgctggtgaccgtggcttttcggagcccagggatccaggatgaacccccaaaagttcggggtgagaacttctcttggtggaaggtgatggaggaagacctgcaaagccagctcctccagcggcttcagggatcctctgttgtcccagtgaacagatagagaggtgggggaggtgacagggagctaggcagccgtgctccctccagtgcggacttgtctccctctgagggaggcaagaggctggcgatcagggatcttgttgcattgggagcaggggcggctctcctggtccccaggagagatgctttgaggagcattcctctagattgcacaagggacagtgcctttaaccaagcgaggagtccaaagctcaggacctgactaccctgagggcacgctgacgcctcttcccagggggatggggagctttctgcacccccagtggcatctcctcatcacgttctgtgccgtccttgggaaaggcctgcattctgatccttccaggcccttcgagcatggaggggcactggggaaggtcccccgagggaggagcacgttgctgagtaaagaggtgttactcaccttgc

SEQ ID NO: 18365 - protein, 59 aa, Homo sapiens; identical to SEQ ID NO: 18357

SEQ ID NO: 18366 - DNA, 2252 bp, Homo sapiens
agtgctgaggtggggtgaaggaggaaaggccgagctgggagaggagcaggcgctcgccacaaccacccccaccctgctctccacgcgccaggtcctgcacgctgggtgggagggtgacgacaaggatggaggagcagggccccacccccgccctcccagggcgcaccatctgcagcagagagggccttgagctgcgtgggaaatgcgaatctccttcaaggcaggggtttatgtcccccaccccacgggccatgtgacatttataactctttggtggaatgagaagaaaggtatttgggatatgatcaactccggcaatgccattgtgtgtttacggcaacagcgggacagtggttccagggggcggccccgggcctccgtgacgtcaccggattgtcgcgtcaccgtcgcctaccccggcggcgcaacgcgccctgcaggaaagatgacgtcaccgtcggagctcctgcagaccagtgcgcgctcggggagttggcgagcgggtggcggctgggagacgtcccgagcgcacgggactgacaggcggcagaagccgggcggggtccgctgggctccggacccgtgcccccccagttccagggcggccccgggcggccccgccccctcggtgaatgccgcgggccggccaatccgggcaggccgcggcgccgcgcagcctatcagcggccagagctcgcgtgcgcttccgcgttcgcgtgcgcttccgcgttctcgtgagctcccggcccgctgccgcagggactgggagcgggctccgcagcgcactctagcccgcggctcggctcagtcggtctgcgaggatccggcccgccgccccccgggggacccgatggcctcggagggcctggcgggggcgctggcttccgtgctggctggccaggggtccagcgtgcacagctgcgactcggcgccggccggggagccgccggcgccccgtgcgggctgcggaagaacgtgtgctacgtggtgctggccgtgttcctcagcgagcaggatgaggtgctactgatccaggaggccaagagggagtgccgggggtcgtggtacctgcctgcggggagaatggagccaggggagaccatcgtggaggcgctgcagcgggaggtgaaggaggaggcggggctgcactgtgagcccgagacactgctgtccgtggaggagcggggcccctcctgggtccgcttcgtgttcctcgctcgccccacaggtggaattctcaagacttccaaggaggccgatgcggagtccctgcaggctgcctggtacccacggacctccctgcccactccgctgcgagcccatgacatcctgcacctggttgaactagccgcccagtatcgccagcaagccaggcaccctctcattctgccccaagagctaccctgtgatctggtctgccagcggctcgtggctacctttaccagcgcccagacagtgtgggtgttagtgggcacagtggggatgcctcacttgcctgtcactgcctgtggcctcgaccctatggagcagaggggtggcatgaagatggccgtcctgcggctgctgcaggagtgtctgaccctgcaccacttggtggtggagatcaaggggttgcttggactgcagcacctgggccgagatcacagtgatggcatctgtttgaatgtgctggtgaccgtggcttttcggagcccagggatccaggatgaacccccaaaagttcggggtgagaacttctcttggtggaaggtgatggaggaagacctgcaaagccagctcctccagcggcttcagggatcctctgttgtcccagtgaacagatagagaggtgggggaggtgacagggagctaggcagccgtgctccctccagtgcggacttgtctccctctgagggaggcaagaggctggcgatcagggatcttgttgcattgggagcaggggcggctctcctggtccccaggagagatgctttgaggagcattcctctagattgcacaagggacagtgcctttaaccaagcgaggagtccaaagctcaggacctgactaccctgagggcacgctgacgcctcttcccagggggatggggagctttctgcacccccagtggcatctcctcatcacgttctgtgccgtccttgggaaaggcctgcattctgatccttccaggcccttcgagcatggaggggcactggggaaggtcccccgagggaggagcacgttgctgagtaaagaggtgttactcaccttgc

SEQ ID NO: 18367 - protein, 275 aa, Homo sapiens; identical to SEQ ID NO: 18361

SEQ ID NO: 18368 - DNA, 3047 bp, Homo sapiens
gttaggggagactgcctggaggagatgctcccggaggggctagcaaggaagggggctgagggaagtggagggagagatgggtcaggtgaggagccagggaaggggaaggtgatggggtgggctggaggcaagaagcttgaggcgcaggggaggagagagtccaggggtaaggcgagggcagccccgtggttcccaagtccagctgagccctcattatcctggggaaaagacttccacctagtgtcacccctcgccaaggcacacacacacacggagacgtgcagaggccagcatggtgtgcacccctcctgcccacaggtacacacatgtgtagatacacacacagatgctgggacacgcagaggggagcagacaagcacacctccacacacagatggcctcttctgggctgggtgtggctggccgtgggcagtcactacggcccaacccagtgactcacggggcagggctgaggggcacagtctccctgggtggcctgggaaacactgctcagctccaggatggagctgaatctccaagggcaaaggaatcttggcacccagctgggactcccctagggtccaatttgcttcaccagccttcccttcccccacgccccatcttgcagccctaagcccaggggcaatggctgaggtccttgccaaagggggtggattgggctggtggtgggttggagcacgatgctggcgtcccctttgcacatgttccctgggcacctctgtcctctgcgagtccctgcctgcccagagagctccctgctctggttaggcttgtgaggtccccgtagctgtggctgctgcagaggcctcagcctggccggaaagcctgttcacctgctggcactcagagcctcgcagtggtccttcccttttctgcatccggaatcttagggagaccctgatgaacactttgagttgtctccccagggacacacagctctctcctcatccaccacttagcacacaattctggccattccaaagacttcagatgaagaagtcctggtagacagtttatgaactgggattatgcaggacgtctccctcggatttgcagaaaggggtaccattgagagagggaggagaggggccgaggtcacagaggctgttaaaggcctccagccccagaaaagcagggattcagtctgcccaactgtagggccttgaatcccttccttctaagctccttccagccaaatgtgtgttctgccaacctgagctgccccagccccaaacaaactcagccatgccctccctgcctgcccttcaagacttgacccttcggctcttttctccacccctggcctctggaaagtccatgccccatcctcctgcagccctgcccttccctccccatctcgctcattcccccttctcttctttgaggtgtgcccggccggggcaggcgccctggagcctggcgccccaggcagctgctacctggatgcagggctgcggcggcgcctgcgggaggagtggggcgtgagctgctggaccctgctccaggcccccggagaggccgtgctggtgcctgcaggggctccccaccaggtgcagggcctggtgagcacagtcagcgtcactcagcacttcctctcccctgagacctctgccctctctgctcagctctgccaccagggacccagccttccccctgactgccacctgctttatgcccagatggactgggctgtgttccaagcagtgaaggtggccgtggggacattacaggaggccaaatagagggatgctaggtgtctgggatcggggtggggacaggtagaccaggtgctcagcccaggcacaacttcagcaggggatggcgctaggggacttggggatttctggtcaaccccacaagcaccactctgggcacaagcagggcactctgttcccctcccccttaagccaacaaccacagtgccaccaagctcacacctgtccttctcaggctggcatctcccccaccctgtgccccttttcatggtaccaggcccgcactgggggcaattgacttcctccaatccccactcctccgagacccaggagacaaacagcccttccttggggaaacttgggaatcattctggcttaaacaacacctcctcctgctgctcactcccgctgagcccactctactgccccagctccgtttctaccaccgcatcctcactgggctcactgcaggcatgctgaacaaggggcctccaaccttctgccctcctgccaaaagatctggggagtgtgaggagagggtggcatcaggagctgctcaggcttggcggagggagcggcatgggcgatgtcactcagccccttcccggtccgcccgcttccctccttcatgatttccattaaagtctgttgttttgtgactgctgccagtgtggttggccctgcccctgcaggccacatggtccagggagggagggggacatggaaatctgccttagagacaaatggagtagggcagcccggagctggggcccaagggacaggacaccactgcctgctcttcgtctggggcctggggccttgcctcccactgaggagactttgggtggggtggggggctgtcccccaaagatgctcctgagtgcaagagcaggcaaggcagagtcctggggcacagccacgaggtgacctccctgtgcagagactcccgagccctactccacccagcaagctccagtccgccccatctctcccgtctaccctgacctggagatccagaagtatggcccagaagagcccttgccccgcctgtctgcccttggtggcagtggccatggccgacgccaggcccagccaccctgggactgagcctgactgcttcagacagccgacccctccttgtccccgctccacgcccgcagcctcctggtggcgctccgccctctcccgcttcctttgtgtatctcagccctacaaagaaaaacactcccactcttgtcatacctaattgttcctgctgtggtttggggaattttttttattaaataaagttttttattataagggtaatat

SEQ ID NO: 18369 - protein, 168 aa, Homo sapiens
MLPEGLARKGAEGSGGRDGSGEEPGKGKVMGWAGGKKLEAQGRRESRGKARAAPWFPSPAEPSLSWGKDFHLVSPLAKAHTHTETCRGQHGVHPSCPQVHTCVDTHTDAGTRRGEQTSTPPHTDGLFWAGCGWPWAVTTAQPSDSRGRAEGHSLPGWPGKHCSAPGWS

SEQ ID NO: 18370 - DNA, 1432 bp, Homo sapiens
ctcaaatgatccacctaccttggcctcccaaagtgctgggattacaggtgtgagccaccgcatctggccagagtattccttttaagtagggtgggggacagcgggtgggcccaggaatgtagttgaaaatgctttgtcctctctctttttcctagatggactgggctgtgttccaagcagtgaaggtggccgtggggacattacaggaggccaaatagagggatgctaggtgtctgggatcggggtggggacaggtagaccaggtgctcagcccaggcacaacttcagcaggggatggcgctaggggacttggggatttctggtcaaccccacaagcaccactctgggcacaagcagggcactctgttcccctcccccttaagccaacaaccacagtgccaccaagctcacacctgtccttctcaggctggcatctcccccaccctgtgccccttttcatggtaccaggcccgcactgggggcaattgacttcctccaatccccactcctccgagacccaggagacaaacagcccttccttggggaaacttgggaatcattctggcttaaacaacacctcctcctgctgctcactcccgctgagcccactctactgccccagctccgtttctaccaccgcatcctcactgggctcactgcaggcatgctgaacaaggggcctccaaccttctgccctcctgccaaaagatctggggagtgtgaggagagggtggcatcaggagctgctcaggcttggcggagggagcggcatgggcgatgtcactcagccccttcccggtccgcccgcttccctccttcatgatttccattaaagtctgttgttttgtgactgctgccagtgtggttggccctgcccctgcaggccacatggtccagggagggagggggacatggaaatctgctcttcgtctggggcctggggccttgcctcccactgaggagactttgggtggggtggggggctgtcccccaaagatgctcctgagtgcaagagcaggcaaggcagagtcctggggcacagccacgaggtgacctccctgtgcagagactcccgagccctactccacccagcaagctccagtccgccccatctctcccgtctaccctgacctggagatccagaagtatggcccagaagagcccttgccccgcctgtctgcccttggtggcagtggccatggccgacgccaggcccagccaccctgggactgagcctgactgcttcagacagccgacccctccttgtccccgctccacgcccgcagcctcctggtggcgctccgccctctcccgcttcctttgtgtatctcagccctacaaagaaaaacactcccactcttgtcatacctaattgttcctgctgtggtttggggaattttttttattaaataaagttttttattataagggt

SEQ ID NO: 18371 - protein, 91 aa, Homo sapiens
MSLSPFPVRPLPSFMISIKVCCFVTAASVVGPAPAGHMVQGGRGTWKSALRLGPGALPPTEETLGGVGGCPPKMLLSARAGKAESWGTATR

SEQ ID NO: 18372 - DNA, 2400 bp, Homo sapiens
gttaggggagactgcctggaggagatgctcccggaggggctagcaaggaagggggctgagggaagtggagggagagatgggtcaggtgaggagccagggaaggggaaggtgatggggtgggctggaggcaagaagcttgaggcgcaggggaggagagagtccaggggtaaggcgagggcagccccgtggttcccaagtccagctgagccctcattatcctggggaaaagacttccacctagtgtcacccctcgccaaggcacacacacacacggagacgtgcagaggccagcatggtgtgcacccctcctgcccacaggtacacacatgtgtagatacacacacagatgctgggacacgcagaggggagcagacaagcacacctccacacacagatggcctcttctgggctgggtgtggctggccgtgggcagtcactacggcccaacccagtgactcacggggcagggctgaggggcacagtctccctgggtggcctgggaaacactgctcagctccaggatggagctgaatctccaagggcaaaggaatcttggcacccagctgggactcccctagggtccaatttgcttcaccagccttcccttcccccacgccccatcttgcagccctaagcccaggggcaatggctgaggtccttgccaaagggggtggattgggctggtggtgggttggagcacgatgctggcgtcccctttgcacatgttccctgggcacctctgtcctctgcgagtccctgcctgcccagagagctccctgctctggttaggcttgtgaggtccccgtagctgtggctgctgcagaggcctcagcctggccggaaagcctgttcacctgctggcactcagagcctcgcagtggtccttcccttttctgcatccggaatcttagggagaccctgatgaacactttgagttgtctccccagggacacacagctctctcctcatccaccacttagcacacaattctggccattccaaagacttcagatgaagaagtcctggtagacagtttatgaactgggattatgcaggacgtctccctcggatttgcagaaaggggtaccattgagagagggaggagaggggccgaggtcacagaggctgttaaaggcctccagccccagaaaagcagggattcagtctgcccaactgtagggccttgaatcccttccttctaagctccttccagccaaatgtgtgttctgccaacctgagctgccccagccccaaacaaactcagccatgccctccctgcctgcccttcaagacttgacccttcggctcttttctccacccctggcctctggaaagtccatgccccatcctcctgcagccctgcccttccctccccatctcgctcattcccccttctcttctttgaggtgtgcccggccggggcaggcgccctggagcctggcgccccaggcagctgctacctggatgcagggctgcggcggcgcctgcgggaggagtggggcgtgagctgctggaccctgctccaggcccccggagaggccgtgctggtgcctgcaggggctccccaccaggtgcagggcctggtgagcacagtcagcgtcactcagcacttcctctcccctgagacctctgccctctctgctcagctctgccaccagggacccagccttccccctgactgccacctgctttatgcccagatggactgggctgtgttccaagcagtgaaggtggccgtggggacattacaggaggccaaatagagggatgctaggtgtctgggatcggggtggggacaggtagaccaggtgctcagcccaggcacaacttcagcaggggatggcgctaggggacttggggatttctggtcaaccccacaagcaccactctgggcacaagcagggcactctgttcccctcccccttaagccaacaaccacagtgccaccaagctcacacctgtccttctcaggctggcatctcccccaccctgtgccccttttcatggtaccaggcccgcactgggggcaattgacttcctccaatccccactcctccgagacccaggagacaaacagcccttccttggggaaacttgggaatcattctggcttaaacaacacctcctcctgctgctcactcccgctgagcccactctactgccccagctccgtttctaccaccgcatcctcactgggctcactgcaggcatgctgaacaaggggcctccaaccttctgccctcctgccaaaagatctggggagtgtgaggagagggtggcatcaggagctgctcaggcttggcggagggagcggcatgggcgatgtcactcagccccttcccggtccgcccgcttccctccttcatgatttccattaaagtctgttgttttgtgactgct

SEQ ID NO: 18373 - protein, 168 aa, Homo sapiens; identical to SEQ ID NO: 18369

SEQ ID NO: 18374 - DNA, 5523 bp, Homo sapiens
tctcccgggagccactcccatgggcgcctctccagcccctggcctggaagcaccaggaaccctggggatggggcagaccctcacagcccggggtctggagccggtgtcggagctcatctgggcccatgacctctccagacatttggcaaaatcaaggcccttagaccagggacagacccaagcccaggccctcccagaggtcctaggacgcaaccctttgtgcccttgggctctggaagaggtttgggaagggtttggggtggaagatggcaaagagcagcttggccaggtgaggatgaggcagggcagacacaggccagtggggcgtgccatgtgccacagatggagaggaccaggagccagtggcccggcaggcacagcccggttggcgtgggccagagcgcccatcactgacccgtgagaactcgactgcccctgccagctctggcactgccccctcccagccgccccgccctagcaccctggggggcaccccgcccaaccgtggcctggtccggcccctcccgccctttgctccagttcccgggcttggcacctatagtgggggtgccgcccgcctgccaggctccggggccgggcccacgggagggtggggcggctgggaagctggcacgctgccccgggggagcctctctcggcaggcgcccgggtgccgcgggggggagggggaacaaagggctcattctccccgtgcgcagccggtggcatcgccggggcgttggcggaagcccccggggcccgggagggggcaggcccaggcgcggccgccgaatcacgggctcctgtttcccgcagggtgctggaggaggaaaccggcggagcagcttccccactctcagttgcgcttctggcgatggcgatcagaggtcctgctgcgctctccgccgcgctctacctccattagccgcgctgcgcggtgctgcgccctcgccggtgcctctctcctgggtcccaggatcggcccccaccatccaggcacgacccccttccccggcccctcggcctttcccccaactcggccatctccgacccggggcgcgtgttccccccggcccggcgccttctctccctccgggggcacccgctccctagccccggcccggccctccccgcggcgcagcacggagtctcggcgtcccatggcgcaacctacggcctcggcccagaagctggtgcggccgatccgcgccgtgtgccgcatcctgcagatcccggagtccgacccctccaacctgcggccctagagcgcccccgccgccccgggggaaggagagcgcgagcgcgctgagcagacagagcgggagaacgcgtcctcgcccgccggccgggaggccccggagctggcccatggggagcaggcgcccggtgccggccacgacgaccgccaccgcccgcgccgcgaccggccggtgaagcccagggacccccctctgggagagccccatgagggcaggagagtgatggagagtacgcccagcttcctgaagggcaccccaacctgggagaagacggccccagagaacggcatcgtgagacaggagcccggcagcccgcctcgagatggactgcaccatgggccgctgtgcctgggagagcctgctcccttttggaggggcgtcctgagcaccccagactcctggcttccccctggcttcccccagggccccaaggacatgctcccacttgtggagggcgagggcccccagaatggggagaggaaggtcaactggctgggcagcaaagagggactgcgctggaaggaggccatgcttacccatccgctggcattctgcgggccagcgtgcccacctcgctgtggccccctgatgcctgagcatagtggtggccatctcaagagtgaccctgtggccttccggccctggcactgccctttccttctggagaccaagatcctggagcgagctcccttctgggtgcccacctgcttgccaccctacctagtgtctggcctgcccccagagcatccatgtgactggcccctgaccccgcacccctgggtatactccgggggccagcccaaagtgccctctgccttcagcttaggcagcaagggcttttactacaaggatccgagcattcccaggttggcaaaggagcccttggcagctgcggaacctgggttgtttggcttaaactctggtgggcacctgcagagagccggggaggccgaacgcccttcactgcaccagagggatggagagatgggagctggccggcagcagaatccttgcccgctcttcctggggcagccagacactgtgccctggacctcctggcccgcttgtcccccaggccttgttcatactcttggcaacgtctgggctgggccaggcgatgggaaccttgggtaccagctggggccaccagcaacaccaaggtgcccctctcctgagccgcctgtcacccagcggggctgctgttcatcctacccacccactaaaggtgggggtcttggcccttgtgggaagtgccaggagggcctggaggggggtgccagtggagccagcgaacccagcgaggaagtgaacaaggcctctggccccagggcctgtccccccagccaccacaccaagctgaagaagacatggctcacacggcactcggagcagtttgaatgtccacgcggctgccctgaggtcgaggagaggccggttgctcggctccgggccctcaaaagggcaggcagccccgaggtccagggagcaatgggcagtccagcccccaagcggccaccggacccttttccaggcactgcagaacagggggctgggggttggcaggaggtgcgggacacatcgatagggaacaaggatgtggactcgggacagcatgatgagcagaaaggaccccaagatggccaggccagtctccaggacccgggacttcaggacataccatgcctggctctccctgcaaaactggctcaatgccaaagttgtgcccaggcagctggagagggaggagggcacgcctgccactctcagcaagtgcggagatcgcctctgggaggggagctgcagcaggaggaagacacagccaccaactccagctctgaggaaggcccagggtccggccctgacagccggctcagcacaggcctcgccaagcacctgctcagtggtttgggggaccgactgtgccgcctgctgcggagggagcgggaggccctggcttgggcccagcgggaaggccaagggccagccgtgacagaggacagcccaggcattccacgctgctgcagccgttgccaccatggactcttcaacacccactggcgatgtccccgctgcagccaccggctgtgtgtggcctgtggtcgtgtggcaggcactgggcgggccagggagaaagcaggctttcaggagcagtccgcggaggagtgcacgcaggaggccgggcacgctgcctgttccctgatgctgacccagtttgtctccagccaggctttggcagagctgagcactgcaatgcaccaggtctgggtcaagtttgatatccgggggcactgcccctgccaagctgatgcccgggtatgggcccccggggatgcaggccagcagaaggaatcaacacagaaaacgcccccaactccacaaccttcctgcaatggcgacacccacaggaccaagagcatcaaagaggagacccccgattccgctgagaccccagcagaggaccgtgctggccgagggcccctgccttgtccttctctctgcgaactgctggcttctaccgcggtcaaactctgcttgggccatgagcgaatacacatggccttcgcccccgtcactccggccctgcccagtgatgaccgcatcaccaacatcctggacagcattatcgcacaggtggtggaacggaagatccaggagaaagccctggggccggggcttcgagctggcccgggtctgcgcaagggcctgggcctgcccctctctccagtgcggccccggctgcctcccccaggggctttgctgtggctgcaggagccccagccttgccctcggcgtggcttccacctcttccaggagcactggaggcagggccagcctgtgttggtgtcagggatccaaaggacattgcagggcaacctgtgggggacagaagctcttggggcacttggaggccaggtgcaggcgctgagccccctcggacctccccagcccagcagcctgggcagcacaacattctgggagggcttctcctggcctgagcttcgcccaaagtcagacgagggctctgtcctcctgctgcaccgagctttgggggatgaggacaccagcagggtggagaacctagctgccagtctgccacttccggagtactgcgccctccatggaaaactcaacctggcttcctacctcccaccgggccttgccctgcgtccactggagccccagctctgggcagcctatggtgtgagcccgcaccggggacacctggggaccaagaacctctgtgtggaggtggccgacctggtcagcatcctggtgcatgccgacacaccactgcctgcctggcaccgggcacagaaagacttcctttcaggcctggacggggaggggctctggtctccgggcagccaggtcagcactgtgtggcacgtgttccgggcacaggacgcccagcgcatccgccgctttctccagatggtgcagggcctggtgagcacagtcagcgtcactcagcacttcctctcccctgagacctctgccctctctgctcagctctgccaccagggacccagccttccccctgactgccacctgctttatgcccagatggactgggctgtgttccaagcagtgaaggtggccgtggggacattacaggaggccaaatagagggatgctaggtgtctgggatcggggtggggacaggtagaccaggtgctcagcccaggcacaacttcagcaggggatggcgctaggggacttggggatttctggtcaaccccacaagcaccactctgggcacaagcagggcactctgttcccctcccccttaagccaacaaccacagtgccaccaagctcacacctgtccttctcaggctggcatctcccccaccctgtgccccttttcatggtaccaggcccgcactgggggcaattgacttcctccaatccccactcctccgagacccaggagacaaacagcccttccttggggaaacttgggaatcattctggcttaaacaacacctcctcctgctgctcactcccgctgagcccactctactgccccagctccgtttctaccaccgcatcctcactgggctcactgcaggcatgctgaacaaggggcctccaaccttctgccctcctgccaaaagatctggggagtgtgaggagagggtggcatcaggagctgctcaggcttggcggagggagcggcatgggcgatgtcactcagccccttcccggtccgcccgcttccctccttcatgatttccattaaagtctgttgttttgtgactgct

SEQ ID NO: 18375 - protein, 1134 aa, Homo sapiens; identical to SEQ ID NO: 2226

SEQ ID NO: 18376 - DNA, 5688 bp, Homo sapiens
tctcccgggagccactcccatgggcgcctctccagcccctggcctggaagcaccaggaaccctggggatggggcagaccctcacagcccggggtctggagccggtgtcggagctcatctgggcccatgacctctccagacatttggcaaaatcaaggcccttagaccagggacagacccaagcccaggccctcccagaggtcctaggacgcaaccctttgtgcccttgggctctggaagaggtttgggaagggtttggggtggaagatggcaaagagcagcttggccaggtgaggatgaggcagggcagacacaggccagtggggcgtgccatgtgccacagatggagaggaccaggagccagtggcccggcaggcacagcccggttggcgtgggccagagcgcccatcactgacccgtgagaactcgactgcccctgccagctctggcactgccccctcccagccgccccgccctagcaccctggggggcaccccgcccaaccgtggcctggtccggcccctcccgccctttgctccagttcccgggcttggcacctatagtgggggtgccgcccgcctgccaggctccggggccgggcccacgggagggtggggcggctgggaagctggcacgctgccccgggggagcctctctcggcaggcgcccgggtgccgcgggggggagggggaacaaagggctcattctccccgtgcgcagccggtggcatcgccggggcgttggcggaagcccccggggcccgggagggggcaggcccaggcgcggccgccgaatcacgggctcctgtttcccgcagggtgctggaggaggaaaccggcggagcagcttccccactctcagttgcgcttctggcgatggcgatcagaggtcctgctgcgctctccgccgcgctctacctccattagccgcgctgcgcggtgctgcgccctcgccggtgcctctctcctgggtcccaggatcggcccccaccatccaggcacgacccccttccccggcccctcggcctttcccccaactcggccatctccgacccggggcgcgtgttccccccggcccggcgccttctctccctccgggggcacccgctccctagccccggcccggccctccccgcggcgcagcacggagtctcggcgtcccatggcgcaacctacggcctcggcccagaagctggtgcggccgatccgcgccgtgtgccgcatcctgcagatcccggagtccgacccctccaacctgcggccctagagcgcccccgccgccccgggggaaggagagcgcgagcgcgctgagcagacagagcgggagaacgcgtcctcgcccgccggccgggaggccccggagctggcccatggggagcaggcgcccggtgccggccacgacgaccgccaccgcccgcgccgcgaccggccggtgaagcccagggacccccctctgggagagccccatgagggcaggagagtgatggagagtacgcccagcttcctgaagggcaccccaacctgggagaagacggccccagagaacggcatcgtgagacaggagcccggcagcccgcctcgagatggactgcaccatgggccgctgtgcctgggagagcctgctcccttttggaggggcgtcctgagcaccccagactcctggcttccccctggcttcccccagggccccaaggacatgctcccacttgtggagggcgagggcccccagaatggggagaggaaggtcaactggctgggcagcaaagagggactgcgctggaaggaggccatgcttacccatccgctggcattctgcgggccagcgtgcccacctcgctgtggccccctgatgcctgagcatagtggtggccatctcaagagtgaccctgtggccttccggccctggcactgccctttccttctggagaccaagatcctggagcgagctcccttctgggtgcccacctgcttgccaccctacctagtgtctggcctgcccccagagcatccatgtgactggcccctgaccccgcacccctgggtatactccgggggccagcccaaagtgccctctgccttcagcttaggcagcaagggcttttactacaaggatccgagcattcccaggttggcaaaggagcccttggcagctgcggaacctgggttgtttggcttaaactctggtgggcacctgcagagagccggggaggccgaacgcccttcactgcaccagagggatggagagatgggagctggccggcagcagaatccttgcccgctcttcctggggcagccagacactgtgccctggacctcctggcccgcttgtcccccaggccttgttcatactcttggcaacgtctgggctgggccaggcgatgggaaccttgggtaccagctggggccaccagcaacaccaaggtgcccctctcctgagccgcctgtcacccagcggggctgctgttcatcctacccacccactaaaggtgggggtcttggcccttgtgggaagtgccaggagggcctggaggggggtgccagtggagccagcgaacccagcgaggaagtgaacaaggcctctggccccagggcctgtccccccagccaccacaccaagctgaagaagacatggctcacacggcactcggagcagtttgaatgtccacgcggctgccctgaggtcgaggagaggccggttgctcggctccgggccctcaaaagggcaggcagccccgaggtccagggagcaatgggcagtccagcccccaagcggccaccggacccttttccaggcactgcagaacagggggctgggggttggcaggaggtgcgggacacatcgatagggaacaaggatgtggactcgggacagcatgatgagcagaaaggaccccaagatggccaggccagtctccaggacccgggacttcaggacataccatgcctggctctccctgcaaaactggctcaatgccaaagttgtgcccaggcagctggagagggaggagggcacgcctgccactctcagcaagtgcggagatcgcctctgggaggggagctgcagcaggaggaagacacagccaccaactccagctctgaggaaggcccagggtccggccctgacagccggctcagcacaggcctcgccaagcacctgctcagtggtttgggggaccgactgtgccgcctgctgcggagggagcgggaggccctggcttgggcccagcgggaaggccaagggccagccgtgacagaggacagcccaggcattccacgctgctgcagccgttgccaccatggactcttcaacacccactggcgatgtccccgctgcagccaccggctgtgtgtggcctgtggtcgtgtggcaggcactgggcgggccagggagaaagcaggctttcaggagcagtccgcggaggagtgcacgcaggaggccgggcacgctgcctgttccctgatgctgacccagtttgtctccagccaggctttggcagagctgagcactgcaatgcaccaggtctgggtcaagtttgatatccgggggcactgcccctgccaagctgatgcccgggtatgggcccccggggatgcaggccagcagaaggaatcaacacagaaaacgcccccaactccacaaccttcctgcaatggcgacacccacaggaccaagagcatcaaagaggagacccccgattccgctgagaccccagcagaggaccgtgctggccgagggcccctgccttgtccttctctctgcgaactgctggcttctaccgcggtcaaactctgcttgggccatgagcgaatacacatggccttcgcccccgtcactccggccctgcccagtgatgaccgcatcaccaacatcctggacagcattatcgcacaggtggtggaacggaagatccaggagaaagccctggggccggggcttcgagctggcccgggtctgcgcaagggcctgggcctgcccctctctccagtgcggccccggctgcctcccccaggggctttgctgtggctgcaggagccccagccttgccctcggcgtggcttccacctcttccaggagcactggaggcagggccagcctgtgttggtgtcagggatccaaaggacattgcagggcaacctgtgggggacagaagctcttggggcacttggaggccaggtgcaggcgctgagccccctcggacctccccagcccagcagcctgggcagcacaacattctgggagggcttctcctggcctgagcttcgcccaaagtcagacgagggctctgtcctcctgctgcaccgagctttgggggatgaggacaccagcagggtggagaacctagctgccagtctgccacttccggagtactgcgccctccatggaaaactcaacctggcttcctacctcccaccgggccttgccctgcgtccactggagccccagctctgggcagcctatggtgtgagcccgcaccggggacacctggggaccaagaacctctgtgtggaggtggccgacctggtcagcatcctggtgcatgccgacacaccactgcctgcctggcaccgggcacagaaagacttcctttcaggcctggacggggaggggctctggtctccgggcagccaggtcagcactgtgtggcacgtgttccgggcacaggacgcccagcgcatccgccgctttctccagatggtgtgcccggccggggcaggcgccctggagcctggcgccccaggcagctgctacctggatgcagggctgcggcggcgcctgcgggaggagtggggcgtgagctgctggaccctgctccaggcccccggagaggccgtgctggtgcctgcaggggctccccaccaggtgcagggcctggtgagcacagtcagcgtcactcagcacttcctctcccctgagacctctgccctctctgctcagctctgccaccagggacccagccttccccctgactgccacctgctttatgcccagatggactgggctgtgttccaagcagtgaaggtggccgtggggacattacaggaggccaaatagagggatgctaggtgtctgggatcggggtggggacaggtagaccaggtgctcagcccaggcacaacttcagcaggggatggcgctaggggacttggggatttctggtcaaccccacaagcaccactctgggcacaagcagggcactctgttcccctcccccttaagccaacaaccacagtgccaccaagctcacacctgtccttctcaggctggcatctcccccaccctgtgccccttttcatggtaccaggcccgcactgggggcaattgacttcctccaatccccactcctccgagacccaggagacaaacagcccttccttggggaaacttgggaatcattctggcttaaacaacacctcctcctgctgctcactcccgctgagcccactctactgccccagctccgtttctaccaccgcatcctcactgggctcactgcaggcatgctgaacaaggggcctccaaccttctgccctcctgccaaaagatctggggagtgtgaggagagggtggcatcaggagctgctcaggcttggcggagggagcggcatgggcgatgtcactcagccccttcccggtccgcccgcttccctccttcatgatttccattaaagtctgttgttttgtgactgct

SEQ ID NO: 18377 - protein, 1189 aa, Homo sapiens; identical to SEQ ID NO: 2224

SEQ ID NO: 18378 - DNA, 1578 bp, Homo sapiens
actgcgcctgcgtggcaagccggagccctggggttgggcagcactcggttccgtgcaactttcaagtgagttgcgaactccgccctgtaggccggtgctggtggcccggcgcgctggaaccgcggcgacccgctccagcgcgggaccagcagcaagggccgagcgccaggttctccgcggcagaaagggcgggtgggagctgtaactgccccggccgcggggcgcgcccgctcccaagtcggcttcctccccgccggggccgctttgcctcgggtctccccattctccaggtcccctgaactgcacagtcggaggccgtgggcggcgggctctgcctccgccgagggacagccggatcgcccctctgcttcccgcaactgccctgatcaccccccgtcccagcccttgagtgaacgtccttctgagcggcttcctggggtcctccccacgtcccaaaggccggcaagatggtgtcctggatgatctgtcgcctggtggtgctggtgtttgggatgctgtgtccagcttatgcttcctataaggctgtgaagaccaagaacattcgtgaatatgtgcggtggatgatgtactggattgtttttgcactcttcatggcagcagagatcgttacagacatttttatctcctggttccctttctactatgagatcaagatggccttcgtgctgtggctgctctcaccctacaccaagggcgccagcctgctttaccgcaagtttgtccacccgtccctgtcccgccatgagaaggagatcgacgcgtacatcgtgcaggccaaggagcgcagctacgagaccgtgctcagcttcgggaagcggggcctcaacattgccgcctccgctgctgtgcaggctgccaccaagggtaccgggccgggggcctgcaggacagcgacaccgaggatgagtgttggtcagatactgaggcagtcccccgggcgccagcccggccccgagagaagcccctaatccgcagccagagcctgcgtgtggtcaagaggaagccaccggtgcgggagggcacctcgcgctccctgaaggttcggacgaggaaaaagactgtgccctcagacgtggacagctagggtctgctgcatctgcccccttcttacctcgtgccctgcagggctccagggctatttggagggaccttgggctgcacatctggcctgcctgcaccagctgcctgggccccaccctcctgactcctgctgatggttaagggccgggagcagatgctgccaaggccacatgcagggatgcacccacaatgtaccaaagcaggctgggcccagggttctatttattgccttgctctgccctctcccttccccggttgtgggacaagagccctccctgaacccctgcaaccctccctgaacccctgcaaatgaaaccaaacgtccacctgggtgtgttcattccttcctgtccttcaaagtacttgatagcctttcataaggcctggcacatgtgtcctggttgtgtgtgtgtgtgttggtgagtgaggtcaggtttgcgagtgttttgataaataaatacataaaggggctctgtt

SEQ ID NO: 18379 - protein, 173 aa, Homo sapiens
MVSWMICRLVVLVFGMLCPAYASYKAVKTKNIREYVRWMMYWIVFALFMAAEIVTDIFISWFPFYYEIKMAFVLWLLSPYTKGASLLYRKFVHPSLSRHEKEIDAYIVQAKERSYETVLSFGKRGLNIAASAAVQAATKGTGPGACRTATPRMSVGQILRQSPGRQPGPERSP

SEQ ID NO: 18380 - DNA, 1559 bp, Homo sapiens
actgcgcctgcgtggcaagccggagccctggggttgggcagcactcggttccgtgcaactttcaagtgagttgcgaactccgccctgtaggccggtgctggtggcccggcgcgctggaaccgcggcgacccgctccagcgcgggaccagcagcaagggccgagcgccaggttctccgcggcagaaagggcgggtgggagctgtaactgccccggccgcggggcgcgcccgctcccaagtcggcttcctccccgccggggccgctttgcctcgggtctccccattctccaggtcccctgaactgcacagtcggaggccgtgggcggcgggctctgcctccgccgagggacagccggatcgcccctctgcttcccgcaactgccctgatcaccccccgtcccagcccttgagtgaacgtccttctgagcggcttcctggggtcctccccacgtcccaaaggccggcaagatggtgtcctggatgatctgtcgcctggtggtgctggtgtttgggatgctgtgtccagcttatgcttcctataaggctgtgaagaccaagaacattcgtgaatatgtgcggtggatgatgtactggattgtttttgcactcttcatggcagcagagatcgttacagacatttttatctcctggttccctttctactatgagatcaagatggccttcgtgctgtggctgctctcaccctacaccaagggcgccagcctgctttaccgcaagtttgtccacccgtccctgtcccgccatgagaaggagatcgacgcgtacatcgtgcaggccaaggagcgcagctacgagaccgtgctcagcttcgggaagcggggcctcaacattgccgcctccgctgctgtgcaggctgccaccaagagtcagggggcgctggccggcaggctgcggagcttctccatgcaggacctgcgctccatctctgacgcacctgcccctgcctaccatgaccccctctacctggaggaccaggtgtcccaccggaggccacccattgggcacctcgcgctccctgaaggttcggacgaggaaaaagactgtgccctcagacgtggacagctagggtctgctgcatctgcccccttcttacctcgtgccctgcagggctccagggctatttggagggaccttgggctgcacatctggcctgcctgcaccagctgcctgggccccaccctcctgactcctgctgatggttaagggccgggagcagatgctgccaaggccacatgcagggatgcacccacaatgtaccaaagcaggctgggcccagggttctatttattgccttgctctgccctctcccttccccggttgtgggacaagagccctccctgaacccctgcaaccctccctgaacccctgcaaatgaaaccaaacgtccacctgggtgtgttcattccttcctgtccttcaaagtacttgatagcctttcataaggcctggcacatgtgtcctggttgtgtgtgtgtgtgttggtgagtgaggtcaggtttgcgagtgttttgataaataaatacataaaggggctctgtt

SEQ ID NO: 18381 - protein, 251 aa, Homo sapiens
MVSWMICRLVVLVFGMLCPAYASYKAVKTKNIREYVRWMMYWIVFALFMAAEIVTDIFISWFPFYYEIKMAFVLWLLSPYTKGASLLYRKFVHPSLSRHEKEIDAYIVQAKERSYETVLSFGKRGLNIAASAAVQAATKSQGALAGRLRSFSMQDLRSISDAPAPAYHDPLYLEDQVSHRRPPIGHLALPEGSDEEKDCALRRGQLGSAASAPFLPRALQGSRAIWRDLGLHIWPACTSCLGPTLLTPADG

SEQ ID NO: 18382 - DNA, 1714 bp, Homo sapiens
actgcgcctgcgtggcaagccggagccctggggttgggcagcactcggttccgtgcaactttcaagtgagttgcgaactccgccctgtaggccggtgctggtggcccggcgcgctggaaccgcggcgacccgctccagcgcgggaccagcagcaagggccgagcgccaggttctccgcggcagaaagggcgggtgggagctgtaactgccccggccgcggggcgcgcccgctcccaagtcggcttcctccccgccggggccgctttgcctcgggtctccccattctccaggtcccctgaactgcacagtcggaggccgtgggcggcgggctctgcctccgccgagggacagccggatcgcccctctgcttcccgcaactgccctgatcaccccccgtcccagcccttgagtgaacgtccttctgagcggcttcctggggtcctccccacgtcccaaaggccggcaagatggtgtcctggatgatctgtcgcctggtggtgctggtgtttgggatgctgtgtccagcttatgcttcctataaggctgtgaagaccaagaacattcgtgaatatgtgcggtggatgatgtactggattgtttttgcactcttcatggcagcagagatcgttacagacatttttatctcctggttccctttctactatgagatcaagatggccttcgtgctgtggctgctctcaccctacaccaagggcgccagcctgctttaccgcaagtttgtccacccgtccctgtcccgccatgagaaggagatcgacgcgtacatcgtgcaggccaaggagcgcagctacgagaccgtgctcagcttcgggaagcggggcctcaacattgccgcctccgctgctgtgcaggctgccaccaagagtcagggggcgctggccggcaggctgcggagcttctccatgcaggacctgcgctccatctctgacgcacctgcccctgcctaccatgaccccctctacctggaggaccaggtgtcccaccggaggccacccattgggtaccgggccgggggcctgcaggacagcgacaccgaggatgagtgttggtcagatactgaggcagtcccccgggcgccagcccggccccgagagaagcccctaatccgcagccagagcctgcgtgtggtcaagaggaagccaccggtgcgggagggcacctcgcgctccctgaaggttcggacgaggaaaaagactgtgccctcagacgtggacagctagggtctgctgcatctgcccccttcttacctcgtgccctgcagggctccagggctatttggagggaccttgggctgcacatctggcctgcctgcaccagctgcctgggccccaccctcctgactcctgctgatggttaagggccgggagcagatgctgccaaggccacatgcagggatgcacccacaatgtaccaaagcaggctgggcccagggttctatttattgccttgctctgccctctcccttccccggttgtgggacaagagccctccctgaacccctgcaaccctccctgaacccctgcaaatgaaaccaaacgtccacctgggtgtgttcattccttcctgtccttcaaagtacttgatagcctttcataaggcctggcacatgtgtcctggttgtgtgtgtgtgtgttggtgagtgaggtcaggtttgcgagtgttttgataaataaatacataaaggggctctgtt

SEQ ID NO: 18383 - protein, 257 aa, Homo sapiens; identical to SEQ ID NO: 2228

SEQ ID NO: 18384 - DNA, 446 bp, Homo sapiens
ggaccagcagcaagggccgagcgccaggttctccgcggcagaaagggcgggtgggagctgtaactgccccggccgcggggcgcgcccgctcccaagtcggcttcctccccgccggggccgctttgcctcgggtctccccattctccaggtcccctgaactgcacagtcggaggccgtgggcggcgggctctgcctccgccgagggacagccggatcgcccctctgcttcccgcaactgccctgatcaccccccgtcccagcccttgagtgaacgtcccctgcaaatgaaaccaaacgtccacctgggtgtgttcattccttcctgtccttcaaagtacttgatagcctttcataaggcctggcacatgtgtcctggttgtgtgtgtgtgtgttggtgagtgaggtcaggtttgcgagtgttttgataaataaatacataaaggggc

SEQ ID NO: 18385 - protein, 37 aa, Homo sapiens
MKPNVHLGVFIPSCPSKYLIAFHKAWHMCPGCVCVCW

SEQ ID NO: 18386 - DNA, 1562 bp, Homo sapiens
actgcgcctgcgtggcaagccggagccctggggttgggcagcactcggttccgtgcaactttcaagtgagttgcgaactccgccctgtaggccggtgctggtggcccggcgcgctggaaccgcggcgacccgctccagcgcgggaccagcagcaagggccgagcgccaggttctccgcggcagaaagggcgggtgggagctgtaactgccccggccgcggggcgcgcccgctcccaagtcggcttcctccccgccggggccgctttgcctcgggtctccccattctccaggtcccctgaactgcacagtcggaggccgtgggcggcgggctctgcctccgccgagggacagccggatcgcccctctgcttcccgcaactgccctgatcaccccccgtcccagcccttgagtgaacgtccttctgagcggcttcctggggtcctccccacgtcccaaaggccggcaagatggtgtcctggatgatctgtcgcctggtggtgctggtgtttgggatgctgtgtccagcttatgcttcctataaggctgtgaagaccaagaacattcgtgaatatgtgcggtggatgatgtactggattgtttttgcactcttcatggcagcagagatcgttacagacatttttatctcctggttccctttctactatgagatcaagatggccttcgtgctgtggctgctctcaccctacaccaagggcgccagcctgctttaccgcaagtttgtccacccgtccctgtcccgccatgagaaggagatcgacgcgtacatcgtgcaggccaaggagcgcagctacgagaccgtgctcagcttcgggaagcggggcctcaacattgccgcctccgctgctgtgcaggctgccaccaagagtcagggggcgctggccggcaggctgcggagcttctccatgcaggacctgcgctccatctctgacgcacctgcccctgcctaccatgaccccctctacctggaggaccaggtgtcccaccggaggccacccattgggtaccgggccgggggcctgcaggacagcgacaccgaggatgagtgttggtcagatactgaggcagtcccccgggcgccagcccggccccgagagaagcccctaatccgcagccagagcctgcgtgtggtcaagaggaagccaccggtgcgggagggcacctcgcgctccctgaaggttcggacgaggaaaaagactgtgccctcagacgtggacagctagggtctgctgcatctgcccccttcttacctcgtgccctgcagggctccagggctatttggagggaccttgggctgcacatctggcctgcctgcaccagctgcctgggccccaccctcctgactcctgctgatggttaagggccgggagcagatgctgccaaggccacatgcagggatgcacccacaatgtaccaaagcaggctgggcccagggttctatttattgccttgctctgccctctcccttccccggttgtgggacaagagccctccctgaacccctgcaaccctccctgaacccctgcaaatgaaaccaaacgtcc

SEQ ID NO: 18387 - protein, 257 aa, Homo sapiens; identical to SEQ ID NO: 2228

SEQ ID NO: 18388 - DNA, 931 bp, Homo sapiens
actgcgcctgcgtggcaagccggagccctggggttgggcagcactcggttccgtgcaactttcaagtgagttgcgaactccgccctgtaggccggtgctggtggcccggcgcgctggaaccgcggcgacccgctccagcgcgggaccagcagcaagggccgagcgccaggttctccgcggcagaaagggcgggtgggagctgtaactgccccggccgcggggcgcgcccgctcccaagtcggcttcctccccgccggggccgctttgcctcgggtctccccattctccaggtcccctgaactgcacagtcggaggccgtgggcggcgggctctgcctccgccgagggacagccggatcgcccctctgcttcccgcaactgccctgatcaccccccgtcccagcccttgagtgaacgtccttctgagcggcttcctggggtcctccccacgtcccaaaggccggcaagatggtgtcctggatgatctgtcgcctggtggtgctggtgtttgggatgctgtgtccagcttatgcttcctataaggctgtgaagaccaagaacattcgtgaatatgtgcggtggatgatgtactggattgtttttgcactcttcatggcagcagagatcgttacagacatttttatctcctggttccctttctactatgagatcaagatggccttcgtgctgtggctgctctcaccctacaccaagggcgccagcctgctttaccgcaagtttgtccacccgtccctgtcccgccatgagaaggtaccccagggggaagcgggaagggaggcttaggggtgggtatgagggaaagagccctggacctgggatttaggatgctggggacaccggggttctatcccagtcctgctgctattgaggggcaggaccttgacagggcccagcctacctcatcttctggg

SEQ ID NO: 18389 - protein, 111 aa, Homo sapiens [sequence omitted]

SEQ ID NO: 18390 - DNA, 4422 bp, Homo sapiens
gcgcgcccccgccgcccgcgccgcagtccgcagccacccggcgcggtcagccccggctgcggctccagctccgcgctccgctcttctctcccgagccggatcgcgggagcgagcaggggaggggaccgcagccggcgcccgagggcaggaggagtccgcaggcgggcccctggctgcggtagcagctgccggtggcagggaggtgccagcccgcgcggggtggcccagccgcgggagcggtggggcgggggccgcggccgccggccccagggagagatcgcgggcagcatggcggggctgcgggccagggggggcccggggccggggctgctggcgctctccgcgctcggcttctgcctcatgctgcaagtcagcgctaagaggccccccaagacgcccccctgcccgcccagctgctcttgcaccagggacaccgccttctgcgtggactcaaaggcggtgcccaggaacctgccctcggaggtcatctccctcacagcccttgcagaccccacagtactgactcgggtgtccccgcaggaccctggtgaatgccgccttctcagagatccaggatggagcgttctcccacctcccgctgctgcagttcttgtatggatagggccttgtggaagggttgggggaactatggggtggtagcaggggacaaatcctgggctggggagagggagagtggacagaggcagcctctgcagacgaagatgcaggtgtcccttgcttttgttctgataggatgtacccaaaagacggggcagccttgagtcaggggagtcggggcagcaggaggacagctagggatggcacagagaagccaagcaagtgggatgcggggatgggcttggctgctctggaaaccccagagaattgggtgcgatagcctgggctagtgcccaaggtgggcactgtggggccatcttagagacaggtgatcccaggaatcagagttcccagaaagagctgggggctgaaagaaagggatggcaggagtgtctccaaccctacaagatgccgtccatgagggacagttgtccatgaggggctggaatgggacagaatgagggtgggggagagggagaggagatgccacccgggaggaccaggagctggcttgacaagagagctctgccttggcccatgtttaggatccaacagggaccctgggagcttctggggccagaacaggctcctgcctggccttgttgcccaggtggcccagggattccccatggggtccccaggggtagcagcagggcagtcatgtcttggggaagcccagggctgaggcagcgggctgggggctggggcagcaggcacacccttggaagctctaattccacctttgtctctgcaggttactcaactccaacaagtttacactgattggagacaacgccttcacaggactgtcgcacctgcagtatctgtgtgtgggagggaaaggggcaatgggaaagcagaagggagggggaccccaggcctgggaggccgagggactgggtagggagtggatgagaatgccgcaggaagggaaggtgatgggaggcgagagcccttgcatcccgtgatggcaggacctgagcagaaggtcgtttcattcattttgcctctaccctacctgatgctctatctctatggcttggtgatgccagactccatttggaaacctgtctcggggacacgggctgaaatctaggctggggcgtagggcgagtgctgctgggggtctggcatcctgtgtgagcactgaggcaagttcccgctttccccagcttcattgagaacaatgacatctgggcactatccaagttcaccttccgaggactcaagtccttgactcacctctcgctggccaacaataacctgcagacactgcccagagacatcttccggcccctggacatcctgaatgacttggacctgcggggcaactcactcaactgtgactgcaaggtgaagtggttggtggagtggctggcacacaccaacaccacggtggcacccatctactgcgccagcccgccccgcttccaggagcacaaggtgcaggacctgccgctgcgggagttcgattgcatcaccacagattttgtgttgtaccagaccctggccttcccagcagtgtcggctgagcccttcctctactccagtgacctctatttggctctggcccagccaggagtcagtgcctgcaccatcctgaagtgggactatgttgagcggcagcttcgagactatgatagaatcccagccccctctgcagtgcactgcaagccgatggtggtggacagccagctgtacgtggtcgtggcccagctgtttggcggctcttacatttaccactgggatcccaacaccacgcgcttcaccaggctgcaagacattgacccgcagcgcgtgcgcaagcctaacgacctagaagccttccgcatcgacggtgactggtactttgccgtggctgacagctccaaggcaggcgccaccagcctctaccgctggcaccagaatggcttctactcccaccaggcactgcacccctggcaccgtgacaccgacctggagtttgtggacggcgagggcaagccacggctgattgtgtccagcagctcccaggcacccgtcatctatcagtggagtcgcacccagaagcagtttgtggcccagggtgaggtgacccaggtgcctgatgcccaagctgtgaaacactttcgtgccggccgcgacagctacctgtgcctcagccgctacattggcgactccaagatcctgcgctgggagggtacccgcttctcggaggtgcaggccctgccctcccggggctcgctggccctgcagcccttccttgtgggtggccgccgctacctggcactgggcagtgatttctccttcacccagatctaccagtgggatgagggacgacagaagtttgtacggttccaggagctggctgtgcaggctcctcgggccttctgctacatgcctgctggggacgcccagctactcctggcccccagcttcaagggacagacgctggtgtatagacacattgtggtggatctcagtgcctagggggtgccgaggcctctggtctcctcagggtggccactggaggatgggtgggggcctctgtgagcaccacgtatgcctgtgtgaagacaagcgaccaacctgcattcatgcccttgtatccgcacacgcccagtgtgtacaggcgcaccccgtggactggcccaggaggacgtgcatcatcactgcaatcagcatgaacaccaggcacccctgggacacctaacgcccagttcccgtgaccccaactgcaggccccccctactctgcagcctttcccatgctctgccccctgtctcatgcacgagtggtgcggggtgctgggagcgaggggggccgcatcctcctgtccttgtgcttctccttctgcccctctggtctttcctgttggtgctccaggcattgtttacctgctcttgctccccgctgtagcccacagccatatctgtcatgcttccccggggccactcacccctgccccaccccgtctgcatgctcacatggacgcggacggacacactcattacacactcacacgccccgactgcacccggtgtccatctataaacatgtcagggcacgtgtgcatacaagcagattcagcactgcctaccaggctctcctgttaccttgcctctctgcttggagggggccccctctgctcacccccagcgtgccccccccggaactgataaggatgagaatggtggtgccagcttctgagggcctgcttggcctcctgggggcaaagcccctctgcccgaagcaataacaacagcagcagaagcaatcccggggagctgccaggggtgtctgtctctgttctccttggcgtttccttcatggccgtgaatcccagctcacccatggacagaagacctcccctcatctgaaagcctttctgccttccttcctgtagctgtcgctttctcaggcttggactgtcccctggttcaccctgtctttgggatgtggcccttgagctgggcgggctccttgggtggattagagagctggccgagctgcaagcacctgagttacctgcgagggtgcccagagtggagcttggcctgagggcgtgttgcagccctggccccaccagtccacagaggcccccaggagcactgcctttcagtggaccgggtggggcctggtgggaggggccccactagctgagcttctgctgccctctgctgtctgctgagatgccaggctagtggagagggcacaccatgtgcccaaatggtgtgatgctccttgtagcaggataccagggtactggggggcaatgctatgattaacttgcttcaaataaaaagttcccgccccataaccggc

SEQ ID NO: 18391 - protein, 123 aa, Homo sapiens
MAGLRARGGPGPGLLALSALGFCLMLQVSAKRPPKTPPCPPSCSCTRDTAFCVDSKAVPRNLPSEVISLTALADPTVLTRVSPQDPGECRLLRDPGWSVLPPPAAAVLVWIGPCGRVGGTMGW

SEQ ID NO: 18392 - DNA, 3272 bp, Homo sapiens
gcgcgcgcccccgccgcccgcgccgcagtccgcagccacccggcgcggtcagccccggctgcggctccagctccgcgctccgctcttctctcccgagccggatcgcgggagcgagcaggggaggggaccgcagccggcgcccgagggcaggaggagtccgcaggcgggcccctggctgcggtagcagctgccggtggcagggaggtgccagcccgcgcggggtggcccagccgcgggagcggtggggcgggggccgcggccgccggccccagggagagatcgcgggcagcatggcggggctgcgggccagggggggcccggggccggggctgctggcgctctccgcgctcggcttctgcctcatgctgcaagtcagcgctaagaggccccccaagacgcccccctgcccgcccagctgctcttgcaccagggacaccgccttctgcgtggactcaaaggcggtgcccaggaacctgccctcggaggtcatctccctgaccctggtgaatgccgccttctcagagatccaggatggagcgttctcccacctcccgctgctgcagttcttgttactcaactccaacaagtttacactgattggagacaacgccttcacaggactgtcgcacctgcagtatctcttcattgagaacaatgacatctgggcactatccaagttcaccttccgaggactcaagtccttgactcacctctcgctggccaacaataacctgcagacactgcccagagacatcttccggcccctggacatcctgaatgacttggacctgcggggcaactcactcaactgtgactgcaaggtgaagtggttggtggagtggctggcacacaccaacaccacggtggcacccatctactgcgccagcccgccccgcttccaggagcacaaggtgcaggacctgccgctgcgggagttcgattgcatcaccacagattttgtgttgtaccagaccctggccttcccagcagtgtcggctgagcccttcctctactccagtgacctctatttggctctggcccagccaggagtcagtgcctgcaccatcctgaagtgggactatgttgagcggcagcttcgagactatgatagaatcccagccccctctgcagtgcactgcaagccgatggtggtggacagccagctgtacgtggtcgtggcccagctgtttggcggctcttacatttaccactgggatcccaacaccacgcgcttcaccaggctgcaagacattgacccgcagcgcgtgcgcaagcctaacgacctagaagccttccgcatcgacggtgactggtactttgccgtggctgacagctccaaggcaggcgccaccagcctctaccgctggcaccagaatggcttctactcccaccaggcactgcacccctggcaccgtgacaccgacctggagtttgtggacggcgagggcaagccacggctgattgtgtccagcagctcccaggcacccgtcatctatcagtggagtcgcacccagaagcagtttgtggcccagggtgaggtgacccaggtgcctgatgcccaagctgtgaaacactttcgtgccggccgcgacagctacctgtgcctcagccgctacattggcgactccaagatcctgcgctgggagggtacccgcttctcggaggtgcaggccctgccctcccggggctcgctggccctgcagcccttccttgtgggtggccgccgctacctggcactgggcagtgatttctccttcacccagatctaccagtgggatgagggacgacagaagtttgtacggttccaggagctggctgtgcaggctcctcgggccttctgctacatgcctgctggggacgcccagctactcctggcccccagcttcaagggacagacgctggtgtatagacacattgtggtggatctcagtgcctagggggtgccgaggcctctggtctcctcagggtggccactggaggatgggtgggggcctctgtgagcaccacgtatgcctgtgtgaagacaagcgaccaacctgcattcatgcccttgtatccgcacacgcccagtgtgtacaggcgcaccccgtggactggcccaggaggacgtgcatcatcactgcaatcagcatgaacaccaggcacccctgggacacctaacgcccagttcccgtgaccccaactgcaggccccccctactctgcagcctttcccatgctctgccccctgtctcatgcacgagtggtgcggggtgctgggagcgaggggggccgcatcctcctgtccttgtgcttctccttctgcccctctggtctttcctgttggtgctccaggcattgtttacctgctcttgctccccgctgtagcccacagccatatctgtcatgcttccccggggccactcacccctgccccaccccgtctgcatgctcacatggacgcggacggacacactcattacacactcacacgccccgactgcacccggtgtccatctataaacatgtcagggcacgtgtgcatacaagcagattcagcactgcctaccaggctctcctgttaccttgcctctctgcttggagggggccccctctgctcacccccagcgtgccccccccggaactgataaggatgagaatggtggtgccagcttctgagggcctgcttggcctcctgggggcaaagcccctctgcccgaagcaataacaacagcagcagaagcaatcccggggagctgccaggggtgtctgtctctgttctccttggcgtttccttcatggccgtgaatcccagctcacccatggacagaagacctcccctcatctgaaagcctttctgccttccttcctgtagctgtcgctttctcaggcttggactgtcccctggttcaccctgtctttgggatgtggcccttgagctgggcgggctccttgggtggattagagagctggccgagctgcaagcacctgagttacctgcgagggtgcccagagtggagcttggcctgagggcgtgttgcagccctggccccaccagtccacagaggcccccaggagcactgcctttcagtggaccgggtggggcctggtgggaggggccccactagctgagcttctgctgccctctgctgtctgctgagatgccaggctagtggagagggcacaccatgtgcccaaatggtgtgatgctccttgtagcaggataccagggtactggggggcaatgctatgattaacttgcttcaaataaaaagttcccgccccataaccggc

SEQ ID NO: 18393 - protein, 548 aa, Homo sapiens; identical to SEQ ID NO: 2230

SEQ ID NO: 18394 - DNA, 1545 bp, Homo sapiens
actaatgcctaacaaagcagaacgactcacgctgggtcccagagctggccagtggaagcactgagacctccacatactgaaggcatggactattgaccgctgttggtattggtctcatcattgactatcattaagtgttggctgtttgcatgcttcctgcccagtggcaggttcaaagaagcccgcaggaagcgtgctcctttctttcccagggcccgcaattgggctggaagatagagcaacaaaaagcgcccatgtaactcatgggaacattcatgtgtgctgaatggcaggtgaaggtgccacagagaggctgaggatttcagagggcaccatgaactggagtgaggtcgcagagcaggtgccattggctcttggcctgtttgggtgggtggcattcagagaggtggaaggtcagatgcactgttcacgcctgtaatctcagcactttggaaggccaaggaacccaagaccttcacttggttggtgtgagcactccaggaggcaggcaccctccctcagccctcaagcaagcaaaaatgggtttaaaaaaagaaggagaagaagcagcagcagcagccgccacagagcttgtgacagctacagcctaagggcaacaggcaggggagaccaaggaccagaaagagcagaggctttttcaaagaaagagatccctctcccagcacccagcgatggcggcaaaccccacccacagtgcctgctaagaacaagtcccacgtgagaacaacatggccccccgagatgcccacagggaccccgagatgcctgcagtgcttggctctcccgctggccagctgcccacctggctcaggcccagtactcaccctggtcacacctgggagaggaggagaggagagcatagcacctgcagcaagatggatgtgggcagcaaagaggtcctgatggagagcccgccggactactccgcagctccccggggccgatttggcattccctgctgcccagtgcacctgaaacgccttcttatcgtggtggtggtggtggtcctcatcgtcgtggtgattgtgggagccctgctcatgggtctccacatgagccagaaacacacggagatggttctggagatgagcattggggcgccggaagcccagcaacgcctggccctgagtgagcacctggttaccactgccaccttctccatcggctccactggcctcgtggtgtatgactaccagcagctgctgatcgcctacaagccagcccctggcacctgctgctacatcatgaagatagctccagagagcatccccagtcttgaggctctcactagaaaagtccacaacttccagggtcagtggaagccccaacgggaaaggaaacgccccgggcaaagggtcttttgcagcttttgcagacgggcaagaagctgcttctgcccacaccgcagggacaagccctggagaaatgggagcttggggagaggatgggagtgggcagaggtggcgcccaggggcccgggaactcctgccacaacagaataaagcagcctgattgaaaagcaaa

SEQ ID NO: 18395 - protein, 257 aa, Homo sapiens
MAPRDAHRDPEMPAVLGSPAGQLPTWLRPSTHPGHTWERRRGEHSTCSKMDVGSKEVLMESPPDYSAAPRGRFGIPCCPVHLKRLLIVVVVVVLIVVVIVGALLMGLHMSQKHTEMVLEMSIGAPEAQQRLALSEHLVTTATFSIGSTGLVVYDYQQLLIAYKPAPGTCCYIMKIAPESIPSLEALTRKVHNFQGQWKPQRERKRPGQRVFCSFCRRARSCFCPHRRDKPWRNGSLGRGWEWAEVAPRGPGTPATTE

SEQ ID NO: 18396 - DNA, 1000 bp, Homo sapiens
cttatctgggcttcggttctggagggccaggaacaaacaggcttcaaagccaagggcttggctggcacacagggggcttggtccttcacctctgtcccctctccctacggacacatataagaccctggtcacacctgggagaggaggagaggagagcatagcacctgcagcaagatggatgtgggcagcaaagaggtcctgatggagagcccgccggactactccgcagctccccggggccgatttggcattccctgctgcccagtgcacctgaaacgccttcttatcgtggtggtggtggtggtcctcatcgtcgtggtgattgtgggagccctgctcatgggtctccacatgagccagaaacacacggagatggttctggagatgagcattggggcgccggaagcccagcaacgcctggccctgagtgagcacctggttaccactgccaccttctccatcggctccactggcctcgtggtgtatgactaccagcagctgctgatcgcctacaagccagcccctggcacctgctgctacatcatgaagatagctccagagagcatccccagtcttgaggctctcactagaaaagtccacaacttccagatggaatgctctctgcaggccaagcccgcagtgcctacgtctaagctgggccaggcagaggggcgagatgcaggctcagcaccctccggaggggacccggccttcctgggcatggccgtgagcaccctgtgtggcgaggtgccgctctactacatctaggacgcctccggtgagcagggtcagtggaagccccaacgggaaaggaaacgccccgggcaaagggtcttttgcagcttttgcagacgggcaagaagctgcttctgcccacaccgcagggacaagccctggagaaatgggagcttggggagaggatgggagtgggcagaggtggcgcccaggggcccgggaactcctgccacaacagaataaagcagcctgattgaaaagcaaa

SEQ ID NO: 18397 - protein, 197 aa, Homo sapiens [sequence omitted]

SEQ ID NO: 18398 - DNA, 519 bp, Homo sapiens
ggagaggagagcatagcacctgcagcaagatggatgtgggcagcaaagaggtcctgatggagagcccgccggttctggagatgagcattggggcgccggaagcccagcaacgcctggccctgagtgagcacctggttaccactgccaccttctccatcggctccactggcctcgtggtgtatgactaccagcagctgctgatcgcctacaagccagcccctggcacctgctgctacatcatgaagatagctccagagagcatccccagtcttgaggctctcactagaaaagtccacaacttccagggtcagtggaagccccaacgggaaaggaaacgccccgggcaaagggtcttttgcagcttttgcagacgggcaagaagctgcttctgcccacaccgcagggacaagccctggagaaatgggagcttggggagaggatgggagtgggcagaggtggcgcccaggggcccgggaactcctgccacaacagaataaagcagcctgattgaaaagcaaa

SEQ ID NO: 18399 - protein, 155 aa, Homo sapiens
MDVGSKEVLMESPPVLEMSIGAPEAQQRLALSEHLVTTATFSIGSTGLVVYDYQQLLIAYKPAPGTCCYIMKIAPESIPSLEALTRKVHNFQGQWKPQRERKRPGQRVFCSFCRRARSCFCPHRRDKPWRNGSLGRGWEWAEVAPRGPGTPATTE

SEQ ID NO: 18400 - DNA, 689 bp, Homo sapiens
agagcatagcacctgcagcaagatggatgtgggcagcaaagaggtcctgatggagagcccgccggttctggagatgagcattggggcgccggaagcccagcaacgcctggccctgagtgagcacctggttaccactgccaccttctccatcggctccactggcctcgtggtgtatgactaccagcagctgctgatcgcctacaagccagcccctggcacctgctgctacatcatgaagatagctccagagagcatccccagtcttgaggctctcactagaaaagtccacaacttccagatggaatgctctctgcaggccaagcccgcagtgcctacgtctaagctgggccaggcagaggggcgagatgcaggctcagcaccctccggaggggacccggccttcctgggcatggccgtgagcaccctgtgtggcgaggtgccgctctactacatctaggacgcctccggtgagcagggtcagtggaagccccaacgggaaaggaaacgccccgggcaaagggtcttttgcagcttttgcagacgggcaagaagctgcttctgcccacaccgcagggacaagccctggagaaatgggagcttggggagaggatgggagtgggcagaggtggcgcccaggggcccgggaactcctgccacaacagaataaagcagcctgattgaaaagcaaa

SEQ ID NO: 18401 - protein, 144 aa, Homo sapiens
MDVGSKEVLMESPPVLEMSIGAPEAQQRLALSEHLVTTATFSIGSTGLVVYDYQQLLIAYKPAPGTCCYIMKIAPESIPSLEALTRKVHNFQMECSLQAKPAVPTSKLGQAEGRDAGSAPSGGDPAFLGMAVSTLCGEVPLYYI

SEQ ID NO: 18402 - DNA, 517 bp, Homo sapiens
agatggatgtgggcagcaaagaggtcctgatggagagcccgccggttctggagatgagcattggggcgccggaagcccagcaacgcctggccctgagtgagcacctggttaccactgccaccttctccatcggctccactggcctcgtggtgtatgactaccagcagctgctgatcgcctacaagccagcccctggcacctgctgctacatcatgaagatagctccagagagcatccccagtcttgagcaccctgtgtggcgaggtgccgctctactacatctaggacgcctccggtgagcagggtcagtggaagccccaacgggaaaggaaacgccccgggcaaagggtcttttgcagcttttgcagacgggcaagaagctgcttctgcccacaccgcagggacaagccctggagaaatgggagcttggggagaggatgggagtgggcagaggtggcgcccaggggcccgggaactcctgccacaacagaataaagcagcctgattgaaaagcaaa

SEQ ID NO: 18403 - protein, 98 aa, Homo sapiens
MDVGSKEVLMESPPVLEMSIGAPEAQQRLALSEHLVTTATFSIGSTGLVVYDYQQLLIAYKPAPGTCCYIMKIAPESIPSLEHPVWRGAALLHLGRLR

SEQ ID NO: 18404 - DNA, 871 bp, Homo sapiens
gatggatgtgggcagcaaagaggtcctgatggagagcccgccggactactccgcagctccccggggccgatttggcattccctgctgcccagtgcacctgaaacgccttcttatcgtggtggtggtggtggtcctcatcgtcgtggtgtatgactaccagcagctgctgatcgcctacaagccagcccctggcacctgctgctacatcatgaagatagctccagagagcatccccagtcttgaggctctcactagaaaagtccacaacttccagatggaatgctctctgcaggccaagcccgcagtgcctacgtctaagctgggccaggcagaggggcgagatgcaggctcagcaccctccggaggggacccggccttcctgggcatggccgtgagcaccctgtgtggcgaggtgccgctctactacatctaggacgcctccggtgagcaggtgtgatcccagggcccctgatcagcagcggaggagcgctcgggccacctgcccgggctgtggaggagcgctcgcgctgaccaggcgctggggcgtccactgaagcggggtcatccaggcaactcgggggaggggaagctcacagaccggtacttcccactcccctgattctctctgtccatcctcaacattcctttgcttcacagggtcagtggaagccccaacgggaaaggaaacgccccgggcaaagggtcttttgcagcttttgcagacgggcaagaagctgcttctgcccacaccgcagggacaagccctggagaaatgggagcttggggagaggatgggagtgggcagaggtggcgcccaggggcccgggaactcctgccacaacagaataaagcagcctgattgaaaagcaaa

SEQ ID NO: 18405 - protein, 143 aa, Homo sapiens
MDVGSKEVLMESPPDYSAAPRGRFGIPCCPVHLKRLLIVVVVVVLIVVVYDYQQLLIAYKPAPGTCCYIMKIAPESIPSLEALTRKVHNFQMECSLQAKPAVPTSKLGQAEGRDAGSAPSGGDPAFLGMAVSTLCGEVPLYYI

SEQ ID NO: 18406 - DNA, 518 bp, Homo sapiens
gtatgactaccagcagctgctgatcgcctacaagccagcccctggcacctgctgctacatcatgaagatagctccagagagcatccccagtcttgaggctctcactagaaaagtccacaacttccagatggaatgctctctgcaggccaagcccgcagtgcctacgtctaagctgggccaggcagaggggcgagatgcaggctcagcaccctccggaggggacccggccttcctgggcatggccgtgagcaccctgtgtggcgaggtgccgctctactacatctaggacgcctccggtgagcagggtcagtggaagccccaacgggaaaggaaacgccccgggcaaagggtcttttgcagcttttgcagacgggcaagaagctgcttctgcccacaccgcagggacaagccctggagaaatgggagcttggggagaggatgggagtgggcagaggtggcgcccaggggcccgggaactcctgccacaacagaataaagcagcctgattgaaaagcaaa

SEQ ID NO: 18407 - protein, 74 aa, Homo sapiens
MKIAPESIPSLEALTRKVHNFQMECSLQAKPAVPTSKLGQAEGRDAGSAPSGGDPAFLGMAVSTLCGEVPLYYI

SEQ ID NO: 18408 - DNA, 3636 bp, Homo sapiens
agcgagggtccaagaaggggagatagggagacgcgggcggagagaccgacccgaggcgggggcgcggggcaggggcggcgcgaggacctgacagcgtgtcccgcggcggggcgggggctcggccgcgcgcccgcgggggaggccgccgctagagggcacttcaggagggacagccctcccggcaccccggggcccgagctccagccccggcctcgcggcccgcggcccgcggcccgggcggcccgagccccctccccgggcgcgcggctctccgccttccccgccccggctggcgcgcggcccggcccggccgagcactgtcccggccccgaggggggcagagctcgggcgaaaacccgccctccagcgagctcatttccctaaaaaggggggggggagtcggagggagggagggagggagagaaagaaagagagaaaaagaaggaaagggagagggagacggctggagcccgaggacgagcgcggagccgcggaccgagcggggggcgggagacaggaaggagggaggcgagcagagggaaggggaagaggtcggggagcgagggcgggagcggtcgcggtcgcgatcgagcaagcaagcgggcgagaggacgccctcccctggcctccagtgcgccgcttccctcgccgccgccccgccagcatgcccggcgtggcccgcctgccgctgctgctcgggctgctgctgctcccgcgtcccggccggccgctggacttggccgactacacctatgacctggcggaggaggacgactcggagcccctcaactacaaagacccctgcaaggcggctgcctttcttggggacattgccctggacgaagaggacctgagggccttccaggtacagcaggctgtggatctcagacggcacacagctcgtaagtcctccatcaaagctgcagttccaggaaacacttctacccccagctgccagagcaccaacgggcagcctcagaggggagcctgtgggagatggagaggtagatcccgtagccggcgggcggcgacgtcccgaccagagcgtgtgtggcccgatggggtcatcccctttgtcattgggggaaacttcactggtagccagagggcagtcttccggcaggccatgaggcactgggagaagcacacctgtgtcaccttcctggagcgcactgacgaggacagctatattgtgttcacctatcgaccttgcgggtgctgctcctacgtgggtcgccgcggcgggggcccccaggccatctccatcggcaagaactgtgacaagttcggcattgtggtccacgagctgggccacgtcgtcggcttctggcacgaacacactcggccagaccgggaccgccacgtttccatcgttcgtgagaacatccagccagggcaggagtataacttcctgaagatggagcctcaggaggtggagtccctgggggagacctatgacttcgacagcatcatgcattacgctcggaacacattctccaggggcatcttcctggataccattgtccccaagtatgaggtgaacggggtgaaacctcccattggccaaaggacacggctcagcaagggggacattgcccaagcccgcaagctttacaagtgcccagcctgtggagagaccctgcaagacagcacaggcaacttctcctcccctgaataccccaatggctactctgctcacatgcactgcgtgtggcgcatctctgtcacacccggggagaagatcatcctgaacttcacgtccctggacctgtaccgcagccgcctgtgctggtacgactatgtggaggtccgagatggcttctggaggaaggcgcccctccgaggccgcttctgcgggtccaaactccctgagcctatcgtctccactgacagccgcctctgggttgaattccgcagcagcagcaattgggttggaaagggcttctttgcagtctacgaagccatctgcgggggtgatgtgaaaaaggactatggccacattcaatcgcccaactacccagacgattaccggcccagcaaagtctgcatctggcggatccaggtgtctgagggcttccacgtgggcctcacattccagtcctttgagattgagcgccacgacagctgtgcctacgactatctggaggtgcgcgacgggcacagtgagagcagcaccctcatcgggcgctactgtggctatgagaagcctgatgacatcaagagcacgtccagccgcctctggctcaagttcgtctctgacgggtccattaacaaagcgggctttgccgtcaactttttcaaagaggtggacgagtgctctcggcccaaccgcgggggctgtgagcagcggtgcctcaacaccctgggcagctacaagtgcagctgtgaccccgggtacgagctggccccagacaagcgccgctgtgaggggtgttatgatctacaggttgggaaacccctgttgtgggacagacactgtttccgcctctccacgcatggtcccgagatgctggggacagcactccgaggctaatggctccagctcactaggccgatcctgctgtgcccccgagctgctccctttcctgcacctcccaggaccgcccctccctgaactgctttccctgagccccttattcccgctcactccctcttggaggaccttggcctgttcatttgcagagaagatagaaatggccacacttatgaccccttagctcccccactcctccctacaggcccacccctgaggacacccaggccaccctgcctcctcccgtccgccccagagggaccagacacaggtccctgagccttggggagtccacaggctccccatcttctccttactgcatcccagcccacatctcagcccttccccatggcaggggctccccgcagacgatgccaccttccttgtccccgcagctgcttgtggcggattcctcaccaagctcaacggctccatcaccagcccgggctggcccaaggagtacccccccaacaagaactgcatctggcagctggtggcccccacccagtaccgcatctccctgcagtttgacttctttgagacagagggcaatgatgtgtgcaagtacgacttcgtggaggtgcgcagtggactcacagctgactccaagctgcatggcaagttctgtggttctgagaagcccgaggtcatcacctcccagtacaacaacatgcgcgtggagttcaagtccgacaacaccgtgtccaaaaagggcttcaaggcccacttcttctcagaaaagaggccagctctgcagccccctcggggacgcccccaccagctcaaattccgagtgcagaaaagaaaccggaccccccagtgaggcctgccaggcctcccggaccccttgttactcaggaacctcaccttggacggaatgggatgggggcttcggtgcccaccaaccccccacctccactctgccattccggcccacctccctctggccggacagaactggtgctctcttctccccactgtgcccgtccgcggaccggggacccttccccgtgccctaccccctcccattttgatggtgtctgtgacatttcctgttgtgaagtaaaagagggacccctgcgtcctgctcctttctcttgcag

SEQ ID NO: 18409 - protein, 622 aa, Homo sapiens
MPGVARLPLLLGLLLLPRPGRPLDLADYTYDLAEEDDSEPLNYKDPCKAAAFLGDIALDEEDLRAFQVQQAVDLRRHTARKSSIKAAVPGNTSTPSCQSTNGQPQRGACGRWRGRSRSRRAATSRPERVWPDGVIPFVIGGNFTGSQRAVFRQAMRHWEKHTCVTFLERTDEDSYIVFTYRPCGCCSYVGRRGGGPQAISIGKNCDKFGIVVHELGHVVGFWHEHTRPDRDRHVSIVRENIQPGQEYNFLKMEPQEVESLGETYDFDSIMHYARNTFSRGIFLDTIVPKYEVNGVKPPIGQRTRLSKGDIAQARKLYKCPACGETLQDSTGNFSSPEYPNGYSAHMHCVWRISVTPGEKIILNFTSLDLYRSRLCWYDYVEVRDGFWRKAPLRGRFCGSKLPEPIVSTDSRLWVEFRSSSNWVGKGFFAVYEAICGGDVKKDYGHIQSPNYPDDYRPSKVCIWRIQVSEGFHVGLTFQSFEIERHDSCAYDYLEVRDGHSESSTLIGRYCGYEKPDDIKSTSSRLWLKFVSDGSINKAGFAVNFFKEVDECSRPNRGGCEQRCLNTLGSYKCSCDPGYELAPDKRRCEGCYDLQVGKPLLWDRHCFRLSTHGPEMLGTALRG

SEQ ID NO: 18410 - DNA, 3503 bp, Homo sapiens
agcgagggtccaagaaggggagatagggagacgcgggcggagagaccgacccgaggcgggggcgcggggcaggggcggcgcgaggacctgacagcgtgtcccgcggcggggcgggggctcggccgcgcgcccgcgggggaggccgccgctagagggcacttcaggagggacagccctcccggcaccccggggcccgagctccagccccggcctcgcggcccgcggcccgcggcccgggcggcccgagccccctccccgggcgcgcggctctccgccttccccgccccggctggcgcgcggcccggcccggccgagcactgtcccggccccgaggggggcagagctcgggcgaaaacccgccctccagcgagctcatttccctaaaaaggggggggggagtcggagggagggagggagggagagaaagaaagagagaaaaagaaggaaagggagagggagacggctggagcccgaggacgagcgcggagccgcggaccgagcggggggcgggagacaggaaggagggaggcgagcagagggaaggggaagaggtcggggagcgagggcgggagcggtcgcggtcgcgatcgagcaagcaagcgggcgagaggacgccctcccctggcctccagtgcgccgcttccctcgccgccgccccgccagcatgcccggcgtggcccgcctgccgctgctgctcgggctgctgctgctcccgcgtcccggccggccgctggacttggccgactacacctatgacctggcggaggaggacgactcggagcccctcaactacaaagacccctgcaaggcggctgcctttcttggggacattgccctggacgaagaggacctgagggccttccaggtacagcaggctgtggatctcagacggcacacagctcgtaagtcctccatcaaagctgcagttccaggaaacacttctacccccagctgccagagcaccaacgggcagcctcagaggggagcctgtgggagatggagaggtagatcccgtagccggcgggcggcgacgtcccgaccagagcgtgtgtggcccgatggggtcatcccctttgtcattgggggaaacttcactggtagccagagggcagtcttccggcaggccatgaggcactgggagaagcacacctgtgtcaccttcctggagcgcactgacgaggacagctatattgtgttcacctatcgaccttgcgggtgctgctcctacgtgggtcgccgcggcgggggcccccaggccatctccatcggcaagaactgtgacaagttcggcattgtggtccacgagctgggccacgtcgtcggcttctggcacgaacacactcggccagaccgggaccgccacgtttccatcgttcgtgagaacatccagccagggcaggagtataacttcctgaagatggagcctcaggaggtggagtccctgggggagacctatgacttcgacagcatcatgcattacgctcggaacacattctccaggggcatcttcctggataccattgtccccaagtatgaggtgaacggggtgaaacctcccattggccaaaggacacggctcagcaagggggacattgcccaagcccgcaagctttacaagtgcccagcctgtggagagaccctgcaagacagcacaggcaacttctcctcccctgaataccccaatggctactctgctcacatgcactgcgtgtggcgcatctctgtcacacccggggagaagatcatcctgaacttcacgtccctggacctgtaccgcagccgcctgtgctggtacgactatgtggaggtccgagatggcttctggaggaaggcgcccctccgaggccgcttctgcgggtccaaactccctgagcctatcgtctccactgacagccgcctctgggttgaattccgcagcagcagcaattgggttggaaagggcttctttgcagtctacgaagccatctgcgggggtgatgtgaaaaaggactatggccacattcaatcgcccaactacccagacgattaccggcccagcaaagtctgcatctggcggatccaggtgtctgagggcttccacgtgggcctcacattccagtcctttgagattgagcgccacgacagctgtgcctacgactatctggaggtgcgcgacgggcacagtgagagcagcaccctcatcgggcgctactgtggctatgagaagcctgatgacatcaagagcacgtccagccgcctctggctcaagttcgtctctgacgggtccattaacaaagcgggctttgccgtcaactttttcaaagaggtggacgagtgctctcggcccaaccgcgggggctgtgagcagcggtgcctcaacaccctgggcagctacaagtgcagctgtgaccccgggtacgagctggccccagacaagcgccgctgtgaggctgcttgtggcggattcctcaccaagctcaacggctccatcaccagcccgggctggcccaaggagtacccccccaacaagaactgcatctggcagctggtggcccccacccagtaccgcatctccctgcagtttgacttctttgagacagagggcaatgatgtgtgcaagtacgacttcgtggaggtgcgcagtggactcacagctgactccaagctgcatggcaagttctgtggttctgagaagcccgaggtcatcacctcccagtacaacaacatgcgcgtggagttcaagtccgacaacaccgtgtccaaaaagggcttcaaggcccacttcttctcagtcttggagggggcaggggaccgacactcacatctatcaggcctggagttactgctctgcccccatgccctggtcgacactgtgcccgccccaccctcagccctgcacggagacacacacgcccacacgcacacacatgtgcacacacattgccccatcgcacaagaaacctgcagaggacccccactgggggcatcgaggctcagccctcagggcccggggcatctgactctggccccccaggaggggagctatttggacttttgggacacccaccgaggagaccctaagccaagaaggagaagaaagagcctgaagaccttcagtctgacccctgccaccttccggggcatttgggcactgtaggaaaagaggccagctctgcagccccctcggggacgcccccaccagctcaaattccgagtgcagaaaagaaaccggaccccccagtgaggcctgccaggcctcccggaccccttgttactcaggaacctcaccttggacggaatgggatgggggcttcggtgcccaccaaccccccacctccactctgccattccggcccacctccctctggccggacagaactggtgctctcttctccccactgtgcccgtccgcggaccggggacccttccccgtgccctaccccctcccattttgatggtgtctgtgacatttcctgttgtgaagtaaaagagggacccctgcgtcctgctcctttctcttgcag

SEQ ID NO: 18411 - protein, 823 aa, Homo sapiens; identical to SEQ ID NO: 2236

SEQ ID NO: 18412 - DNA, 3303 bp, Homo sapiens
agcgagggtccaagaaggggagatagggagacgcgggcggagagaccgacccgaggcgggggcgcggggcaggggcggcgcgaggacctgacagcgtgtcccgcggcggggcgggggctcggccgcgcgcccgcgggggaggccgccgctagagggcacttcaggagggacagccctcccggcaccccggggcccgagctccagccccggcctcgcggcccgcggcccgcggcccgggcggcccgagccccctccccgggcgcgcggctctccgccttccccgccccggctggcgcgcggcccggcccggccgagcactgtcccggccccgaggggggcagagctcgggcgaaaacccgccctccagcgagctcatttccctaaaaaggggggggggagtcggagggagggagggagggagagaaagaaagagagaaaaagaaggaaagggagagggagacggctggagcccgaggacgagcgcggagccgcggaccgagcggggggcgggagacaggaaggagggaggcgagcagagggaaggggaagaggtcggggagcgagggcgggagcggtcgcggtcgcgatcgagcaagcaagcgggcgagaggacgccctcccctggcctccagtgcgccgcttccctcgccgccgccccgccagcatgcccggcgtggcccgcctgccgctgctgctcgggctgctgctgctcccgcgtcccggccggccgctggacttggccgactacacctatgacctggcggaggaggacgactcggagcccctcaactacaaagacccctgcaaggcggctgcctttcttggggacattgccctggacgaagaggacctgagggccttccaggtacagcaggctgtggatctcagacggcacacagctcgtaagtcctccatcaaagctgcagttccaggaaacacttctacccccagctgccagagcaccaacgggcagcctcagaggggagcctgtgggagatggagaggtagatcccgtagccggcgggcggcgacgtcccgaccagagcgtgtgtggcccgatggggtcatcccctttgtcattgggggaaacttcactggtagccagagggcagtcttccggcaggccatgaggcactgggagaagcacacctgtgtcaccttcctggagcgcactgacgaggacagctatattgtgttcacctatcgaccttgcgggtgctgctcctacgtgggtcgccgcggcgggggcccccaggccatctccatcggcaagaactgtgacaagttcggcattgtggtccacgagctgggccacgtcgtcggcttctggcacgaacacactcggccagaccgggaccgccacgtttccatcgttcgtgagaacatccagccaggcgttctccactcttcactgctccttctcagctgtggctctagaaatggtgcttccttcccatgttcccttgagtcctccattcaccaggccctctgctggacaggactcttcctgagaccctccccattccccaggctccccttggctgctccccggaccctcagggcaggagtataacttcctgaagatggagcctcaggaggtggagtccctgggggagacctatgacttcgacagcatcatgcattacgctcggaacacattctccaggggcatcttcctggataccattgtccccaagtatgaggtgaacggggtgaaacctcccattggccaaaggacacggctcagcaagggggacattgcccaagcccgcaagctttacaagtgcccagcctgtggagagaccctgcaagacagcacaggcaacttctcctcccctgaataccccaatggctactctgctcacatgcactgcgtgtggcgcatctctgtcacacccggggagaagatcatcctgaacttcacgtccctggacctgtaccgcagccgcctgtgctggtacgactatgtggaggtccgagatggcttctggaggaaggcgcccctccgaggccgcttctgcgggtccaaactccctgagcctatcgtctccactgacagccgcctctgggttgaattccgcagcagcagcaattgggttggaaagggcttctttgcagtctacgaagccatctgcgggggtgatgtgaaaaaggactatggccacattcaatcgcccaactacccagacgattaccggcccagcaaagtctgcatctggcggatccaggtgtctgagggcttccacgtgggcctcacattccagtcctttgagattgagcgccacgacagctgtgcctacgactatctggaggtgcgcgacgggcacagtgagagcagcaccctcatcgggcgctactgtggctatgagaagcctgatgacatcaagagcacgtccagccgcctctggctcaagttcgtctctgacgggtccattaacaaagcgggctttgccgtcaactttttcaaagaggtggacgagtgctctcggcccaaccgcgggggctgtgagcagcggtgcctcaacaccctgggcagctacaagtgcagctgtgaccccgggtacgagctggccccagacaagcgccgctgtgaggctgcttgtggcggattcctcaccaagctcaacggctccatcaccagcccgggctggcccaaggagtacccccccaacaagaactgcatctggcagctggtggcccccacccagtaccgcatctccctgcagtttgacttctttgagacagagggcaatgatgtgtgcaagtacgacttcgtggaggtgcgcagtggactcacagctgactccaagctgcatggcaagttctgtggttctgagaagcccgaggtcatcacctcccagtacaacaacatgcgcgtggagttcaagtccgacaacaccgtgtccaaaaagggcttcaaggcccacttcttctcagaaaagaggccagctctgcagccccctcggggacgcccccaccagctcaaattccgagtgcagaaaagaaaccggaccccccagtgaggcctgccaggcctcccggaccccttgttactcaggaacctcaccttggacggaatgggatgggggcttcggtgcccaccaaccccccacctccactctgccattccggcccacctccctctggccggacagaactggtgctctcttctccccactgtgcccgtccgcggaccggggacccttccccgtgccctaccccctcccattttgatggtgtctgtgacatttcctgttgtgaagtaaaagagggacccctgcgtcctgctcctttctcttgcag

SEQ ID NO: 18413 - protein, 479 aa, Homo sapiens
MEPQEVESLGETYDFDSIMHYARNTFSRGIFLDTIVPKYEVNGVKPPIGQRTRLSKGDIAQARKLYKCPACGETLQDSTGNFSSPEYPNGYSAHMHCVWRISVTPGEKIILNFTSLDLYRSRLCWYDYVEVRDGFWRKAPLRGRFCGSKLPEPIVSTDSRLWVEFRSSSNWVGKGFFAVYEAICGGDVKKDYGHIQSPNYPDDYRPSKVCIWRIQVSEGFHVGLTFQSFEIERHDSCAYDYLEVRDGHSESSTLIGRYCGYEKPDDIKSTSSRLWLKFVSDGSINKAGFAVNFFKEVDECSRPNRGGCEQRCLNTLGSYKCSCDPGYELAPDKRRCEAACGGFLTKLNGSITSPGWPKEYPPNKNCIWQLVAPTQYRISLQFDFFETEGNDVCKYDFVEVRSGLTADSKLHGKFCGSEKPEVITSQYNNMRVEFKSDNTVSKKGFKAHFFSEKRPALQPPRGRPHQLKFRVQKRNRTPQ

SEQ ID NO: 18414 - DNA, 3174 bp, Homo sapiens
agcgagggtccaagaaggggagatagggagacgcgggcggagagaccgacccgaggcgggggcgcggggcaggggcggcgcgaggacctgacagcgtgtcccgcggcggggcgggggctcggccgcgcgcccgcgggggaggccgccgctagagggcacttcaggagggacagccctcccggcaccccggggcccgagctccagccccggcctcgcggcccgcggcccgcggcccgggcggcccgagccccctccccgggcgcgcggctctccgccttccccgccccggctggcgcgcggcccggcccggccgagcactgtcccggccccgaggggggcagagctcgggcgaaaacccgccctccagcgagctcatttccctaaaaaggggggggggagtcggagggagggagggagggagagaaagaaagagagaaaaagaaggaaagggagagggagacggctggagcccgaggacgagcgcggagccgcggaccgagcggggggcgggagacaggaaggagggaggcgagcagagggaaggggaagaggtcggggagcgagggcgggagcggtcgcggtcgcgatcgagcaagcaagcgggcgagaggacgccctcccctggcctccagtgcgccgcttccctcgccgccgccccgccagcatgcccggcgtggcccgcctgccgctgctgctcgggctgctgctgctcccgcgtcccggccggccgctggacttggccgactacacctatgacctggcggaggaggacgactcggagcccctcaactacaaagacccctgcaaggcggctgcctttcttggggacattgccctggacgaagaggacctgagggccttccaggtacagcaggctgtggatctcagacggcacacagctcgtaagtcctccatcaaagctgcagttccaggaaacacttctacccccagctgccagagcaccaacgggcagcctcagaggggagcctgtgggagatggagaggtagatcccgtagccggcgggcggcgacgtcccgaccagagcgtgtgtggcccgatggggtcatcccctttgtcattgggggaaacttcactggtagccagagggcagtcttccggcaggccatgaggcactgggagaagcacacctgtgtcaccttcctggagcgcactgacgaggacagctatattgtgttcacctatcgaccttgcggctcgggaccgcccccctgagctggccccgccctccaggtgctgctcctacgtgggtcgccgcggcgggggcccccaggccatctccatcggcaagaactgtgacaagttcggcattgtggtccacgagctgggccacgtcgtcggcttctggcacgaacacactcggccagaccgggaccgccacgtttccatcgttcgtgagaacatccagccagggcaggagtataacttcctgaagatggagcctcaggaggtggagtccctgggggagacctatgacttcgacagcatcatgcattacgctcggaacacattctccaggggcatcttcctggataccattgtccccaagtatgaggtgaacggggtgaaacctcccattggccaaaggacacggctcagcaagggggacattgcccaagcccgcaagctttacaagtgcccagcctgtggagagaccctgcaagacagcacaggcaacttctcctcccctgaataccccaatggctactctgctcacatgcactgcgtgtggcgcatctctgtcacacccggggagaagatcatcctgaacttcacgtccctggacctgtaccgcagccgcctgtgctggtacgactatgtggaggtccgagatggcttctggaggaaggcgcccctccgaggccgcttctgcgggtccaaactccctgagcctatcgtctccactgacagccgcctctgggttgaattccgcagcagcagcaattgggttggaaagggcttctttgcagtctacgaagccatctgcgggggtgatgtgaaaaaggactatggccacattcaatcgcccaactacccagacgattaccggcccagcaaagtctgcatctggcggatccaggtgtctgagggcttccacgtgggcctcacattccagtcctttgagattgagcgccacgacagctgtgcctacgactatctggaggtgcgcgacgggcacagtgagagcagcaccctcatcgggcgctactgtggctatgagaagcctgatgacatcaagagcacgtccagccgcctctggctcaagttcgtctctgacgggtccattaacaaagcgggctttgccgtcaactttttcaaagaggtggacgagtgctctcggcccaaccgcgggggctgtgagcagcggtgcctcaacaccctgggcagctacaagtgcagctgtgaccccgggtacgagctggccccagacaagcgccgctgtgaggctgcttgtggcggattcctcaccaagctcaacggctccatcaccagcccgggctggcccaaggagtacccccccaacaagaactgcatctggcagctggtggcccccacccagtaccgcatctccctgcagtttgacttctttgagacagagggcaatgatgtgtgcaagtacgacttcgtggaggtgcgcagtggactcacagctgactccaagctgcatggcaagttctgtggttctgagaagcccgaggtcatcacctcccagtacaacaacatgcgcgtggagttcaagtccgacaacaccgtgtccaaaaagggcttcaaggcccacttcttctcagaaaagaggccagctctgcagccccctcggggacgcccccaccagctcaaattccgagtgcagaaaagaaaccggaccccccagtgaggcctgccaggcctcccggaccccttgttactcaggaacctcaccttggacggaatgggatgggggcttcggtgcccaccaaccccccacctccactctgccattccggcccacctccctctggccggacagaactggtgctctcttctccccactgtgcccgtccgcggaccggggacccttccccgtgccctaccccctcccattttgatggtgtctgtgacatttcctgttgtgaagtaaaagagggacccctgcgtcctgctcctttctcttgcag

SEQ ID NO: 18415 - protein, 479 aa, Homo sapiens; identical to SEQ ID NO: 18413

SEQ ID NO: 18416 - DNA, 3404 bp, Homo sapiens
agcgagggtccaagaaggggagatagggagacgcgggcggagagaccgacccgaggcgggggcgcggggcaggggcggcgcgaggacctgacagcgtgtcccgcggcggggcgggggctcggccgcgcgcccgcgggggaggccgccgctagagggcacttcaggagggacagccctcccggcaccccggggcccgagctccagccccggcctcgcggcccgcggcccgcggcccgggcggcccgagccccctccccgggcgcgcggctctccgccttccccgccccggctggcgcgcggcccggcccggccgagcactgtcccggccccgaggggggcagagctcgggcgaaaacccgccctccagcgagctcatttccctaaaaaggggggggggagtcggagggagggagggagggagagaaagaaagagagaaaaagaaggaaagggagagggagacggctggagcccgaggacgagcgcggagccgcggaccgagcggggggcgggagacaggaaggagggaggcgagcagagggaaggggaagaggtcggggagcgagggcgggagcggtcgcggtcgcgatcgagcaagcaagcgggcgagaggacgccctcccctggcctccagtgcgccgcttccctcgccgccgccccgccagcatgcccggcgtggcccgcctgccgctgctgctcgggctgctgctgctcccgcgtcccggccggccgctggacttggccgactacacctatgacctggcggaggaggacgactcggagcccctcaactacaaagacccctgcaaggcggctgcctttcttggggacattgccctggacgaagaggacctgagggccttccaggtacagcaggctgtggatctcagacggcacacagctcgtaagtcctccatcaaagctgcagttccaggaaacacttctacccccagctgccagagcaccaacgggcagcctcagaggggagcctgtgggagatggagaggtagatcccgtagccggcgggcggcgacgtcccgaccagagcgtgtgtggcccgatggggtcatcccctttgtcattgggggaaacttcactggtagccagagggcagtcttccggcaggccatgaggcactgggagaagcacacctgtgtcaccttcctggagcgcactgacgaggacagctatattgtgttcacctatcgaccttgcgggtgctgctcctacgtgggtcgccgcggcgggggcccccaggccatctccatcggcaagaactgtgacaagttcggcattgtggtccacgagctgggccacgtcgtcggcttctggcacgaacacactcggccagaccgggaccgccacgtttccatcgttcgtgagaacatccagccaggcgttctccactcttcactgctccttctcagctgtggctctagaaatggtgcttccttcccatgttcccttgagtcctccattcaccaggccctctgctggacaggactcttcctgagaccctccccattccccaggctccccttggctgctccccggaccctcagggcaggagtataacttcctgaagatggagcctcaggaggtggagtccctgggggagacctatgacttcgacagcatcatgcattacgctcggaacacattctccaggggcatcttcctggataccattgtccccaagtatgaggtgaacggggtgaaacctcccattggccaaaggacacggctcagcaagggggacattgcccaagcccgcaagctttacaagtgcccagcctgtggagagaccctgcaagacagcacaggcaacttctcctcccctgaataccccaatggctactctgctcacatgcactgcgtgtggcgcatctctgtcacacccggggagaagatcatcctgaacttcacgtccctggacctgtaccgcagccgcctgtgctggtacgactatgtggaggtccgagatggcttctggaggaaggcgcccctccgagggcccaacactggccagggatgacaacctggtatgggagccaggagtcctggcatcattagtcccagatagctgcattactcacttgctgcgagacttcaggccgcttctgcgggtccaaactccctgagcctatcgtctccactgacagccgcctctgggttgaattccgcagcagcagcaattgggttggaaagggcttctttgcagtctacgaagccatctgcgggggtgatgtgaaaaaggactatggccacattcaatcgcccaactacccagacgattaccggcccagcaaagtctgcatctggcggatccaggtgtctgagggcttccacgtgggcctcacattccagtcctttgagattgagcgccacgacagctgtgcctacgactatctggaggtgcgcgacgggcacagtgagagcagcaccctcatcgggcgctactgtggctatgagaagcctgatgacatcaagagcacgtccagccgcctctggctcaagttcgtctctgacgggtccattaacaaagcgggctttgccgtcaactttttcaaagaggtggacgagtgctctcggcccaaccgcgggggctgtgagcagcggtgcctcaacaccctgggcagctacaagtgcagctgtgaccccgggtacgagctggccccagacaagcgccgctgtgaggctgcttgtggcggattcctcaccaagctcaacggctccatcaccagcccgggctggcccaaggagtacccccccaacaagaactgcatctggcagctggtggcccccacccagtaccgcatctccctgcagtttgacttctttgagacagagggcaatgatgtgtgcaagtacgacttcgtggaggtgcgcagtggactcacagctgactccaagctgcatggcaagttctgtggttctgagaagcccgaggtcatcacctcccagtacaacaacatgcgcgtggagttcaagtccgacaacaccgtgtccaaaaagggcttcaaggcccacttcttctcagaaaagaggccagctctgcagccccctcggggacgcccccaccagctcaaattccgagtgcagaaaagaaaccggaccccccagtgaggcctgccaggcctcccggaccccttgttactcaggaacctcaccttggacggaatgggatgggggcttcggtgcccaccaaccccccacctccactctgccattccggcccacctccctctggccggacagaactggtgctctcttctccccactgtgcccgtccgcggaccggggacccttccccgtgccctaccccctcccattttgatggtgtctgtgacatttcctgttgtgaagtaaaagagggacccctgcgtcctgctcctttctcttgcag

SEQ ID NO: 18417 - protein, 358 aa, Homo sapiens
MATFNRPTTQTITGPAKSASGGSRCLRASTWASHSSPLRLSATTAVPTTIWRCATGTVRAAPSSGATVAMRSLMTSRARPAASGSSSSLTGPLTKRALPSTFSKRWTSALGPTAGAVSSGASTPWAATSAAVTPGTSWPQTSAAVRLLVADSSPSSTAPSPARAGPRSTPPTRTASGSWWPPPSTASPCSLTSLRQRAMMCASTTSWRCAVDSQLTPSCMASSVVLRSPRSSPPSTTTCAWSSSPTTPCPKRASRPTSSQKRGQLCSPLGDAPTSSNSECRKETGPPSEACQASRTPCYSGTSPWTEWDGGFGAHQPPTSTLPFRPTSLWPDRTGALFSPLCPSADRGPFPVPYPLPF

SEQ ID NO: 18418 - DNA, 3261 bp, Homo sapiens
agcgagggtccaagaaggggagatagggagacgcgggcggagagaccgacccgaggcgggggcgcggggcaggggcggcgcgaggacctgacagcgtgtcccgcggcggggcgggggctcggccgcgcgcccgcgggggaggccgccgctagagggcacttcaggagggacagccctcccggcaccccggggcccgagctccagccccggcctcgcggcccgcggcccgcggcccgggcggcccgagccccctccccgggcgcgcggctctccgccttccccgccccggctggcgcgcggcccggcccggccgagcactgtcccggccccgaggggggcagagctcgggcgaaaacccgccctccagcgagctcatttccctaaaaaggggggggggagtcggagggagggagggagggagagaaagaaagagagaaaaagaaggaaagggagagggagacggctggagcccgaggacgagcgcggagccgcggaccgagcggggggcgggagacaggaaggagggaggcgagcagagggaaggggaagaggtcggggagcgagggcgggagcggtcgcggtcgcgatcgagcaagcaagcgggcgagaggacgccctcccctggcctccagtgcgccgcttccctcgccgccgccccgccagcatgcccggcgtggcccgcctgccgctgctgctcgggctgctgctgctcccgcgtcccggccggccgctggacttggccgactacacctatgacctggcggaggaggacgactcggagcccctcaactacaaagacccctgcaaggcggctgcctttcttggggacattgccctggacgaagaggacctgagggccttccaggtacagcaggctgtggatctcagacggcacacagctcgtaagtcctccatcaaagctgcagttccaggaaacacttctacccccagctgccagagcaccaacgggcagcctcagaggggagcctgtgggagatggagaggtagatcccgtagccggcgggcggcgacgtcccgaccagagcgtgtgtggcccgatggggtcatcccctttgtcattgggggaaacttcactggtagccagagggcagtcttccggcaggccatgaggcactgggagaagcacacctgtgtcaccttcctggagcgcactgacgaggacagctatattgtgttcacctatcgaccttgcgggtgctgctcctacgtgggtcgccgcggcgggggcccccaggccatctccatcggcaagaactgtgacaagttcggcattgtggtccacgagctgggccacgtcgtcggcttctggcacgaacacactcggccagaccgggaccgccacgtttccatcgttcgtgagaacatccagccagggcaggagtataacttcctgaagatggagcctcaggaggtggagtccctgggggagacctatgacttcgacagcatcatgcattacgctcggaacacattctccaggggcatcttcctggataccattgtccccaagtatgaggtgaacggggtgaaacctcccattggccaaaggacacggctcagcaagggggacattgcccaagcccgcaagctttacaagtgcccagcctgtggagagaccctgcaagacagcacaggcaacttctcctcccctgaataccccaatggctactctgctcacatgcactgcgtgtggcgcatctctgtcacacccggggagaagatcatcctgaacttcacgtccctggacctgtaccgcagccgcctgtgctggtacgactatgtggaggtccgagatggcttctggaggaaggcgcccctccgaggccgcttctgcgggtccaaactccctgagcctatcgtctccactgacagccgcctctgggttgaattccgcagcagcagcaattgggttggaaagggcttctttgcagtctacgaagccatctgcgggggtgatgtgaaaaaggactatggccacattcaatcgcccaactacccagacgattaccggcccagcaaagtctgcatctggcggatccaggtgtctgagggcttccacgtgggcctcacattccagtcctttgagattgagcgccacgacagctgtgcctacgactatctggaggtgcgcgacgggcacagtgagagcagcaccctcatcgggcgctactgtggctatgagaagcctgatgacatcaagagcacgtccagccgcctctggctcaagttcgtctctgacgggtccattaacaaagcgggctttgccgtcaactttttcaaagaggtggacgagtgctctcggcccaaccgcgggggctgtgagcagcggtgcctcaacaccctgggcagctacaagtgcagctgtgaccccgggtacgagctggccccagacaagcgccgctgtgaggctgcttgtggcggattcctcaccaagctcaacggctccatcaccagcccgggctggcccaaggagtacccccccaacaagaactgcatctggcagctggtggcccccacccagtaccgcatctccctgcagtttgacttctttgagacagagggcaatgatgtgtgcaagtacgacttcgtggaggtgcgcagtggactcacagctgactccaagctgcatggcaagttctgtggttctgagaagcccgaggtcatcacctcccagtacaacaacatgcgcgtggagttcaagtccgacaacaccgtgtccaaaaagggcttcaaggcccacttcttctcaggaggggagctatttggacttttgggacacccaccgaggagaccctaagccaagaaggagaagaaagagcctgaagaccttcagtctgacccctgccaccttccggggcatttgggcactgtaggaaaagaggccagctctgcagccccctcggggacgcccccaccagctcaaattccgagtgcagaaaagaaaccggaccccccagtgaggcctgccaggcctcccggaccccttgttactcaggaacctcaccttggacggaatgggatgggggcttcggtgcccaccaaccccccacctccactctgccattccggcccacctccctctggccggacagaactggtgctctcttctccccactgtgcccgtccgcggaccggggacccttccccgtgccctaccccctcccattttgatggtgtctgtgacatttcctgttgtgaagtaaaagagggacccctgcgtcctgctcctttctcttgcag

SEQ ID NO: 18419 - protein, 717 aa, Homo sapiens
MPGVARLPLLLGLLLLPRPGRPLDLADYTYDLAEEDDSEPLNYKDPCKAAAFLGDIALDEEDLRAFQVQQAVDLRRHTARKSSIKAAVPGNTSTPSCQSTNGQPQRGACGRWRGRSRSRRAATSRPERVWPDGVIPFVIGGNFTGSQRAVFRQAMRHWEKHTCVTFLERTDEDSYIVFTYRPCGCCSYVGRRGGGPQAISIGKNCDKFGIVVHELGHVVGFWHEHTRPDRDRHVSIVRENIQPGQEYNFLKMEPQEVESLGETYDFDSIMHYARNTFSRGIFLDTIVPKYEVNGVKPPIGQRTRLSKGDIAQARKLYKCPACGETLQDSTGNFSSPEYPNGYSAHMHCVWRISVTPGEKIILNFTSLDLYRSRLCWYDYVEVRDGFWRKAPLRGRFCGSKLPEPIVSTDSRLWVEFRSSSNWVGKGFFAVYEAICGGDVKKDYGHIQSPNYPDDYRPSKVCIWRIQVSEGFHVGLTFQSFEIERHDSCAYDYLEVRDGHSESSTLIGRYCGYEKPDDIKSTSSRLWLKFVSDGSINKAGFAVNFFKEVDECSRPNRGGCEQRCLNTLGSYKCSCDPGYELAPDKRRCEAACGGFLTKLNGSITSPGWPKEYPPNKNCIWQLVAPTQYRISLQFDFFETEGNDVCKYDFVEVRSGLTADSKLHGKFCGSEKPEVITSQYNNMRVEFKSDNTVSKKGFKAHFFSGGELFGLLGHPPRRP

SEQ ID NO: 18420 - DNA, 3137 bp, Homo sapiens
agcgagggtccaagaaggggagatagggagacgcgggcggagagaccgacccgaggcgggggcgcggggcaggggcggcgcgaggacctgacagcgtgtcccgcggcggggcgggggctcggccgcgcgcccgcgggggaggccgccgctagagggcacttcaggagggacagccctcccggcaccccggggcccgagctccagccccggcctcgcggcccgcggcccgcggcccgggcggcccgagccccctccccgggcgcgcggctctccgccttccccgccccggctggcgcgcggcccggcccggccgagcactgtcccggccccgaggggggcagagctcgggcgaaaacccgccctccagcgagctcatttccctaaaaaggggggggggagtcggagggagggagggagggagagaaagaaagagagaaaaagaaggaaagggagagggagacggctggagcccgaggacgagcgcggagccgcggaccgagcggggggcgggagacaggaaggagggaggcgagcagagggaaggggaagaggtcggggagcgagggcgggagcggtcgcggtcgcgatcgagcaagcaagcgggcgagaggacgccctcccctggcctccagtgcgccgcttccctcgccgccgccccgccagcatgcccggcgtggcccgcctgccgctgctgctcgggctgctgctgctcccgcgtcccggccggccgctggacttggccgactacacctatgacctggcggaggaggacgactcggagcccctcaactacaaagacccctgcaaggcggctgcctttcttggggacattgccctggacgaagaggacctgagggccttccaggtacagcaggctgtggatctcagacggcacacagctcgtaagtcctccatcaaagctgcagttccaggaaacacttctacccccagctgccagagcaccaacgggcagcctcagaggggagcctgtgggagatggagaggtagatcccgtagccggcgggcggcgacgtcccgaccagagcgtgtgtggcccgatggggtcatcccctttgtcattgggggaaacttcactggtagccagagggcagtcttccggcaggccatgaggcactgggagaagcacacctgtgtcaccttcctggagcgcactgacgaggacagctatattgtgttcacctatcgaccttgcgggtgctgctcctacgtgggtcgccgcggcgggggcccccaggccatctccatcggcaagaactgtgacaagttcggcattgtggtccacgagctgggccacgtcgtcggcttctggcacgaacacactcggccagaccgggaccgccacgtttccatcgttcgtgagaacatccagccagggcaggagtataacttcctgaagatggagcctcaggaggtggagtccctgggggagacctatgacttcgacagcatcatgcattacgctcggaacacattctccaggggcatcttcctggataccattgtccccaagtatgaggtgaacggggtgaaacctcccattggccaaaggacacggctcagcaagggggacattgcccaagcccgcaagctttacaagtgcccagcctgtggagagaccctgcaagacagcacaggcaacttctcctcccctgaataccccaatggctactctgctcacatgcactgcgtgtggcgcatctctgtcacacccggggagaagatcatcctgaacttcacgtccctggacctgtaccgcagccgcctgtgctggtacgactatgtggaggtccgagatggcttctggaggaaggcgcccctccgaggccgcttctgcgggtccaaactccctgagcctatcgtctccactgacagccgcctctgggttgaattccgcagcagcagcaattgggttggaaagggcttctttgcagtctacgaagccatctgcgggggtgatgtgaaaaaggactatggccacattcaatcgcccaactacccagacgattaccggcccagcaaagtctgcatctggcggatccaggtgtctgagggcttccacgtgggcctcacattccagtcctttgagattgagcgccacgacagctgtgcctacgactatctggaggtgcgcgacgggcacagtgagagcagcaccctcatcgggcgctactgtggctatgagaagcctgatgacatcaagagcacgtccagccgcctctggctcaagttcgtctctgacgggtccattaacaaagcgggctttgccgtcaactttttcaaagaggtggacgagtgctctcggcccaaccgcgggggctgtgagcagcggtgcctcaacaccctgggcagctacaagtgcagctgtgaccccgggtacgagctggccccagacaagcgccgctgtgaggctgcttgtggcggattcctcaccaagctcaacggctccatcaccagcccgggctggcccaaggagtacccccccaacaagaactgcatctggcagctggtggcccccacccagtaccgcatctccctgcagtttgacttctttgagacagagggcaatgatgtgtgcaagtacgacttcgtggaggtgcgcagtggactcacagctgactccaagctgcatggcaagttctgtggttctgagaagcccgaggtcatcacctcccagtacaacaacatgcgcgtggagttcaagtccgacaacaccgtgtccaaaaagggcttcaaggcccacttcttctcagaaaagaggccagctctgcagccccctcggggacgcccccaccagctcaaattccgagtgcagaaaagaaaccggaccccccagtgaggcctgccaggcctcccggaccccttgttactcaggaacctcaccttggacggaatgggatgggggcttcggtgcccaccaaccccccacctccactctgccattccggcccacctccctctggccggacagaactggtgctctcttctccccactgtgcccgtccgcggaccggggacccttccccgtgccctaccccctcccattttgatggtgtctgtgacatttcctgttgtgaagtaaaagagggacccctgcgtcctgctcctttctcttgcag

SEQ ID NO: 18421 - protein, 730 aa, Homo sapiens; identical to SEQ ID NO: 2234

SEQ ID NO: 18422 - DNA, 3748 bp, Homo sapiens
agcgagggtccaagaaggggagatagggagacgcgggcggagagaccgacccgaggcgggggcgcggggcaggggcggcgcgaggacctgacagcgtgtcccgcggcggggcgggggctcggccgcgcgcccgcgggggaggccgccgctagagggcacttcaggagggacagccctcccggcaccccggggcccgagctccagccccggcctcgcggcccgcggcccgcggcccgggcggcccgagccccctccccgggcgcgcggctctccgccttccccgccccggctggcgcgcggcccggcccggccgagcactgtcccggccccgaggggggcagagctcgggcgaaaacccgccctccagcgagctcatttccctaaaaaggggggggggagtcggagggagggagggagggagagaaagaaagagagaaaaagaaggaaagggagagggagacggctggagcccgaggacgagcgcggagccgcggaccgagcggggggcgggagacaggaaggagggaggcgagcagagggaaggggaagaggtcggggagcgagggcgggagcggtcgcggtcgcgatcgagcaagcaagcgggcgagaggacgccctcccctggcctccagtgcgccgcttccctcgccgccgccccgccagcatgcccggcgtggcccgcctgccgctgctgctcgggctgctgctgctcccgcgtcccggccggccgctggacttggccgactacacctatgacctggcggaggaggacgactcggagcccctcaactacaaagacccctgcaaggcggctgcctttcttggggacattgccctggacgaagaggacctgagggccttccaggtacagcaggctgtggatctcagacggcacacagctcgtaagtcctccatcaaagctgcagttccaggaaacacttctacccccagctgccagagcaccaacgggcagcctcagaggggagcctgtgggagatggagaggtagatcccgtagccggcgggcggcgacgtcccgaccagagcgtgtgtggcccgatggggtcatcccctttgtcattgggggaaacttcactggtagccagagggcagtcttccggcaggccatgaggcactgggagaagcacacctgtgtcaccttcctggagcgcactgacgaggacagctatattgtgttcacctatcgaccttgcgggtgctgctcctacgtgggtcgccgcggcgggggcccccaggccatctccatcggcaagaactgtgacaagttcggcattgtggtccacgagctgggccacgtcgtcggcttctggcacgaacacactcggccagaccgggaccgccacgtttccatcgttcgtgagaacatccagccaggcgttctccactcttcactgctccttctcagctgtggctctagaaatggtgcttccttcccatgttcccttgagtcctccattcaccaggccctctgctggacaggactcttcctgagaccctccccattccccaggctccccttggctgctccccggaccctcagggcaggagtataacttcctgaagatggagcctcaggaggtggagtccctgggggagacctatgacttcgacagcatcatgcattacgctcggaacacattctccaggggcatcttcctggataccattgtccccaagtatgaggtgaacggggtgaaacctcccattggccaaaggacacggctcagcaagggggacattgcccaagcccgcaagctttacaagtgcccagcctgtggagagaccctgcaagacagcacaggcaacttctcctcccctgaataccccaatggctactctgctcacatgcactgcgtgtggcgcatctctgtcacacccggggagaagatcatcctgaacttcacgtccctggacctgtaccgcagccgcctgtgctggtacgactatgtggaggtccgagatggcttctggaggaaggcgcccctccgaggccgcttctgcgggtccaaactccctgagcctatcgtctccactgacagccgcctctgggttgaattccgcagcagcagcaattgggttggaaagggcttctttgcagtctacgaagccatctgcgggggtgatgtgaaaaaggactatggccacattcaatcgcccaactacccagacgattaccggcccagcaaagtctgcatctggcggatccaggtgtctgagggcttccacgtgggcctcacattccagtcctttgagattgagcgccacgacagctgtgcctacgactatctggaggtgcgcgacgggcacagtgagagcagcaccctcatcgggcgctactgtggctatgagaagcctgatgacatcaagagcacgtccagccgcctctggctcaagttcgtctctgacgggtccattaacaaagcgggctttgccgtcaactttttcaaagaggtggacgagtgctctcggcccaaccgcgggggctgtgagcagcggtgcctcaacaccctgggcagctacaagtgcagctgtgaccccgggtacgagctggccccagacaagcgccgctgtgaggctgcttgtggcggattcctcaccaagctcaacggctccatcaccagcccgggctggcccaaggagtacccccccaacaagaactgcatctggcagctggtggcccccacccagtaccgcatctccctgcagtttgacttctttgagacagagggcaatgatgtgtgcaagtacgacttcgtggaggtgcgcagtggactcacagctgactccaagctgcatggcaagttctgtggttctgagaagcccgaggtcatcacctcccagtacaacaacatgcgcgtggagttcaagtccgacaacaccgtgtccaaaaagggcttcaaggcccacttcttctcagaaaagaggccagctctgcagccccctcggggacgcccccaccagctcaaattccgagtgcagaaaagaaaccggaccccccagtgaggcctgccaggcctcccggaccccttgttactcaggaacctcaccttggacggaatgggatgggggcttcggtgcccaccaaccccccacctccactctgccattccggcccacctccctctggccggacagaactggtgctctcttctccccactgtgcccgtccgcggaccggggacccttccccgtgccctaccccctcccattttgatggtgtctgtgacatttcctgttgtgaagtaaaagagggacccctgcgtcctgctcctttctcttgcagtctgcttgtccatgtgtctatttttccacttgtccatctgtccagtaagcaggtaatggtgacccatgctggtccgctcggacccccatcctcctctccccacagctgggccctgctcagctggtcctgctggatgcagtgcccctttggacccccttgtcgcctggcctcccactcccggccacctggcctggccagctctgccagctgttgctctgtcccggtgggagaaagtccagccaggcctccacttcccctggggcatcccaacctcagccctgcacagacccagcgtctgcccttatttgctcccctgcagacaaggacgagtgctccaaggataacggcggctgccagcaggactgcgtcaacacgttcggcagttatgagtgccaatgccgcagtggcttcgtcctccatgacaacaagcacgactgcaaagaag

SEQ ID NO: 18423 - protein, 479 aa, Homo sapiens; identical to SEQ ID NO: 18413

SEQ ID NO: 18424 - DNA, 3849 bp, Homo sapiens
agcgagggtccaagaaggggagatagggagacgcgggcggagagaccgacccgaggcgggggcgcggggcaggggcggcgcgaggacctgacagcgtgtcccgcggcggggcgggggctcggccgcgcgcccgcgggggaggccgccgctagagggcacttcaggagggacagccctcccggcaccccggggcccgagctccagccccggcctcgcggcccgcggcccgcggcccgggcggcccgagccccctccccgggcgcgcggctctccgccttccccgccccggctggcgcgcggcccggcccggccgagcactgtcccggccccgaggggggcagagctcgggcgaaaacccgccctccagcgagctcatttccctaaaaaggggggggggagtcggagggagggagggagggagagaaagaaagagagaaaaagaaggaaagggagagggagacggctggagcccgaggacgagcgcggagccgcggaccgagcggggggcgggagacaggaaggagggaggcgagcagagggaaggggaagaggtcggggagcgagggcgggagcggtcgcggtcgcgatcgagcaagcaagcgggcgagaggacgccctcccctggcctccagtgcgccgcttccctcgccgccgccccgccagcatgcccggcgtggcccgcctgccgctgctgctcgggctgctgctgctcccgcgtcccggccggccgctggacttggccgactacacctatgacctggcggaggaggacgactcggagcccctcaactacaaagacccctgcaaggcggctgcctttcttggggacattgccctggacgaagaggacctgagggccttccaggtacagcaggctgtggatctcagacggcacacagctcgtaagtcctccatcaaagctgcagttccaggaaacacttctacccccagctgccagagcaccaacgggcagcctcagaggggagcctgtgggagatggagaggtagatcccgtagccggcgggcggcgacgtcccgaccagagcgtgtgtggcccgatggggtcatcccctttgtcattgggggaaacttcactggtagccagagggcagtcttccggcaggccatgaggcactgggagaagcacacctgtgtcaccttcctggagcgcactgacgaggacagctatattgtgttcacctatcgaccttgcgggtgctgctcctacgtgggtcgccgcggcgggggcccccaggccatctccatcggcaagaactgtgacaagttcggcattgtggtccacgagctgggccacgtcgtcggcttctggcacgaacacactcggccagaccgggaccgccacgtttccatcgttcgtgagaacatccagccaggcgttctccactcttcactgctccttctcagctgtggctctagaaatggtgcttccttcccatgttcccttgagtcctccattcaccaggccctctgctggacaggactcttcctgagaccctccccattccccaggctccccttggctgctccccggaccctcagggcaggagtataacttcctgaagatggagcctcaggaggtggagtccctgggggagacctatgacttcgacagcatcatgcattacgctcggaacacattctccaggggcatcttcctggataccattgtccccaagtatgaggtgaacggggtgaaacctcccattggccaaaggacacggctcagcaagggggacattgcccaagcccgcaagctttacaagtgcccagcctgtggagagaccctgcaagacagcacaggcaacttctcctcccctgaataccccaatggctactctgctcacatgcactgcgtgtggcgcatctctgtcacacccggggagaagatcatcctgaacttcacgtccctggacctgtaccgcagccgcctgtgctggtacgactatgtggaggtccgagatggcttctggaggaaggcgcccctccgagggcccaacactggccagggatgacaacctggtatgggagccaggagtcctggcatcattagtcccagatagctgcattactcacttgctgcgagacttcaggccgcttctgcgggtccaaactccctgagcctatcgtctccactgacagccgcctctgggttgaattccgcagcagcagcaattgggttggaaagggcttctttgcagtctacgaagccatctgcgggggtgatgtgaaaaaggactatggccacattcaatcgcccaactacccagacgattaccggcccagcaaagtctgcatctggcggatccaggtgtctgagggcttccacgtgggcctcacattccagtcctttgagattgagcgccacgacagctgtgcctacgactatctggaggtgcgcgacgggcacagtgagagcagcaccctcatcgggcgctactgtggctatgagaagcctgatgacatcaagagcacgtccagccgcctctggctcaagttcgtctctgacgggtccattaacaaagcgggctttgccgtcaactttttcaaagaggtggacgagtgctctcggcccaaccgcgggggctgtgagcagcggtgcctcaacaccctgggcagctacaagtgcagctgtgaccccgggtacgagctggccccagacaagcgccgctgtgaggctgcttgtggcggattcctcaccaagctcaacggctccatcaccagcccgggctggcccaaggagtacccccccaacaagaactgcatctggcagctggtggcccccacccagtaccgcatctccctgcagtttgacttctttgagacagagggcaatgatgtgtgcaagtacgacttcgtggaggtgcgcagtggactcacagctgactccaagctgcatggcaagttctgtggttctgagaagcccgaggtcatcacctcccagtacaacaacatgcgcgtggagttcaagtccgacaacaccgtgtccaaaaagggcttcaaggcccacttcttctcagaaaagaggccagctctgcagccccctcggggacgcccccaccagctcaaattccgagtgcagaaaagaaaccggaccccccagtgaggcctgccaggcctcccggaccccttgttactcaggaacctcaccttggacggaatgggatgggggcttcggtgcccaccaaccccccacctccactctgccattccggcccacctccctctggccggacagaactggtgctctcttctccccactgtgcccgtccgcggaccggggacccttccccgtgccctaccccctcccattttgatggtgtctgtgacatttcctgttgtgaagtaaaagagggacccctgcgtcctgctcctttctcttgcagtctgcttgtccatgtgtctatttttccacttgtccatctgtccagtaagcaggtaatggtgacccatgctggtccgctcggacccccatcctcctctccccacagctgggccctgctcagctggtcctgctggatgcagtgcccctttggacccccttgtcgcctggcctcccactcccggccacctggcctggccagctctgccagctgttgctctgtcccggtgggagaaagtccagccaggcctccacttcccctggggcatcccaacctcagccctgcacagacccagcgtctgcccttatttgctcccctgcagacaaggacgagtgctccaaggataacggcggctgccagcaggactgcgtcaacacgttcggcagttatgagtgccaatgccgcagtggcttcgtcctccatgacaacaagcacgactgcaaagaag

SEQ ID NO: 18425 - protein, 358 aa, Homo sapiens; identical to SEQ ID NO: 18417

SEQ ID NO: 18426 - DNA, 3706 bp, Homo sapiens
agcgagggtccaagaaggggagatagggagacgcgggcggagagaccgacccgaggcgggggcgcggggcaggggcggcgcgaggacctgacagcgtgtcccgcggcggggcgggggctcggccgcgcgcccgcgggggaggccgccgctagagggcacttcaggagggacagccctcccggcaccccggggcccgagctccagccccggcctcgcggcccgcggcccgcggcccgggcggcccgagccccctccccgggcgcgcggctctccgccttccccgccccggctggcgcgcggcccggcccggccgagcactgtcccggccccgaggggggcagagctcgggcgaaaacccgccctccagcgagctcatttccctaaaaaggggggggggagtcggagggagggagggagggagagaaagaaagagagaaaaagaaggaaagggagagggagacggctggagcccgaggacgagcgcggagccgcggaccgagcggggggcgggagacaggaaggagggaggcgagcagagggaaggggaagaggtcggggagcgagggcgggagcggtcgcggtcgcgatcgagcaagcaagcgggcgagaggacgccctcccctggcctccagtgcgccgcttccctcgccgccgccccgccagcatgcccggcgtggcccgcctgccgctgctgctcgggctgctgctgctcccgcgtcccggccggccgctggacttggccgactacacctatgacctggcggaggaggacgactcggagcccctcaactacaaagacccctgcaaggcggctgcctttcttggggacattgccctggacgaagaggacctgagggccttccaggtacagcaggctgtggatctcagacggcacacagctcgtaagtcctccatcaaagctgcagttccaggaaacacttctacccccagctgccagagcaccaacgggcagcctcagaggggagcctgtgggagatggagaggtagatcccgtagccggcgggcggcgacgtcccgaccagagcgtgtgtggcccgatggggtcatcccctttgtcattgggggaaacttcactggtagccagagggcagtcttccggcaggccatgaggcactgggagaagcacacctgtgtcaccttcctggagcgcactgacgaggacagctatattgtgttcacctatcgaccttgcgggtgctgctcctacgtgggtcgccgcggcgggggcccccaggccatctccatcggcaagaactgtgacaagttcggcattgtggtccacgagctgggccacgtcgtcggcttctggcacgaacacactcggccagaccgggaccgccacgtttccatcgttcgtgagaacatccagccagggcaggagtataacttcctgaagatggagcctcaggaggtggagtccctgggggagacctatgacttcgacagcatcatgcattacgctcggaacacattctccaggggcatcttcctggataccattgtccccaagtatgaggtgaacggggtgaaacctcccattggccaaaggacacggctcagcaagggggacattgcccaagcccgcaagctttacaagtgcccagcctgtggagagaccctgcaagacagcacaggcaacttctcctcccctgaataccccaatggctactctgctcacatgcactgcgtgtggcgcatctctgtcacacccggggagaagatcatcctgaacttcacgtccctggacctgtaccgcagccgcctgtgctggtacgactatgtggaggtccgagatggcttctggaggaaggcgcccctccgaggccgcttctgcgggtccaaactccctgagcctatcgtctccactgacagccgcctctgggttgaattccgcagcagcagcaattgggttggaaagggcttctttgcagtctacgaagccatctgcgggggtgatgtgaaaaaggactatggccacattcaatcgcccaactacccagacgattaccggcccagcaaagtctgcatctggcggatccaggtgtctgagggcttccacgtgggcctcacattccagtcctttgagattgagcgccacgacagctgtgcctacgactatctggaggtgcgcgacgggcacagtgagagcagcaccctcatcgggcgctactgtggctatgagaagcctgatgacatcaagagcacgtccagccgcctctggctcaagttcgtctctgacgggtccattaacaaagcgggctttgccgtcaactttttcaaagaggtggacgagtgctctcggcccaaccgcgggggctgtgagcagcggtgcctcaacaccctgggcagctacaagtgcagctgtgaccccgggtacgagctggccccagacaagcgccgctgtgaggctgcttgtggcggattcctcaccaagctcaacggctccatcaccagcccgggctggcccaaggagtacccccccaacaagaactgcatctggcagctggtggcccccacccagtaccgcatctccctgcagtttgacttctttgagacagagggcaatgatgtgtgcaagtacgacttcgtggaggtgcgcagtggactcacagctgactccaagctgcatggcaagttctgtggttctgagaagcccgaggtcatcacctcccagtacaacaacatgcgcgtggagttcaagtccgacaacaccgtgtccaaaaagggcttcaaggcccacttcttctcaggaggggagctatttggacttttgggacacccaccgaggagaccctaagccaagaaggagaagaaagagcctgaagaccttcagtctgacccctgccaccttccggggcatttgggcactgtaggaaaagaggccagctctgcagccccctcggggacgcccccaccagctcaaattccgagtgcagaaaagaaaccggaccccccagtgaggcctgccaggcctcccggaccccttgttactcaggaacctcaccttggacggaatgggatgggggcttcggtgcccaccaaccccccacctccactctgccattccggcccacctccctctggccggacagaactggtgctctcttctccccactgtgcccgtccgcggaccggggacccttccccgtgccctaccccctcccattttgatggtgtctgtgacatttcctgttgtgaagtaaaagagggacccctgcgtcctgctcctttctcttgcagtctgcttgtccatgtgtctatttttccacttgtccatctgtccagtaagcaggtaatggtgacccatgctggtccgctcggacccccatcctcctctccccacagctgggccctgctcagctggtcctgctggatgcagtgcccctttggacccccttgtcgcctggcctcccactcccggccacctggcctggccagctctgccagctgttgctctgtcccggtgggagaaagtccagccaggcctccacttcccctggggcatcccaacctcagccctgcacagacccagcgtctgcccttatttgctcccctgcagacaaggacgagtgctccaaggataacggcggctgccagcaggactgcgtcaacacgttcggcagttatgagtgccaatgccgcagtggcttcgtcctccatgacaacaagcacgactgcaaagaag

SEQ ID NO: 18427 - protein, 717 aa, Homo sapiens; identical to SEQ ID NO: 18419

SEQ ID NO: 18428 - DNA, 3582 bp, Homo sapiens
agcgagggtccaagaaggggagatagggagacgcgggcggagagaccgacccgaggcgggggcgcggggcaggggcggcgcgaggacctgacagcgtgtcccgcggcggggcgggggctcggccgcgcgcccgcgggggaggccgccgctagagggcacttcaggagggacagccctcccggcaccccggggcccgagctccagccccggcctcgcggcccgcggcccgcggcccgggcggcccgagccccctccccgggcgcgcggctctccgccttccccgccccggctggcgcgcggcccggcccggccgagcactgtcccggccccgaggggggcagagctcgggcgaaaacccgccctccagcgagctcatttccctaaaaaggggggggggagtcggagggagggagggagggagagaaagaaagagagaaaaagaaggaaagggagagggagacggctggagcccgaggacgagcgcggagccgcggaccgagcggggggcgggagacaggaaggagggaggcgagcagagggaaggggaagaggtcggggagcgagggcgggagcggtcgcggtcgcgatcgagcaagcaagcgggcgagaggacgccctcccctggcctccagtgcgccgcttccctcgccgccgccccgccagcatgcccggcgtggcccgcctgccgctgctgctcgggctgctgctgctcccgcgtcccggccggccgctggacttggccgactacacctatgacctggcggaggaggacgactcggagcccctcaactacaaagacccctgcaaggcggctgcctttcttggggacattgccctggacgaagaggacctgagggccttccaggtacagcaggctgtggatctcagacggcacacagctcgtaagtcctccatcaaagctgcagttccaggaaacacttctacccccagctgccagagcaccaacgggcagcctcagaggggagcctgtgggagatggagaggtagatcccgtagccggcgggcggcgacgtcccgaccagagcgtgtgtggcccgatggggtcatcccctttgtcattgggggaaacttcactggtagccagagggcagtcttccggcaggccatgaggcactgggagaagcacacctgtgtcaccttcctggagcgcactgacgaggacagctatattgtgttcacctatcgaccttgcgggtgctgctcctacgtgggtcgccgcggcgggggcccccaggccatctccatcggcaagaactgtgacaagttcggcattgtggtccacgagctgggccacgtcgtcggcttctggcacgaacacactcggccagaccgggaccgccacgtttccatcgttcgtgagaacatccagccagggcaggagtataacttcctgaagatggagcctcaggaggtggagtccctgggggagacctatgacttcgacagcatcatgcattacgctcggaacacattctccaggggcatcttcctggataccattgtccccaagtatgaggtgaacggggtgaaacctcccattggccaaaggacacggctcagcaagggggacattgcccaagcccgcaagctttacaagtgcccagcctgtggagagaccctgcaagacagcacaggcaacttctcctcccctgaataccccaatggctactctgctcacatgcactgcgtgtggcgcatctctgtcacacccggggagaagatcatcctgaacttcacgtccctggacctgtaccgcagccgcctgtgctggtacgactatgtggaggtccgagatggcttctggaggaaggcgcccctccgaggccgcttctgcgggtccaaactccctgagcctatcgtctccactgacagccgcctctgggttgaattccgcagcagcagcaattgggttggaaagggcttctttgcagtctacgaagccatctgcgggggtgatgtgaaaaaggactatggccacattcaatcgcccaactacccagacgattaccggcccagcaaagtctgcatctggcggatccaggtgtctgagggcttccacgtgggcctcacattccagtcctttgagattgagcgccacgacagctgtgcctacgactatctggaggtgcgcgacgggcacagtgagagcagcaccctcatcgggcgctactgtggctatgagaagcctgatgacatcaagagcacgtccagccgcctctggctcaagttcgtctctgacgggtccattaacaaagcgggctttgccgtcaactttttcaaagaggtggacgagtgctctcggcccaaccgcgggggctgtgagcagcggtgcctcaacaccctgggcagctacaagtgcagctgtgaccccgggtacgagctggccccagacaagcgccgctgtgaggctgcttgtggcggattcctcaccaagctcaacggctccatcaccagcccgggctggcccaaggagtacccccccaacaagaactgcatctggcagctggtggcccccacccagtaccgcatctccctgcagtttgacttctttgagacagagggcaatgatgtgtgcaagtacgacttcgtggaggtgcgcagtggactcacagctgactccaagctgcatggcaagttctgtggttctgagaagcccgaggtcatcacctcccagtacaacaacatgcgcgtggagttcaagtccgacaacaccgtgtccaaaaagggcttcaaggcccacttcttctcagaaaagaggccagctctgcagccccctcggggacgcccccaccagctcaaattccgagtgcagaaaagaaaccggaccccccagtgaggcctgccaggcctcccggaccccttgttactcaggaacctcaccttggacggaatgggatgggggcttcggtgcccaccaaccccccacctccactctgccattccggcccacctccctctggccggacagaactggtgctctcttctccccactgtgcccgtccgcggaccggggacccttccccgtgccctaccccctcccattttgatggtgtctgtgacatttcctgttgtgaagtaaaagagggacccctgcgtcctgctcctttctcttgcagtctgcttgtccatgtgtctatttttccacttgtccatctgtccagtaagcaggtaatggtgacccatgctggtccgctcggacccccatcctcctctccccacagctgggccctgctcagctggtcctgctggatgcagtgcccctttggacccccttgtcgcctggcctcccactcccggccacctggcctggccagctctgccagctgttgctctgtcccggtgggagaaagtccagccaggcctccacttcccctggggcatcccaacctcagccctgcacagacccagcgtctgcccttatttgctcccctgcagacaaggacgagtgctccaaggataacggcggctgccagcaggactgcgtcaacacgttcggcagttatgagtgccaatgccgcagtggcttcgtcctccatgacaacaagcacgactgcaaagaag

SEQ ID NO: 18429 - protein, 730 aa, Homo sapiens; identical to SEQ ID NO: 2234

SEQ ID NO: 18430 - DNA, 4081 bp, Homo sapiens
agcgagggtccaagaaggggagatagggagacgcgggcggagagaccgacccgaggcgggggcgcggggcaggggcggcgcgaggacctgacagcgtgtcccgcggcggggcgggggctcggccgcgcgcccgcgggggaggccgccgctagagggcacttcaggagggacagccctcccggcaccccggggcccgagctccagccccggcctcgcggcccgcggcccgcggcccgggcggcccgagccccctccccgggcgcgcggctctccgccttccccgccccggctggcgcgcggcccggcccggccgagcactgtcccggccccgaggggggcagagctcgggcgaaaacccgccctccagcgagctcatttccctaaaaaggggggggggagtcggagggagggagggagggagagaaagaaagagagaaaaagaaggaaagggagagggagacggctggagcccgaggacgagcgcggagccgcggaccgagcggggggcgggagacaggaaggagggaggcgagcagagggaaggggaagaggtcggggagcgagggcgggagcggtcgcggtcgcgatcgagcaagcaagcgggcgagaggacgccctcccctggcctccagtgcgccgcttccctcgccgccgccccgccagcatgcccggcgtggcccgcctgccgctgctgctcgggctgctgctgctcccgcgtcccggccggccgctggacttggccgactacacctatgacctggcggaggaggacgactcggagcccctcaactacaaagacccctgcaaggcggctgcctttcttggggacattgccctggacgaagaggacctgagggccttccaggtacagcaggctgtggatctcagacggcacacagctcgtaagtcctccatcaaagctgcagttccaggaaacacttctacccccagctgccagagcaccaacgggcagcctcagaggggagcctgtgggagatggagaggtagatcccgtagccggcgggcggcgacgtcccgaccagagcgtgtgtggcccgatggggtcatcccctttgtcattgggggaaacttcactggtagccagagggcagtcttccggcaggccatgaggcactgggagaagcacacctgtgtcaccttcctggagcgcactgacgaggacagctatattgtgttcacctatcgaccttgcgggtgctgctcctacgtgggtcgccgcggcgggggcccccaggccatctccatcggcaagaactgtgacaagttcggcattgtggtccacgagctgggccacgtcgtcggcttctggcacgaacacactcggccagaccgggaccgccacgtttccatcgttcgtgagaacatccagccagggcaggagtataacttcctgaagatggagcctcaggaggtggagtccctgggggagacctatgacttcgacagcatcatgcattacgctcggaacacattctccaggggcatcttcctggataccattgtccccaagtatgaggtgaacggggtgaaacctcccattggccaaaggacacggctcagcaagggggacattgcccaagcccgcaagctttacaagtgcccagcctgtggagagaccctgcaagacagcacaggcaacttctcctcccctgaataccccaatggctactctgctcacatgcactgcgtgtggcgcatctctgtcacacccggggagaagatcatcctgaacttcacgtccctggacctgtaccgcagccgcctgtgctggtacgactatgtggaggtccgagatggcttctggaggaaggcgcccctccgaggccgcttctgcgggtccaaactccctgagcctatcgtctccactgacagccgcctctgggttgaattccgcagcagcagcaattgggttggaaagggcttctttgcagtctacgaagccatctgcgggggtgatgtgaaaaaggactatggccacattcaatcgcccaactacccagacgattaccggcccagcaaagtctgcatctggcggatccaggtgtctgagggcttccacgtgggcctcacattccagtcctttgagattgagcgccacgacagctgtgcctacgactatctggaggtgcgcgacgggcacagtgagagcagcaccctcatcgggcgctactgtggctatgagaagcctgatgacatcaagagcacgtccagccgcctctggctcaagttcgtctctgacgggtccattaacaaagcgggctttgccgtcaactttttcaaagaggtggacgagtgctctcggcccaaccgcgggggctgtgagcagcggtgcctcaacaccctgggcagctacaagtgcagctgtgaccccgggtacgagctggccccagacaagcgccgctgtgaggggtgttatgatctacaggttgggaaacccctgttgtgggacagacactgtttccgcctctccacgcatggtcccgagatgctggggacagcactccgaggctaatggctccagctcactaggccgatcctgctgtgcccccgagctgctccctttcctgcacctcccaggaccgcccctccctgaactgctttccctgagccccttattcccgctcactccctcttggaggaccttggcctgttcatttgcagagaagatagaaatggccacacttatgaccccttagctcccccactcctccctacaggcccacccctgaggacacccaggccaccctgcctcctcccgtccgccccagagggaccagacacaggtccctgagccttggggagtccacaggctccccatcttctccttactgcatcccagcccacatctcagcccttccccatggcaggggctccccgcagacgatgccaccttccttgtccccgcagctgcttgtggcggattcctcaccaagctcaacggctccatcaccagcccgggctggcccaaggagtacccccccaacaagaactgcatctggcagctggtggcccccacccagtaccgcatctccctgcagtttgacttctttgagacagagggcaatgatgtgtgcaagtacgacttcgtggaggtgcgcagtggactcacagctgactccaagctgcatggcaagttctgtggttctgagaagcccgaggtcatcacctcccagtacaacaacatgcgcgtggagttcaagtccgacaacaccgtgtccaaaaagggcttcaaggcccacttcttctcagaaaagaggccagctctgcagccccctcggggacgcccccaccagctcaaattccgagtgcagaaaagaaaccggaccccccagtgaggcctgccaggcctcccggaccccttgttactcaggaacctcaccttggacggaatgggatgggggcttcggtgcccaccaaccccccacctccactctgccattccggcccacctccctctggccggacagaactggtgctctcttctccccactgtgcccgtccgcggaccggggacccttccccgtgccctaccccctcccattttgatggtgtctgtgacatttcctgttgtgaagtaaaagagggacccctgcgtcctgctcctttctcttgcagtctgcttgtccatgtgtctatttttccacttgtccatctgtccagtaagcaggtaatggtgacccatgctggtccgctcggacccccatcctcctctccccacagctgggccctgctcagctggtcctgctggatgcagtgcccctttggacccccttgtcgcctggcctcccactcccggccacctggcctggccagctctgccagctgttgctctgtcccggtgggagaaagtccagccaggcctccacttcccctggggcatcccaacctcagccctgcacagacccagcgtctgcccttatttgctcccctgcagacaaggacgagtgctccaaggataacggcggctgccagcaggactgcgtcaacacgttcggcagttatgagtgccaatgccgcagtggcttcgtcctccatgacaacaagcacgactgcaaagaag

SEQ ID NO: 18431 - protein, 622 aa, Homo sapiens; identical to SEQ ID NO: 18409

SEQ ID NO: 18432 - DNA, 3948 bp, Homo sapiens
agcgagggtccaagaaggggagatagggagacgcgggcggagagaccgacccgaggcgggggcgcggggcaggggcggcgcgaggacctgacagcgtgtcccgcggcggggcgggggctcggccgcgcgcccgcgggggaggccgccgctagagggcacttcaggagggacagccctcccggcaccccggggcccgagctccagccccggcctcgcggcccgcggcccgcggcccgggcggcccgagccccctccccgggcgcgcggctctccgccttccccgccccggctggcgcgcggcccggcccggccgagcactgtcccggccccgaggggggcagagctcgggcgaaaacccgccctccagcgagctcatttccctaaaaaggggggggggagtcggagggagggagggagggagagaaagaaagagagaaaaagaaggaaagggagagggagacggctggagcccgaggacgagcgcggagccgcggaccgagcggggggcgggagacaggaaggagggaggcgagcagagggaaggggaagaggtcggggagcgagggcgggagcggtcgcggtcgcgatcgagcaagcaagcgggcgagaggacgccctcccctggcctccagtgcgccgcttccctcgccgccgccccgccagcatgcccggcgtggcccgcctgccgctgctgctcgggctgctgctgctcccgcgtcccggccggccgctggacttggccgactacacctatgacctggcggaggaggacgactcggagcccctcaactacaaagacccctgcaaggcggctgcctttcttggggacattgccctggacgaagaggacctgagggccttccaggtacagcaggctgtggatctcagacggcacacagctcgtaagtcctccatcaaagctgcagttccaggaaacacttctacccccagctgccagagcaccaacgggcagcctcagaggggagcctgtgggagatggagaggtagatcccgtagccggcgggcggcgacgtcccgaccagagcgtgtgtggcccgatggggtcatcccctttgtcattgggggaaacttcactggtagccagagggcagtcttccggcaggccatgaggcactgggagaagcacacctgtgtcaccttcctggagcgcactgacgaggacagctatattgtgttcacctatcgaccttgcgggtgctgctcctacgtgggtcgccgcggcgggggcccccaggccatctccatcggcaagaactgtgacaagttcggcattgtggtccacgagctgggccacgtcgtcggcttctggcacgaacacactcggccagaccgggaccgccacgtttccatcgttcgtgagaacatccagccagggcaggagtataacttcctgaagatggagcctcaggaggtggagtccctgggggagacctatgacttcgacagcatcatgcattacgctcggaacacattctccaggggcatcttcctggataccattgtccccaagtatgaggtgaacggggtgaaacctcccattggccaaaggacacggctcagcaagggggacattgcccaagcccgcaagctttacaagtgcccagcctgtggagagaccctgcaagacagcacaggcaacttctcctcccctgaataccccaatggctactctgctcacatgcactgcgtgtggcgcatctctgtcacacccggggagaagatcatcctgaacttcacgtccctggacctgtaccgcagccgcctgtgctggtacgactatgtggaggtccgagatggcttctggaggaaggcgcccctccgaggccgcttctgcgggtccaaactccctgagcctatcgtctccactgacagccgcctctgggttgaattccgcagcagcagcaattgggttggaaagggcttctttgcagtctacgaagccatctgcgggggtgatgtgaaaaaggactatggccacattcaatcgcccaactacccagacgattaccggcccagcaaagtctgcatctggcggatccaggtgtctgagggcttccacgtgggcctcacattccagtcctttgagattgagcgccacgacagctgtgcctacgactatctggaggtgcgcgacgggcacagtgagagcagcaccctcatcgggcgctactgtggctatgagaagcctgatgacatcaagagcacgtccagccgcctctggctcaagttcgtctctgacgggtccattaacaaagcgggctttgccgtcaactttttcaaagaggtggacgagtgctctcggcccaaccgcgggggctgtgagcagcggtgcctcaacaccctgggcagctacaagtgcagctgtgaccccgggtacgagctggccccagacaagcgccgctgtgaggctgcttgtggcggattcctcaccaagctcaacggctccatcaccagcccgggctggcccaaggagtacccccccaacaagaactgcatctggcagctggtggcccccacccagtaccgcatctccctgcagtttgacttctttgagacagagggcaatgatgtgtgcaagtacgacttcgtggaggtgcgcagtggactcacagctgactccaagctgcatggcaagttctgtggttctgagaagcccgaggtcatcacctcccagtacaacaacatgcgcgtggagttcaagtccgacaacaccgtgtccaaaaagggcttcaaggcccacttcttctcagtcttggagggggcaggggaccgacactcacatctatcaggcctggagttactgctctgcccccatgccctggtcgacactgtgcccgccccaccctcagccctgcacggagacacacacgcccacacgcacacacatgtgcacacacattgccccatcgcacaagaaacctgcagaggacccccactgggggcatcgaggctcagccctcagggcccggggcatctgactctggccccccaggaggggagctatttggacttttgggacacccaccgaggagaccctaagccaagaaggagaagaaagagcctgaagaccttcagtctgacccctgccaccttccggggcatttgggcactgtaggaaaagaggccagctctgcagccccctcggggacgcccccaccagctcaaattccgagtgcagaaaagaaaccggaccccccagtgaggcctgccaggcctcccggaccccttgttactcaggaacctcaccttggacggaatgggatgggggcttcggtgcccaccaaccccccacctccactctgccattccggcccacctccctctggccggacagaactggtgctctcttctccccactgtgcccgtccgcggaccggggacccttccccgtgccctaccccctcccattttgatggtgtctgtgacatttcctgttgtgaagtaaaagagggacccctgcgtcctgctcctttctcttgcagtctgcttgtccatgtgtctatttttccacttgtccatctgtccagtaagcaggtaatggtgacccatgctggtccgctcggacccccatcctcctctccccacagctgggccctgctcagctggtcctgctggatgcagtgcccctttggacccccttgtcgcctggcctcccactcccggccacctggcctggccagctctgccagctgttgctctgtcccggtgggagaaagtccagccaggcctccacttcccctggggcatcccaacctcagccctgcacagacccagcgtctgcccttatttgctcccctgcagacaaggacgagtgctccaaggataacggcggctgccagcaggactgcgtcaacacgttcggcagttatgagtgccaatgccgcagtggcttcgtcctccatgacaacaagcacgactgcaaagaag

SEQ ID NO: 18433 - protein, 823 aa, Homo sapiens; identical to SEQ ID NO: 2236

SEQ ID NO: 18434 - DNA, 4223 bp, Homo sapiens
agcgagggtccaagaaggggagatagggagacgcgggcggagagaccgacccgaggcgggggcgcggggcaggggcggcgcgaggacctgacagcgtgtcccgcggcggggcgggggctcggccgcgcgcccgcgggggaggccgccgctagagggcacttcaggagggacagccctcccggcaccccggggcccgagctccagccccggcctcgcggcccgcggcccgcggcccgggcggcccgagccccctccccgggcgcgcggctctccgccttccccgccccggctggcgcgcggcccggcccggccgagcactgtcccggccccgaggggggcagagctcgggcgaaaacccgccctccagcgagctcatttccctaaaaaggggggggggagtcggagggagggagggagggagagaaagaaagagagaaaaagaaggaaagggagagggagacggctggagcccgaggacgagcgcggagccgcggaccgagcggggggcgggagacaggaaggagggaggcgagcagagggaaggggaagaggtcggggagcgagggcgggagcggtcgcggtcgcgatcgagcaagcaagcgggcgagaggacgccctcccctggcctccagtgcgccgcttccctcgccgccgccccgccagcatgcccggcgtggcccgcctgccgctgctgctcgggctgctgctgctcccgcgtcccggccggccgctggacttggccgactacacctatgacctggcggaggaggacgactcggagcccctcaactacaaagacccctgcaaggcggctgcctttcttggggacattgccctggacgaagaggacctgagggccttccaggtacagcaggctgtggatctcagacggcacacagctcgtaagtcctccatcaaagctgcagttccaggaaacacttctacccccagctgccagagcaccaacgggcagcctcagaggggagcctgtgggagatggagaggtagatcccgtagccggcgggcggcgacgtcccgaccagagcgtgtgtggcccgatggggtcatcccctttgtcattgggggaaacttcactggtagccagagggcagtcttccggcaggccatgaggcactgggagaagcacacctgtgtcaccttcctggagcgcactgacgaggacagctatattgtgttcacctatcgaccttgcgggtgctgctcctacgtgggtcgccgcggcgggggcccccaggccatctccatcggcaagaactgtgacaagttcggcattgtggtccacgagctgggccacgtcgtcggcttctggcacgaacacactcggccagaccgggaccgccacgtttccatcgttcgtgagaacatccagccagggcaggagtataacttcctgaagatggagcctcaggaggtggagtccctgggggagacctatgacttcgacagcatcatgcattacgctcggaacacattctccaggggcatcttcctggataccattgtccccaagtatgaggtgaacggggtgaaacctcccattggccaaaggacacggctcagcaagggggacattgcccaagcccgcaagctttacaagtgcccagcctgtggagagaccctgcaagacagcacaggcaacttctcctcccctgaataccccaatggctactctgctcacatgcactgcgtgtggcgcatctctgtcacacccggggagaagatcatcctgaacttcacgtccctggacctgtaccgcagccgcctgtgctggtacgactatgtggaggtccgagatggcttctggaggaaggcgcccctccgaggccgcttctgcgggtccaaactccctgagcctatcgtctccactgacagccgcctctgggttgaattccgcagcagcagcaattgggttggaaagggcttctttgcagtctacgaagccatctgcgggggtgatgtgaaaaaggactatggccacattcaatcgcccaactacccagacgattaccggcccagcaaagtctgcatctggcggatccaggtgtctgagggcttccacgtgggcctcacattccagtcctttgagattgagcgccacgacagctgtgcctacgactatctggaggtgcgcgacgggcacagtgagagcagcaccctcatcgggcgctactgtggctatgagaagcctgatgacatcaagagcacgtccagccgcctctggctcaagttcgtctctgacgggtccattaacaaagcgggctttgccgtcaactttttcaaagaggtggacgagtgctctcggcccaaccgcgggggctgtgagcagcggtgcctcaacaccctgggcagctacaagtgcagctgtgaccccgggtacgagctggccccagacaagcgccgctgtgaggctgcttgtggcggattcctcaccaagctcaacggctccatcaccagcccgggctggcccaaggagtacccccccaacaagaactgcatctggcagctggtggcccccacccagtaccgcatctccctgcagtttgacttctttgagacagagggcaatgatgtgtgcaagtacgacttcgtggaggtgcgcagtggactcacagctgactccaagctgcatggcaagttctgtggttctgagaagcccgaggtcatcacctcccagtacaacaacatgcgcgtggagttcaagtccgacaacaccgtgtccaaaaagggcttcaaggcccacttcttctcagacaaggacgagtgctccaaggataacggcggctgccagcaggactgcgtcaacacgttcggcagttatgagtgccaatgccgcagtggcttcgtcctccatgacaacaagcacgactgcaaagaagccggctgtgaccacaaggtgacatccaccagtggtaccatcaccagccccaactggcctgacaagtatcccagcaagaaggagtgcacgtgggccatctccagcacccccgggcaccgggtcaagctgaccttcatggagatggacatcgagtcccagcctgagtgtgcctacgaccacctagaggtgttcgacgggcgagacgccaaggcccccgtcctcggccgcttctgtgggagcaagaagcccgagcccgtcctggccacaggcagccgcatgttcctgcgcttctactcagataactcggtccagcgaaagggcttccaggcctcccacgccacagagtgcgggggccaggtacgggcagacgtgaagaccaaggacctttactcccacgcccagtttggcgacaacaactaccctgggggtgtggactgtgagtgggtcattgtggccgaggaaggctacggcgtggagctcgtgttccagacctttgaggtggaggaggagaccgactgcggctatgactacatggagctcttcgacggctacgacagcacagcccccaggctggggcgctactgtggctcagggcctcctgaggaggtgtactcggcgggagattctgtcctggtgaagttccactcggatgacaccatcaccaaaaaaggtttccacctgcgatacaccagcaccaagttccaggacacactccacagcaggaagtgaccactgcctgagcaggggcggggactggagcctgctgcccttggtcgcctagactggatagtgggggtgggcggaaggcaacgcaccatccctctcccccaggccccaggacctgcagggccaatggcctggtgagactgtccataggaggtgggggaactggactccggcataagccacttccccacaaacccccaccagcaaggggctggggccagggagcagagcttccacaagacatttcgaagtcatcattcctctcttagggggccctgcctggtggcaagagggaatgtcagcaggaccccatcgccatccctgtgtctctacacgctgtattgtgtatcaccgggggcattattttcattgtaatgttcatttcccacccctgctccagcctcgatttggttttattttgagcccccattccaccaccccagtttcctggggcacaagtgtctgtgcatgtcccccaggagccaccgtggggagccgatggggaggggatggagaaacaagacagggcttctctcaggcccagtggccggtcagccacaccagggcaccgcagccaataaaccgaaagtgttacagccaa

SEQ ID NO: 18435 - protein, 986 aa, Homo sapiens; identical to SEQ ID NO: 2238

SEQ ID NO: 18436 - DNA, 1390 bp, Homo sapiens
caagtacgacttcgtggaggtgcgcagtggactcacagctgactccaagctgcatggcaagttctgtggttctgagaagcccgaggtcatcacctcccagtacaacaacatgcgcgtggagttcaagtccgacaacaccgtttcggcagttatgagtgccaatgccgcagtggcttcgtcctccatgacaacaagcacgactgcaaagaagccggctgtgaccacaaggtgacatccaccagtggtaccatcaccagccccaactggcctgacaagtatcccagcaagaaggagtgcacgtgggccatctccagcacccccgggcaccgggtcaagctgaccttcatggagatggacatcgagtcccagcctgagtgtgcctacgaccacctagaggtgttcgacgggcgagacgccaaggtacgggcagacgtgaagaccaaggacctttactcccacgcccagtttggcgacaacaactaccctgggggtgtggactgtgagtgggtcattgtggccgaggaaggctacggcgtggagctcgtgttccagacctttgaggtggaggaggagaccgactgcggctatgactacatggagctcttcgacggctacgacagcacagcccccaggctggggcgctactgtggctcagggcctcctgaggaggtgtactcggcgggagattctgtcctggtgaagttccactcggatgacaccatcaccaaaaaaggtttccacctgcgatacaccagcaccaagttccaggacacactccacagcaggaagtgaccactgcctgagcaggggcggggactggagcctgctgcccttggtcgcctagactggatagtgggggtgggcggaaggcaacgcaccatccctctcccccaggccccaggacctgcagggccaatggcctggtgagactgtccataggaggtgggggaactggactccggcataagccacttccccacaaacccccaccagcaaggggctggggccagggagcagagcttccacaagacatttcgaagtcatcattcctctcttagggggccctgcctggtggcaagagggaatgtcagcaggaccccatcgccatccctgtgtctctacacgctgtattgtgtatcaccgggggcattattttcattgtaatgttcatttcccacccctgctccagcctcgatttggttttattttgagcccccattccaccaccccagtttcctggggcacaagtgtctgtgcatgtcccccaggagccaccgtggggagccgatggggaggggatggagaaacaagacagggcttctctcaggcccagtggccggtcagccacaccagggcaccgcagccaataaaccgaaagtgttacagccaa

SEQ ID NO: 18437 - protein, 148 aa, Homo sapiens
MEMDIESQPECAYDHLEVFDGRDAKVRADVKTKDLYSHAQFGDNNYPGGVDCEWVIVAEEGYGVELVFQTFEVEEETDCGYDYMELFDGYDSTAPRLGRYCGSGPPEEVYSAGDSVLVKFHSDDTITKKGFHLRYTSTKFQDTLHSRK

SEQ ID NO: 18438 - DNA, 1338 bp, Homo sapiens
ggagatctccccttctttgtgaatcactcagcccttcaccctggggtgaggctgtaaggtagctggtggtctccagaggtaacaggacccaggcccatgcagtgaagggcaggagtggagttgagcaggggagacagggaggtcagagtctggctggagcaggcccatggatcctcactcccggcctgcctgctgggccggacaggggataggcaggaaggcaggatgcccacggccgagtccatgctgccttccttctcccctccttcgcccagggtcctgcatcctcaagccccctctgtggctgccctgcacccctgcctgacccccggatgccatgcacctgcccctgcactggctccctgcttggcactgccagccaccctgctctgcttacagtggcccgttgacctcctgcccccaacccccgcttgctgagaccctccccatgccaggccaatttcttccttccctgtgcccacctgggactcctaagaggtgctcaccagagggttgagaggatgtaacacccactcggggcaggctctgccccgggaaaccattacctgcttactctcgtctcttcctgcccttctgttgctccagtcttggagggggcaggggaccgacactcacatctatcaggcctggagttactgctctgcccccatgccctggtcgacactgtgcccgccccaccctcagccctgcacggagacacacacgcccacacgcacacacatgtgcacacacattgccccatcgcacaagaaacctgcagaggacccccactgggggcatcgaggctcagccctcagggcccggggcatctgactctggccccccaggaggggagctatttggacttttgggacacccaccgaggagaccctaagccaagaaggagaagaaagagcctgaagaccttcagtctgacccctgccaccttccggggcatttgggcactgtaggaaaagaggccagctctgcagccccctcggggacgcccccaccagctcaaattccgagtgcagaaaagaaaccggaccccccagtgaggcctgccaggcctcccggaccccttgttactcaggaacctcaccttggacggaatgggatgggggcttcggtgcccaccaaccccccacctccactctgccattccggcccacctccctctggccggacagaactggtgctctcttctccccactgtgcccgtccgcggaccggggacccttccccgtgccctaccccctcccattttgatggtgtctgtgacatttcctgttgtgaagtaaaagagggacccctgcgtcctgctcctttctcttgcag

SEQ ID NO: 18439 - protein, 72 aa, Homo sapiens
MGASVPTNPPPPLCHSGPPPSGRTELVLSSPHCARPRTGDPSPCPTPSHFDGVCDISCCEVKEGPLRPAPFS

SEQ ID NO: 18440 - DNA, 2137 bp, Homo sapiens
aaaagaggccagctctgcagccccctcggggacgcccccaccagctcaaattccgagtgcagaaaagaaaccggaccccccagtgaggcctgccaggcctcccggaccccttgttactcaggaacctcaccttggacggaatgggatgggggcttcggtgcccaccaaccccccacctccactctgccattccggcccacctccctctggccggacagaactggtgctctcttctccccactgtgcccgtccgcggaccggggacccttccccgtgccctaccccctcccattttgatggtgtctgtgacatttcctgttgtgaagtaaaagagggacccctgcgtcctgctcctttctcttgcagtctgcttgtccatgtgtctatttttccacttgtccatctgtccagtaagcaggtaatggtgacccatgctggtccgctcggacccccatcctcctctccccacagctgggccctgctcagctggtcctgctggatgcagtgcccctttggacccccttgtcgcctggcctcccactcccggccacctggcctggccagctctgccagctgttgctctgtcccggtgggagaaagtccagccaggcctccacttcccctggggcatcccaacctcagccctgcacagacccagcgtctgcccttatttgctcccctgcagacaaggacgagtgctccaaggataacggcggctgccagcaggactgcgtcaacacgttcggcagttatgagtgccaatgccgcagtggcttcgtcctccatgacaacaagcacgactgcaaagaagccggctgtgaccacaaggtgacatccaccagtggtaccatcaccagccccaactggcctgacaagtatcccagcaagaaggagtgcacgtgggccatctccagcacccccgggcaccgggtcaagctgaccttcatggagatggacatcgagtcccagcctgagtgtgcctacgaccacctagaggtgttcgacgggcgagacgccaaggcccccgtcctcggccgcttctgtgggagcaagaagcccgagcccgtcctggccacaggcagccgcatgttcctgcgcttctactcagataactcggtccagcgaaagggcttccaggcctcccacgccacagagtgcgggggccaggtacgggcagacgtgaagaccaaggacctttactcccacgcccagtttggcgacaacaactaccctgggggtgtggactgtgagtgggtcattgtggccgaggaaggctacggcgtggagctcgtgttccagacctttgaggtggaggaggagaccgactgcggctatgactacatggagctcttcgacggctacgacagcacagcccccaggctggggcgctactgtggctcagggcctcctgaggaggtgtactcggcgggagattctgtcctggtgaagttccactcggatgacaccatcaccaaaaaaggtttccacctgcgatacaccagcaccaagttccaggacacactccacagcaggaagtgaccactgcctgagcaggggcggggactggagcctgctgcccttggtcgcctagactggatagtgggggtgggcggaaggcaacgcaccatccctctcccccaggccccaggacctgcagggccaatggcctggtgagactgtccataggaggtgggggaactggactccggcataagccacttccccacaaacccccaccagcaaggggctggggccagggagcagagcttccacaagacatttcgaagtcatcattcctctcttagggggccctgcctggtggcaagagggaatgtcagcaggaccccatcgccatccctgtgtctctacacgctgtattgtgtatcaccgggggcattattttcattgtaatgttcatttcccacccctgctccagcctcgatttggttttattttgagcccccattccaccaccccagtttcctggggcacaagtgtctgtgcatgtcccccaggagccaccgtggggagccgatggggaggggatggagaaacaagacagggcttctctcaggcccagtggccggtcagccacaccagggcaccgcagccaataaaccgaaagtgttacagccaa

SEQ ID NO: 18441 - protein, 228 aa, Homo sapiens [sequence omitted]

SEQ ID NO: 18442 - DNA, 858 bp, Homo sapiens
cccagctctgctataactactaaatgagttgtgtagtctcaggcaagccacctcccatctctgggcctcacttccctcagccacaaacaggagcaaaaggtctctgctctccatgcctaggaggggtgctggggaaaaacaaaggactgcaccgatgtcaaagtattttgcaaagggagggagttctttgaatggcatcacttcctgctgtcccagtggactcttagggaagacggcacagccacttctctgctggagtgtggaggaagttttggagagaagcacagtgccccccaggcctggactctgccatccctaccccttgccccgcctctcctctggcacctggccaaggtctgctcccgagccctgatccttccccaagttccttccggtcaactcagcctgggggaggtctctggaagaagacacctggggacatccgatttggtgtgtgattcagaagaaagagcaaagaggggaggggacactagcctggcagccaggggacaccagggcagccaagctgcttcaggctccaccttgtcccagcccctgccagccacacgagggctgaagctctgctcctgggggaggttcagccaatgctgggtccagcagctgctgcagcttccaggagctttaacccttcctggggcacccaggctgcctgggatacagccatgagataggcaaggggacagggaggtgacaggagggccagtgtatttgaaagtgcatgcaagtgggtgtgccagtgtgtgtgtatgtgtgtgagagagagagagagagagagagggaaagagagagagatgggtaggaagacagtctgtctctttgaagccctcaggaaaggac

SEQ ID NO: 18443 - protein, 86 aa, Homo sapiens
MPRRGAGEKQRTAPMSKYFAKGGSSLNGITSCCPSGLLGKTAQPLLCWSVEEVLERSTVPPRPGLCHPYPLPRLSSGTWPRSAPEP

SEQ ID NO: 18444 - DNA, 1177 bp, Homo sapiens
ccaaagcccatgggtagcttggctgcctccagaagagatgcagagagctgtggggcgatctttcttagtcccactcaccccactcagggccaaccacagaatgccccctccctgctgagctgggtctctggggcttcccactccaggcctggatcccttccttctataaatagtctcctgcaccaccgtgactccctggctgctccttgccccaaagaaccctcttcctgcatgggagagctgtccctccttctccacctgcccaccgggacactccccctgctctctagaaaggaactctctttcttctcttggcactgggggcgtcaggctgtcggatgttccttcctcagctgggagtgggccgcctcatgctctgctggggcctggcatggaacgtgagacctgtaagctgtcccgcgggccccggcaccccgcccagctgtgcactttgctcactcgctctgccatggtgccatgactgtactgtgcccatgcgtgacctggactgtggaccctctgctgctccgcctctcccctccccactggctctgtctgctctcctgccaccctgctggccgggagcccctccccggggagttcttggtgaagtccttcccgggcctccttgtgtttttgcctcattcctactgtcacacaggtcacgagggtggactccctacaatcaacaaagcaaacagagagcctgtgggaggggctgacagcagcagccggctgtttgggggatgatggaggtgacatcaggcagaggagagtgcagcctcacagtgactttctcagaggtgacagagatgatggatgagcagctggattttcgtgatgaaggacggaagcagcagcgggccggcaaggccatacctcggtgagggacaggtggacaacggtcacctatctgtagccaggggcagttgtgtggccagctgtctctctgggatgagtcaggaggcctggaggcttggggagaggtgtggagaaggagagaacatggcccaggccctttccttccccctgtgctgacagcattgctgtgggggtggcccactgccctcccctggccctcatgtccccccggggctggggtccgcctgcctgtgctgtgcttgcgacgtgcatcaataaaccaccatggcctgagggccctgctcgtctcagtcca

SEQ ID NO: 18445 - protein, 130 aa, Homo sapiens
MGSLAASRRDAESCGAIFLSPTHPTQGQPQNAPSLLSWVSGASHSRPGSLPSINSLLHHRDSLAAPCPKEPSSCMGELSLLLHLPTGTLPLLSRKELSFFSWHWGRQAVGCSFLSWEWAASCSAGAWHGT

SEQ ID NO: 18446 - DNA, 3078 bp, Homo sapiens
tctctcctccacgctgctttgatttcgctcttgcctctcttcttgcgctgctcagctgggaacatcgtctcaccaggggcagcagcgacgcgctgcacagccagacaggagctggctgcggggcatggaagcagcctccttggcagccgggagaggagcaagcgcacgccactgcccgtgacccaggcgtccggctgctgtcccctgccggggagctcatccacgcagaggtctctccctgtcctccctgcgagcttttcctctgcagagcccagtggagccagccatgtaccgcggcaacgcttgctgaccccagtgaggagagaggcctgaatccgagggccctggcacctgtgagctcttggctgtcacctgccccaagcctcgcacctccgctccacagcagtccccacaggagacaaccctgacgggagcatggagctgctgtccacgccccacagcattgagatcaacaacatcacctgcgactccttccgcatctcctgggccatggaggacagtgacctggagagggtcacccattacttcattgaccttaacaagaaggagaataagaattccaacaagttcaagcaccgggacgtccccaccaagctcgtggccaaggcagtgccgctgcccatgacggtgagaggccactggttcctgagcccccgcacggagtacagtgtggccgtgcagacggcagtgaagcagagcgatggggagtacctggtgtccggctggagcgagacggtggagttctgcactggggattatgccaaggagcacctggctcagcttcaggagaaagctgagcagatcgcaggccgcatgctccgcttctccgtcttctaccgcaaccatcacaaggagtacttccagcatgccaggacccactgcgggaacatgctgcagccttacctgaaggacaacagtggcagccacggctcccccaccagcggtatgctccacggggtcttcttcagctgcaacacggagttcaacacgggccagcccccgcaggactccccctacggccgctggcgcttccagatcccagctcagcgcctcttcaatcccagcaccaacctctactttgcggacttctactgcatgtacacggcctaccactacgccatcctggtgctggcgcccaaaggctccctgggggaccgcttctgccgcgaccgcctgcccctcctggacattgcttgcaacaagttcctgacctgcagcgtggaggatggggagctggtcttccgccacgcccaggacctcatcctggagatcatctacactgagcccgtcgacctgtccctgggcaccctgggggagatcagtgggcaccagctcatgagtctgtctactgccgatgccaagaaggaccccagctgcaagacctgcaacatcagcgtgggccgctagggactcctggggagctggggggcgagggagagatgagcggaaggtggaggtgggtagcccaggttcagggagctggctttctctctcctgcccccctgctccctccactctgcccagctgccctcccctcgccccttggcattggaggcaacagacggtggtcctcttggtaagtgtggcccacacccagcctggtggacatggaaaggcttctcagcctctgtagttggcagctgggctggacttctggagaacttcccctttcctctggtttccttgtcctactgttctttgcctcgtccaggtctctatctcccaaagacctgcccacctcctgggctctcccagggaagcccctctgggccaaagcccatgggtagcttggctgcctccagaagagatgcagagagctgtggggcgatctttcttagtcccactcaccccactcagggccaaccacagaatgccccctccctgctgagctgggtctctggggcttcccactccaggcctggatcccttccttctataaatagtctcctgcaccaccgtgactccctggctgctccttgccccaaagaaccctcttcctgcatgggagagctgtccctccttctccacctgcccaccgggacactccccctgctctctagaaaggaactctctttcttctcttggcactgggggcgtcaggctgtcggatgttccttccttccataccccagcataccttctccttgcttagagtgcaggggtctgagacagcagccactggggttgaggagggggaggagacccctgagacccagaggtgccccttcctcagctgggagtgggccgcctcatgctctgctggggcctggcatggaacgtgagacctgtaagctgtcccgcgggccccggcaccccgcccagctgtgcactttgctcactcgctctgccatggtgccatgactgtactgtgcccatgcgtgacctggactgtggaccctctgctgctccgcctctcccctccccactggctctgtctgctctcctgccaccctgctggccgggagcccctccccggggagttcttggtgaagtccttcccgggcctccttgtgtttttgcctcattcctactgtcacacaggtcacgagggtggactccctacaatcaacaaagcaaacagagagcctgtgggaggggctgacagcagcagccggctgtttgggggatgatggaggtgacatcaggcagaggagagtgcagcctcacagtgactttctcagaggtgacagagatgatggatgagcagctggattttcgtgatgaaggacggaagcagcagcgggccggcaaggccatacctcggtgagggacaggtggacaacggtcacctatctgtagccaggggcagttgtgtggccagctgtctctctgggatgagtcaggaggcctggaggcttggggagaggtgtggagaaggagagaacatggcccaggccctttccttccccctgtgctgacagcattgctgtgggggtggcccactgccctcccctggccctcatgtccccccggggctggggtccgcctgcctgtgctgtgcttgcgacgtgcatcaataaaccaccatggcctgagggccctgctcgtctcagtcca

SEQ ID NO: 18447 - protein, 330 aa, Homo sapiens
MELLSTPHSIEINNITCDSFRISWAMEDSDLERVTHYFIDLNKKENKNSNKFKHRDVPTKLVAKAVPLPMTVRGHWFLSPRTEYSVAVQTAVKQSDGEYLVSGWSETVEFCTGDYAKEHLAQLQEKAEQIAGRMLRFSVFYRNHHKEYFQHARTHCGNMLQPYLKDNSGSHGSPTSGMLHGVFFSCNTEFNTGQPPQDSPYGRWRFQIPAQRLFNPSTNLYFADFYCMYTAYHYAILVLAPKGSLGDRFCRDRLPLLDIACNKFLTCSVEDGELVFRHAQDLILEIIYTEPVDLSLGTLGEISGHQLMSLSTADAKKDPSCKTCNISVGR

SEQ ID NO: 18448 - DNA, 2998 bp, Homo sapiens
gattcggtctggctctctcgttctttctcccttctctgcctctctctcctccacgctgctttgatttcgctcttgcctctcttcttgcgctgctcagctgggaacatcgtctcaccaggggcagcagcgacgcgctgcacagccagacaggagctggctgcggggcatggaagcagcctccttggcagccgggagaggagcaagcgcacgccactgcccgtgacccaggcgtccggctgctgtcccctgccggggagctcatccacgcagaggtctctccctgtcctccctgcgagcttttcctctgcagagcccagtggagccagtccccacaggagacaaccctgacgggagcatggagctgctgtccacgccccacagcattgagatcaacaacatcacctgcgactccttccgcatctcctgggccatggaggacagtgacctggagagggtcacccattacttcattgaccttaacaagaaggagaataagaattccaacaagttcaagcaccgggacgtccccaccaagctcgtggccaaggcagtgccgctgcccatgacggtgagaggccactggttcctgagcccccgcacggagtacagtgtggccgtgcagacggcagtgaagcagagcgatggggagtacctggtgtccggctggagcgagacggtggagttctgcactggggattatgccaaggagcacctggctcagcttcaggagaaagctgagcagatcgcaggccgcatgctccgcttctccgtcttctaccgcaaccatcacaaggagtacttccagcatgccaggacccactgcgggaacatgctgcagccttacctgaaggacaacagtggcagccacggctcccccaccagcggtatgctccacggggtcttcttcagctgcaacacggagttcaacacgggccagcccccgcaggactccccctacggccgctggcgcttccagatcccagctcagcgcctcttcaatcccagcaccaacctctactttgcggacttctactgcatgtacacggcctaccactacgccatcctggtgctggcgcccaaaggctccctgggggaccgcttctgccgcgaccgcctgcccctcctggacattgcttgcaacaagttcctgacctgcagcgtggaggatggggagctggtcttccgccacgcccaggacctcatcctggagatcatctacactgagcccgtcgacctgtccctgggcaccctgggggagatcagtgggcaccagctcatgagtctgtctactgccgatgccaagaaggaccccagctgcaagacctgcaacatcagcgtgggccgctagggactcctggggagctggggggcgagggagagatgagcggaaggtggaggtgggtagcccaggttcagggagctggctttctctctcctgcccccctgctccctccactctgcccagctgccctcccctcgccccttggcattggaggcaacagacggtggtcctcttggtaagtgtggcccacacccagcctggtggacatggaaaggcttctcagcctctgtagttggcagctgggctggacttctggagaacttcccctttcctctggtttccttgtcctactgttctttgcctcgtccaggtctctatctcccaaagacctgcccacctcctgggctctcccagggaagcccctctgggccaaagcccatgggtagcttggctgcctccagaagagatgcagagagctgtggggcgatctttcttagtcccactcaccccactcagggccaaccacagaatgccccctccctgctgagctgggtctctggggcttcccactccaggcctggatcccttccttctataaatagtctcctgcaccaccgtgactccctggctgctccttgccccaaagaaccctcttcctgcatgggagagctgtccctccttctccacctgcccaccgggacactccccctgctctctagaaaggaactctctttcttctcttggcactgggggcgtcaggctgtcggatgttccttccttccataccccagcataccttctccttgcttagagtgcaggggtctgagacagcagccactggggttgaggagggggaggagacccctgagacccagaggtgccccttcctcagctgggagtgggccgcctcatgctctgctggggcctggcatggaacgtgagacctgtaagctgtcccgcgggccccggcaccccgcccagctgtgcactttgctcactcgctctgccatggtgccatgactgtactgtgcccatgcgtgacctggactgtggaccctctgctgctccgcctctcccctccccactggctctgtctgctctcctgccaccctgctggccgggagcccctccccggggagttcttggtgaagtccttcccgggcctccttgtgtttttgcctcattcctactgtcacacaggtcacgagggtggactccctacaatcaacaaagcaaacagagagcctgtgggaggggctgacagcagcagccggctgtttgggggatgatggaggtgacatcaggcagaggagagtgcagcctcacagtgactttctcagaggtgacagagatgatggatgagcagctggattttcgtgatgaaggacggaagcagcagcgggccggcaaggccatacctcggtgagggacaggtggacaacggtcacctatctgtagccaggggcagttgtgtggccagctgtctctctgggatgagtcaggaggcctggaggcttggggagaggtgtggagaaggagagaacatggcccaggccctttccttccccctgtgctgacagcattgctgtgggggtggcccactgccctcccctggccctcatgtccccccggggctggggtccgcctgcctgtgctgtgcttgcgacgtgcatcaataaaccaccatggcctgagggccctgctcgtctcagtcca

SEQ ID NO: 18449 - protein, 330 aa, Homo sapiens; identical to SEQ ID NO: 18447

SEQ ID NO: 18450 - DNA, 2318 bp, Homo sapiens
gattcggtctggctctctcgttctttctcccttctctgcctctctctcctccacgctgctttgatttcgctcttgcctctcttcttgcgctgctcagctgggaacatcgtctcaccaggggcagcagcgacgcgctgcacagccagacaggagctggctgcggggcatggaagcagcctccttggcagccgggagaggagcaagcgcacgccactgcccgtgacccaggcgtccggctgctgtcccctgccggggagctcatccacgcagaggtctctccctgtcctccctgcgagcttttcctctgcagagcccagtggagccagtccccacaggagacaaccctgacgggagcatggagctgctgtccacgccccacagcattgagatcaacaacatcacctgcgactccttccgcatctcctgggccatggaggacagtgacctggagagggtcacccattacttcattgaccttaacaagaaggagaataagaattccaacaagttcaagcaccgggacgtccccaccaagctcgtggccaaggcagtgccgctgcccatgacggtgagaggccactggttcctgagcccccgcacggagtacagtgtggccgtgcagacggcagtgaagcagagcgatggggagtacctggtgtccggctggagcgagacggtggagttctgcactggggattatgccaaggagcacctggctcagcttcaggagaaagctgagcagatcgcaggccgcatgctccgcttctccgtcttctaccgcaaccatcacaaggagtacttccagcatgccaggacccactgcgggaacatgctgcagccttacctgaaggacaacagtggcagccacggctcccccaccagcggtatgctccacggggtcttcttcagctgcaacacggagttcaacacgggccagcccccgcaggactccccctacggccgctggcgcttccagatcccagctcagcgcctcttcaatcccagcaccaacctctactttgcggacttctactgcatgtacacggcctaccactacgccatcctggtgctggcgcccaaaggctccctgggggaccgcttctgccgcgaccgcctgcccctcctggacattgcttgcaacaagttcctgacctgcagcgtggaggatggggagctggtcttccgccacgcccaggacctcatcctggagatcatctacactgagcccgtcgacctgtccctgggcaccctgggggagatcagtgggcaccagctcatgagtctgtctactgccgatgccaagaaggaccccagctgcaagacctgcaacatcagcgtgggccgctagggactcctggggagctggggggcgagggagagatgagcggaaggtggaggtgggtagcccaggttcagggagctggctttctctctcctgcccccctgctccctccactctgcccagctgccctcccctcgccccttggcattggaggcaacagacggtggtcctcttggtaagtgtggcccacacccagcctggtggacatggaaaggcttctcagcctctgtagttggcagctgggctggacttctggagaacttcccctttcctctggtttccttgtcctactgttctttgcctcgtccaggtctctatctcccaaagacctgcccacctcctgggctctcccagggaagcccctctgggccaaagcccatgggtagcttggctgcctccagaagagatgcagagagctgtggggcgatctttcttagtcccactcaccccactcagggccaaccacagaatgccccctccctgctgagctgggtctctggggcttcccactccaggcctggatcccttccttctataaatagtctcctgcaccaccgtgactccctggctgctccttgccccaaagaaccctcttcctgcatgggagagctgtccctccttctccacctccactggggttgaggagggggaggagacccctgagacccagaggtgccccttcctcagctgggagtgggccgcctcatgctctgctggggcctggcatggaacgtgagacctgtaagctgtcccgcgggccccggcaccccgcccagctgtgcactttgctcactcgctctgccatggtgccatgactgtactgtgcccatgcgtgacctggactgtggaccctctgctgctccgcctctcccctcccctggccctcatgtccccccggggctggggtccgcctgcctgtgctgtgcttgcgacgtgcatcaataaaccaccatggcctgagggccctgctcgtctc

SEQ ID NO: 18451 - protein, 330 aa, Homo sapiens; identical to SEQ ID NO: 18447

SEQ ID NO: 18452 - DNA, 304 bp, Homo sapiens
gcgctcgggggtcttggcctccgggcggtggcgtggaggcgccaagatcagggtcccgggttttgtcggccaccacgccgcaatgtgaggattcgcctcggcggagcccctgggagcttcggggtagctgctcgggatggggcgaggggcgcggcgcggcgcagagagtgagacctggacttaagagtcggggagtcctgggccacaccgagccctgtctgcgggttctccatggtgaccttggagtgggaattggaataccaagtttgctctactgctggaggaatttaaagaacttttgttg

SEQ ID NO: 18453 - protein, 99 aa, Homo sapiens
ARGSWPPGGGVEAPRSGSRVLSATTPQCEDSPRRSPWELRGSCSGWGEGRGAAQRVRPGLKSRGVLGHTEPCLRVLHGDLGVGIGIPSLLYCWRNLKNF

SEQ ID NO: 18454 - DNA, 1930 bp, Homo sapiens
aagatggcggcgcccaggccctgccacgcagacttccgcccggcgcggagaccgaaggctggcggctggtcgcgttgcaggcaacatgtcggaaggaaacgccgccggcgagcccagcacgccgggagggccccgacctctcctgactggggcccgggggctcatcgggcggcggccggcgcctcccctcacccccggccgccttccctccatccgttccagggacctcaccctcgggggagtcaagaagaaaaccttcaccccaaatatcatcagtcggaagatcaaggaagagcccaaggaagaagtaactgtcaagaaggagaagcgtgaaagggacagagaccgacaacgagaggggcatggacgagggcgaggccgtccagaagtgatccagtctcactccatctttgagcagggcccagctgaaatgatgaagaaaaaagggaactgggataagacagtggatgtgtcagacatgggaccttctcatatcatcaacatcaaaaaagagaagagagagacagacgaagaaactaaacagatcttgcgtatgctggagaaggacgatttcctcgatgaccccggcctgaggaacgacactcgaaatatgcctgtgcagctgccgctggctcactcaggatggctttttaaggaagaaaatgacgaaccagatgttaaaccttggctggctggccccaaggaagaggacatggaggtggacatacctgctgtgaaagtgaaagaggagccacgagatgaggaggaagaggccaagatgaaggctcctcccaaagcagccaggaagactccaggcctcccgaaggatgtatctgtggcagagctgctgagggagctgagcctcaccaaggaagaggaactgctgtttctgcagctgccagacaccctccctggccagccacccacccaggacatcaagcctatcaagacagaggtgcagggcgaggacggacaggtggtgctcatcaagcaggagaaagaccgagaagccaaattggcagagaatgcttgtaccctggctgacctgacagagggtcaggttggcaagctactcatccgcaagtctggaagggtgcaactcctcttgggcaaggtgactctggacgtgaccatgggaactgcctgctccttcctgcaggagctggtgtccgtgggccttggagacagtaggacaggggagatgacagtcctgggacacgtgaagcacaaacttgtatgttcccctgattttgaatccctcttggatcacaaacaccggtaaaatgagcaggtggaggaggacggcgcctgtgcccacggctgctgcctgctccagacattttgttcttgaatctgtgagacccagaaggggcccactgagcccactcactccagcctttggcaaccattgttccaggtcccccagggcttcctcccacagcagctgtgaatggcacagtgaccttcctgcagcgtggagatggcacatccttgctgctggggacttggccctgctatttatttttgtatttatgtcttaatctcttccactgatgcatcctccaagggtagatggggagggtctgtgtgaaggggccggcttctcttggtgcctgctgggttgcaggggcaggaagcgtgtggactgcagcttctgctggtgctccccccgtcctcctggaggcagtataggagagagagcaaggattgagtctgagacttaagcactcggtcccagcttgccagttcctggttctgtgtccttggacaaactacctaacctttctgagcctcctatacctcatccgacacaaatggggatgatacctacctccagggttggcgtgaggattcatgggctattatagatgaaaactgcacaaggccagaaccagcaggcactcaataaacgttcatgtcctttttctct

SEQ ID NO: 18455 - protein, 398 aa, Homo sapiens; identical to SEQ ID NO: 2242

SEQ ID NO: 18456 - DNA, 2683 bp, Homo sapiens
gatggcggcgcccaggccctgccacgcagacttccgcccggcgcggagaccgaaggctggcggctggtcgcgttgcaggcaacatgtcggaaggaaacgccgccggcgagcccagcacgccgggagggccccgacctctcctgactggggcccgggggctcatcgggcggcggccggcgcctcccctcacccccggccgccttccctccatccgttccagggacctcaccctcgggggagtcaagaagaaaaccttcaccccaaatatcatcagtcggaagatcaaggaagagcccaaggaagaagtaactgtcaagaaggagaagcgtgaaagggacagagaccgacaacgagaggggcatggacgagggcgaggccgtccagaagtgatccagtctcactccatctttgagcagggcccagctgaaatgatgaagaaaaaagggaactgggataagacagtggatgtgtcagacatgggaccttctcatatcatcaacatcaaaaaagagaagagagagacagacgaagaaactaaacagatcttgcgtatgctggagaaggacgatttcctcgatgaccccggcctgaggaacgacactcgaaatatgcctgtgcagctgccgctggctcactcaggatggctttttaaggaagaaaatgacgaaccagatgttaaaccttggctggctggccccaaggaagaggacatggaggtggacatacctgctgtgaaagtgaaagaggagccacgagatgaggaggaagaggccaagatgaaggctcctcccaaagcagccaggaagactccaggcctcccgaaggatgtatctgtggcagagctgctgagggagctgagcctcaccaaggaagaggaactgctgtttctgcagctgccagacaccctccctggccagccacccacccaggacatcaagcctatcaagacagaggtgcagggcgaggacggacaggtggtgctcatcaagcaggagaaagaccgagaagccaaattggcagagaatgcttgtaccctggctgacctgacagagggtcaggttggcaagctactcatccgcaagtctggaagggtgcaactcctcttgggcaaggtgactctggacgtgaccatgggaactgcctgctccttcctgcaggagctggtgtccgtgggccttggagacagtaggacaggggagatgacagtcctgggacacgtgaagcacaaacttgtatgttcccctgattttgaatccctcttggatcacaaacaccggtaaaatgagcaggtggaggaggacggcgcctgtgcccacggctgctgcctgctccagacattttgttcttgaatctgtgagacccagaaggggcccactgagcccactcactccagcctttggcaaccattgttccaggtcccccagggcttcctcccacagcagctgtgaatggcacagtgaccttcctgcagcgtggagatggcacatccttgctgctggggacttggccctgctatttatttttgtatttatgtcttaatctcttccactgatgcatcctccaagggtagatggggagggtctgtgtgaaggggccggcttctcttggtgcctgctgggttgcaggggcaggaagcgtgtggactgcagcttctgctggtgctccccccgtcctcctggaggcagtataggagagagagcaaggattgagtctgagacttaagcactcggtcccagcttgccagttcctggttctgtgtccttggacaaactacctaacctttctgagcctcctatacctcatccgacacaaatggggatgatacctacctccagggttggcgtgaggattcatgggctattatagatgaaaactgcacaaggccagaaccagcaggcactcaataaacgttcatgtcctttttctctacctgagtctattttcaaacaaaatagagattctaaatctcccagaagcagcgactagagctgctcccgtccccactcttgccccttcctgctttatatcccgtcctcaccctgggcctgatgccctaaatttatggtgtcagattgttctatgcctttttctcctggctcctgttagccaggtgcctcctgtgtgagttactgtaatagctgcaggtaatagaaaggaagaagtcagagacccctcccagcaccctacaaaagcctttgggggacatgttgggcccaggacatgttccctgcactctttcctttgcagttagtactcatgtatgagccgaagtcatatattgctaacaaaaaaactaaatccttcataagagaagttagggatgtattgaataatggcctctttgacacttggccgatgatgcccacttcaaaaactttgggtttcagaggcctgcccgtctcctgtcctagcactgccagagccacctactcagtgttacttttttgggtctgtgatcctgttccctttaccaggtcattgtactgtgttgtccctggaggaacagcttctcctcttgtcttgacagtagggctggggttttccctggttcagctggggagacgtttgcaggttagaaaaaggtctcatgcggcagcgtgtgtggctgttagacgctgatggcacaacttccctttgctggcgtcgtggcacctggcctctgggacagtatgaaccatagggg

SEQ ID NO: 18457 - protein, 398 aa, Homo sapiens; identical to SEQ ID NO: 2242

SEQ ID NO: 18458 - DNA, 3167 bp, Homo sapiens
tgcttttaaattagagtgaacatgaggcatttattcggtgccagacagataactgcctataacaggatgtgatcagcacaagtaacagaaaattagcctgacggtggcttaagcaatgggaatgtttatctcacatagcaaaaagtctgtaaatagatggttctagagttgggtggaagccaaaatgtcatcaggatttccttggaaccgtctgctttgccatcctcagtattgcagaatggctgctcctgcgccaagcatcattctgcaaatgatggtgtccacagccagagtggacagtagtacaggagccttctcattctgcccttatccgggaataaccgtcagcagctccagcaacctcccccctgtctctttatagagtggggccacgtgcccactcttggaccaggccctggcaaagggggatgggtcgactagtgtatcccctggcactgagcacacttgcccttgagctggggttttgttagtagggaggaagctggagtggcagttggatagacaattcatagtagctgctgccatgttcaaaaaatgctgcaatgtaaaatcataaagtattcatctaggcataactttttaaaatattcagtcaccttttattctactaaaatcaattttaacattttagtgtatattattttattttagattcagcaggtacatgagcatgttagttttgttttgttttgttttgttctgttttgttttttgagatggagtctcactctgtcgcccagtggtgtgatcttggcttactgcaactctgtctcccaggttcaagtgatcctcccgcctcagccccccagatagctgggattacaggcacatgccaccacacctggctaatttttgtatttttagtagagacgggagtttcaccatgttggccaggctggtctcaaactcctcacctcaagtgatctacctgcctcggcctcccaaagtgttcgaattacaggcgtgagccaccacacccagcccggctttattcttaaagtgacctggtgagccagctggtgtggagatgaggcgggaagcagggctgatggagtccctggacagtggatggcagtggcttggccaggccgctaacagcaggggcactgggaagtgattggattctagatactgatttcaagggtagcacacacgtgatctgctgatagattccatgtcaggtgtgagagggaggagagtcaagctcatccacagctctggcagcggaagacggccaaagtgaagaaggtggcctcaagtttacctccaccttccaaacctcaactggtaaaacctcatgcatgcccagaatgctagcacaagagatttagggaaatgtgggtattttgctttctggccctgcagttcaggttccaccttataaaatgggagtggcgtgggtggtgggcgccaccagccatattcacgggagttagcataagggttcacagtttgagtgaagcttcctgagactgtgccgtgctgccaacacagttctctccgattcattccctcaaaacagtatattcccaatgaaagcacgaccagtacttaaactagccatgttcagtgtggctctcagacctttccccagggcaagatgatcacaagaattcctttaggaacgtctcttaaattgtacaactaaagtttaatggttatattagaatccgtcttcgtactatgaaaattcacccaactgatctcccatttctgggatatttagattttttctagtttttcatcgtttaaaaaatgatgcagcctggggtggtggctcatgtctataatcctagcagtttgggaggccaaggctggtggatcacttgagctcaggagtttgagaccagcctgggcaacatggtgaaaccccatctctaccaaaaatataaaacttagccaggcatggtggcttgctcctgtactcccagctacttggggggctgaagtgggaggattgcatgagcccagaagtgggaggttgcagtgagctgagacgagatcgcaccactgcactctagcctgggtgacagtgagaacttgtctcaaaaaataaataaataaataaaatccattaaattgccagtgtcctcaattatttccttaggagtctctatttaaaatggttttcctgaccagactgggcaatgtagcaagacctggtctctagaaaaaaaaaattttttttaattaactgggcgtggtgatatgaggttatatagcgccagctactctgaaggctgacgtgcgaggatcagttgagcccaggagtttgttaagtccaatcctatgagatttttaaggattttgatagatttttccctccagaatgtttgcatctattcacatgtgcatcagcagtgcatttgtagttaaatgtgtagttaacgttctgtttttaaaactatacaaatgttgggccaggcgccatggttcctgcctgtaatcccagcacttgggaggccaaggtgggtggatcacttgaggccaggagtttgagaccagcctggccaaaatggtgaaaccctatcactacaaaaaataaaaaattagctgggcccatggtggcacgcgcctgtaatcccagctactcaggtaactgaggcccaagaattgcctgaaccagagaattgcttgaagccaggaggcggaggttgcagtgagctgagatcacgccactacactccagcctgggggacagcgtgaaactgtgtctcaaaaaaaatatatatatatatatacacacacacacacacacacacacacacgtacatgtgtgtgtgcatgtgtgcaaatgttgggccaggcagcgtggttcctgcctgtaatcccagcactttgggaggccaaggtgggcggatcacctgaggtcaggagttcgagacaagcctaactaacatggagaaaccctgtctctactaaaaatataaagttagccgggtgtggtggtgcatgcctgtaatcccagctactcaggagactgaggcaggagaatcacatgaacctgggaggtggaggttgcggtgagccgagatcacaccattgcattccagcctgggcaacaagagtgaaactttgtctcaaaaaaaaaaaagaaaagaaaatatggtaaatgcgtgatttttattaaatatataaactgatac

SEQ ID NO: 18459 - protein, 45 aa, Homo sapiens
MPPHLANFCIFSRDGSFTMLARLVSNSSPQVIYLPRPPKVFELQA

SEQ ID NO: 18460 - DNA, 592 bp, Homo sapiens
ccctttctgggggcaactcctataaacagatttagcctaagactcgcgtgttgaaattgacttgccccattcctgccagttaagaggattagcgatacaggtggtgaaaaagaaacgatgacacccctaagacctgagccccttctgggccccacactccacctgtagaactctgatggggccttgtgcggccgaaccacaatccaagagaggtgttcacatcatgtgtcgctagccacagccatctcaaggggaaatgccccaaatgtagaagtatctgacaccaggactgggggttggagcactggatgaacagcgtgtgtgccactctttcactgtgcaccgtcctaagaaagaagcctgtttccctttgaagagcctagtgctgactgcccaattcaatcggaccacgcagggcagtctgaggattaaaagatgctacctttaattccttcggctaattcagaagtatgtgaaacacaacatactcattaacatggaagaactggatgtgtgtgcatgtgggtgtgtattatttatttttcagagacaaggtttcaccatgttgcccaggctggtcttgaactcctgg

SEQ ID NO: 18461 - protein, 31 aa, Homo sapiens
MEELDVCACGCVLFIFQRQGFTMLPRLVLNS

SEQ ID NO: 18462 - DNA, 513 bp, Homo sapiens
cggaaggagcgctgggagttatgtgaacctcagcgttaaaatgtgttagggtttggagatcctgactccctttctgggggcaactcctataaacagatttagcctaagactcgcgtgttgaaattgacttgccccattcctgccagttaagaggattagcgatacaggtggtgaaaaagaaacgatgacacccctaagacctgagccccttctgggccccacactccacctgtagaactctgatggggccttgtgcggccgaaccacaatccaagagaggtgttcacatcatgtgtcgctagccacagccatctcaaggggaaatgccccaaatgtagaagtatctgacaccaggactgggggttggagcactggatgaacagcgtgtgtgccactctttcactgtgcaccgtcctaagaaagaagcctgtttccctttgaagagcctagtgctgactgcccaattcaatcggaccacgcagggcagtctgaggattaaaagatgctaccttt

SEQ ID NO: 18463 - protein, 57 aa, Homo sapiens
KYLTPGLGVGALDEQRVCHSFTVHRPKKEACFPLKSLVLTAQFNRTTQGSLRIKRCY

SEQ ID NO: 18464 - DNA, 509 bp, Homo sapiens
gagttttgcctctctcactggcagcaacccagcgcttccattgctgacctctaccgacctctacctgtggtccttcctctactgcagcagagacactgttttcttcctttgttcttccaaccccatggggaatatcacagaagtgaagtgcaattctcatcatgtcatatcaagagcacacactaacaaacaacatgacttattgctgaatattgaacttgatcacctggctgaggtagtgtttgccagatttctctgtaaaggtgaataaactgacactggaacattcaggaacttcttcatggtcatggtcacccagctagagtgtggaagccaggctgtctgattccaggatctgtgttcttaatcctatacataaggaagccataatgagtcaaccactatttttaagattcacagatgttcgggtccaattcaccagaatgccaagttatacagggttgtggaatcaaaaactgcaattagtaataaaatgtgatgctatctag

SEQ ID NO: 18465 - protein, 48 aa, Homo sapiens
MGNITEVKCNSHHVISRAHTNKQHDLLLNIELDHLAEVVFARFLCKGE

SEQ ID NO: 18466 - DNA, 751 bp, Homo sapiens
gagttttgcctctctcactggcagcaacccagcgcttccattgctgacctctaccgacctctacctgtggtccttcctctactgcagcagagacactgttttcttcctttgttcttccaaccccatggggaatatcacagaagtgaagtgcaattctcatcatgtcatatcaagagcacacactaacaaacaacatgacttattgctgaatattgaacttgatcacctggctgaggtagtgtttgccagatttctctgtaaaggtgaataaactgacactggaacattcaggaacttcttcatggtcatggtcacccagctagagtgtggaagccaggctgtctgattccaggatctgtgttcttaatcctatacataaggaagccataatgagtcaaccactatttttaagattcacagatgttcgggtccaattcaccagaatgccaagttatacagggttgtggaatcaaaaactgcaattagtaataaaatgtgatgctatctagaatgtttttcatacatatatatgcttcttgggactctccctgcaggttaagagaaattgagaaacgatggagaatttaagtgttttagatcctacatacattagacttaaaaatagtaactatgtacatgagtatttgtaaacttaagaatgaacataacatgaaccatgtggcacctataaaatgaaaataaaatacctacaaaccaaatgagagcaataaaagaagctttaaggactttc

SEQ ID NO: 18467 - protein, 48 aa, Homo sapiens; identical to SEQ ID NO: 18465

SEQ ID NO: 18468 - DNA, 865 bp, Homo sapiens
gttttgcctctctcactggcagcaacccagcgcttccattgctgacctctaccgacctctacctgtggtccttcctctactgcagcagagacactgttttcttcctttgttcttccaaccccatggcacagaaacactctccactgcggccaaggattgcaggagaggtggcatcagtgattcaagacttcttttcctacctcttcagtgtttctttcagtgatctgaagttaaagccagggggaatatcacagaagtgaagtgcaattctcatcatgtcatatcaagagcacacactaacaaacaacatgacttattgctgaatattgaacttgatcacctggctgaggtagtgtttgccagatttctctgtaaaggtgaataaactgacactggaacattcaggaacttcttcatggtcatggtcacccagctagagtgtggaagccaggctgtctgattccaggatctgtgttcttaatcctatacataaggaagccataatgagtcaaccactatttttaagattcacagatgttcgggtccaattcaccagaatgccaagttatacagggttgtggaatcaaaaactgcaattagtaataaaatgtgatgctatctagaatgtttttcatacatatatatgcttcttgggactctccctgcaggttaagagaaattgagaaacgatggagaatttaagtgttttagatcctacatacattagacttaaaaatagtaactatgtacatgagtatttgtaaacttaagaatgaacataacatgaaccatgtggcacctataaaatgaaaataaaatacctacaaaccaaatgagagcaataaaagaagctttaaggactttc

SEQ ID NO: 18469 - protein, 45 aa, Homo sapiens
MAQKHSPLRPRIAGEVASVIQDFFSYLFSVSFSDLKLKPGGISQK

SEQ ID NO: 18470 - DNA, 595 bp, Homo sapiens
agcgcttccattgctgacctctaccgacctctacctgtggtccttcctctactgcagcagagacactgttttcttcctttgttcttccaaccccatggcacagaaacactctccactgcggccaaggattgcaggagaggtggcatcagtgattcaagacttcttttcctacctcttcagtgtttctttcagtgatctgaagttaaagccagggggaatatcacagaagtgaagtgcaattctcatcatgtcatatcaagagcacacactaacaaacaacatgacttattgctgaatattgaacttgatcacctggctgaggtagtgtttgccagatttctctgtaaaggtgaataaactgacactggaacattcaggaacttcttcatggtcatggtcacccagctagagtgtggaagccaggctgtctgattccaggatctgtgttcttaatcctatacataaggaagccataatgagtcaaccactatttttaagattcacagatgttcgggtccaattcaccagaatgccaagttatacagggttgtggaatcaaaaactgcaattagtaataaaatgtgatgctatctag

SEQ ID NO: 18471 - protein, 45 aa, Homo sapiens; identical to SEQ ID NO: 18469

SEQ ID NO: 18472 - DNA, 3892 bp, Homo sapiens
agaatttttttgattccttcttatttggagaaatctccagctgctctgatgatagcctaagaagactgcatgctgcttcctctcgatgccaagccagaccctctcacaacctcggatctcagtccttcatggagacctggtcccagcaggaatggcagtgcaggaaattggcgcccagatggttcttccatgtgaagttgtctcgggctctgggctgacgagagaacacctggtaaccaggtcatggttgagctggggaagtttgaaaggaaggagtttaaaagttccagtttgcaagatggacatacaaaaatggaggaagcacctacgcatcttaattcatttcttaagaaagaaggattgaccttcaacaggaaaagaaaatgggaattggacagctaccccattatgctctggtggtccccgctgacgggggagactgggaggttaggccaatgtggagcagatgcttgtttcttcaccatcaaccggacctacctccatcatcacatgaccaaagcattcctcttctatggtactgactttaacatagatagcttacctctgcctcggaaagcccatcatgactgggctgtttttcatgaagagtccccgaaaaacaattataagctctttcataaaccagtgatcaccttgttcaactacactgccacgttcagcaggcattcccacttgccactaactacccaatacttggagagcattgaagtcctgaagtcactccgatacctagttcctttgcagtccaaaaacaagcttagaaaaagacttgctccgctggtgtatgtacagtcagactgtgacccaccatcagacagggacagctatgttcgcgagctgatgacttacatcgaggtcgattcctatggtgaatgtttacgaaacaaagacctccctcagcagctgaaaaatccagcctctatggatgccgatggcttttataggatcattgcacagtataagtttatcctagcttttgagaatgcagtttgtgatgactacatcactgagaagttctggaggccactgaaactgggggtagtccctgtatattacggatcccccagcatcacagactggcttccaagtaacaaaagtgctattcttgtatcagaattttctcaccccagggaactggcaagttacatcagacgactggattctgatgacagattgtatgaggcctatgtagaatggaagctgaagggtgagatctctaaccagcgacttctgacagctctcagggaacggaaatggggagtgcaagacgtcaaccaggacaattacatcgatgcatttgagtgtatggtgtgcaccaaggtgtgggctaatatcaggcttcaggaaaagggcttaccacccaaaagatgggaggcagaagatacccacctgagttgcccagagcccacagtgtttgctttctcaccactccggactccacctttgagctctttgcgagagatgtggatttccagctttgaacaatccaagaaagaagcccaggcactaaggtggctggttgataggaatcaaaacttttcatctcaagagttttggggcctagtattcaaggactgatttcaaaaatgatcagaatgaaacagactagagccttcttgaggtttattttctaggttgccttaatatttgaacataatagctattctgttgactatccatcaggataataattagttgctgcagtactcataatgagccctttcaaggaatagatgtaaattacccttaggggtagccactatattttttatactaaaaaaggaaatatttcttatggacactggttatcttccatgtccgtgtctgtggacccacatacttactgccttttgtggaaattcacctagagtgagtactttccttgtgcaatggagggagacgatctagctatagattcttgatactcacctcactctcaacagcttattggtatttggcaaacctggtatcctgcagccgagcatgaacatgaaatacattagaacttggcaatgagagatcccatctgttggtttccagggatgtaagtgagtaataaaagctgtttcaagtttatccactatccactcttcaagtgaaaagaacttatgtgtgtctaccttcttctccataccctgagccacctctctcactttctttagttgtgccttgccctatcgcctcccattttcccttcaaagtagaatgtcttgtaaagacacagtaactcctgtgtgttttgattagtgagatgttaccacttaccccttctgctgcgcagaataatattaagaattgctatgcttatgattcaggctggacagcctggacattttgagcagcgcgagagtagaagtgaatacccccaggaactccaattgtgctgaagctgatttgtctgttcgtaggatgatgtgcagcctgtcacagtggcagccacaggcattcagtttgtgggcatttcctgtcatttcggatcctgctatagggaaggttcagctctcctgtctggggcatctactggagcacctcagaagacaaggaggaaaacactggctcatgttttctttccatgtgagggaggggaggtttctagatgatactaaaagcctgttgccactgttgtgtcatgatttccattcttcatcatggaaagccacaagcctcagaaggcagccagaggacaggaagagtctgtgatgctcatgtctgtgtcatggcatgagggggaattgacgagtgcttgcttagcatcagctctcattgtattgaaggctgtgcccttggtgtgcttagcagtgagcagcgtcttcattaggtagctctggctgggctttgtcagccagcgtgtgagaaaggagaaccaaaaccaatacctccttatagaagccagaaggatcacattggatgagagaaggtgtctataactgggttcttcccaatcccagctctttcattaactaaatatgatcttggacatatctcttaacctccatcggccttagtttttgcatccaaaaagaagtgattgggctggtcttggaaggtttttttcttttttttcccctgtgtaacattcttcattgttcatcaacatttaagaaatttaattttgtagatgtttttactaaagagggtaacaaactattttggaactgctgtatgttattcaagggaagcacgctgtttggaggaaggagcatacttaatgggtagtattgaggatgaaagggaatttctctctctgccattttatttgataatattaaagaaataaagactggaaagggggattccttgttaaaggtcagattttaaattgcatataaaatgaagtgagttgtgtttttttgaaccctcaaaagaaagcctgagaggtgatttatgcctctggcaaggtattatcatgataacttcagttcttctccataaatgccttcagcaaatacccagtgcttatgtgctgtgtgtatgtcttaaaccttaactttcatgaaatctcattccatcttagttcttcatcaagtccatagataaaatcctctctaagcgtttctgaagtatgtatccctgaacaaatttagtgaaataaaatcattaatctgtgttgatcccattttgccatacctttcactttacctcactgtctccttttgtgaaatattttaagaaagcaacgtccctcacaggactgttttgaggaatgcctcatggctgtgaaggagtttgtacaatgcaacattttgcttagcccttcagtacattttacttggattgttttcaagaactttattttttttgagaagaagtcttgctctatcacctaggctggagtgcagtggtgcgatctcagctcactgcaacctccacc

SEQ ID NO: 18473 - protein, 451 aa, Homo sapiens
MVELGKFERKEFKSSSLQDGHTKMEEAPTHLNSFLKKEGLTFNRKRKWELDSYPIMLWWSPLTGETGRLGQCGADACFFTINRTYLHHHMTKAFLFYGTDFNIDSLPLPRKAHHDWAVFHEESPKNNYKLFHKPVITLFNYTATFSRHSHLPLTTQYLESIEVLKSLRYLVPLQSKNKLRKRLAPLVYVQSDCDPPSDRDSYVRELMTYIEVDSYGECLRNKDLPQQLKNPASMDADGFYRIIAQYKFILAFENAVCDDYITEKFWRPLKLGVVPVYYGSPSITDWLPSNKSAILVSEFSHPRELASYIRRLDSDDRLYEAYVEWKLKGEISNQRLLTALRERKWGVQDVNQDNYIDAFECMVCTKVWANIRLQEKGLPPKRWEAEDTHLSCPEPTVFAFSPLRTPPLSSLREMWISSFEQSKKEAQALRWLVDRNQNFSSQEFWGLVFKD

SEQ ID NO: 18474 - DNA, 4090 bp, Homo sapiens
ggtcttcccggcgcccaggcttgggctcatagggagaaaggaagctgcgctgcattctgcgggacgaaccctgctccgcgcgagaatttttttgattccttcttatttggagaaatctccagctgctctgatgatagcctaagaagactgcatgctgcttcctctcgatgccaagccagaccctctcacaacctcggatctcagtccttcatggagacctggtcccagcaggaatggcagtgcaggaaattggcgcccagatggttcttccatgtgaagttgtctcgggctctgggctgacgagagaacacctggtaaccaggttagccctctgtcagtcacccagggcagggcagcatggtgcggattcagaggaggaagcttttggcatcttgcctgtgcgtcacagccaccgtctttctgcttgtcacactccaggtcatggttgagctggggaagtttgaaaggaaggagtttaaaagttccagtttgcaagatggacatacaaaaatggaggaagcacctacgcatcttaattcatttcttaagaaagaaggattgaccttcaacaggaaaagaaaatgggaattggacagctaccccattatgctctggtggtccccgctgacgggggagactgggaggttaggccaatgtggagcagatgcttgtttcttcaccatcaaccggacctacctccatcatcacatgaccaaagcattcctcttctatggtactgactttaacatagatagcttacctctgcctcggaaagcccatcatgactgggctgtttttcatgaagagtccccgaaaaacaattataagctctttcataaaccagtgatcaccttgttcaactacactgccacgttcagcaggcattcccacttgccactaactacccaatacttggagagcattgaagtcctgaagtcactccgatacctagttcctttgcagtccaaaaacaagcttagaaaaagacttgctccgctggtgtatgtacagtcagactgtgacccaccatcagacagggacagctatgttcgcgagctgatgacttacatcgaggtcgattcctatggtgaatgtttacgaaacaaagacctccctcagcagctgaaaaatccagcctctatggatgccgatggcttttataggatcattgcacagtataagtttatcctagcttttgagaatgcagtttgtgatgactacatcactgagaagttctggaggccactgaaactgggggtagtccctgtatattacggatcccccagcatcacagactggcttccaagtaacaaaagtgctattcttgtatcagaattttctcaccccagggaactggcaagttacatcagacgactggattctgatgacagattgtatgaggcctatgtagaatggaagctgaagggtgagatctctaaccagcgacttctgacagctctcagggaacggaaatggggagtgcaagacgtcaaccaggacaattacatcgatgcatttgagtgtatggtgtgcaccaaggtgtgggctaatatcaggcttcaggaaaagggcttaccacccaaaagatgggaggcagaagatacccacctgagttgcccagagcccacagtgtttgctttctcaccactccggactccacctttgagctctttgcgagagatgtggatttccagctttgaacaatccaagaaagaagcccaggcactaaggtggctggttgataggaatcaaaacttttcatctcaagagttttggggcctagtattcaaggactgatttcaaaaatgatcagaatgaaacagactagagccttcttgaggtttattttctaggttgccttaatatttgaacataatagctattctgttgactatccatcaggataataattagttgctgcagtactcataatgagccctttcaaggaatagatgtaaattacccttaggggtagccactatattttttatactaaaaaaggaaatatttcttatggacactggttatcttccatgtccgtgtctgtggacccacatacttactgccttttgtggaaattcacctagagtgagtactttccttgtgcaatggagggagacgatctagctatagattcttgatactcacctcactctcaacagcttattggtatttggcaaacctggtatcctgcagccgagcatgaacatgaaatacattagaacttggcaatgagagatcccatctgttggtttccagggatgtaagtgagtaataaaagctgtttcaagtttatccactatccactcttcaagtgaaaagaacttatgtgtgtctaccttcttctccataccctgagccacctctctcactttctttagttgtgccttgccctatcgcctcccattttcccttcaaagtagaatgtcttgtaaagacacagtaactcctgtgtgttttgattagtgagatgttaccacttaccccttctgctgcgcagaataatattaagaattgctatgcttatgattcaggctggacagcctggacattttgagcagcgcgagagtagaagtgaatacccccaggaactccaattgtgctgaagctgatttgtctgttcgtaggatgatgtgcagcctgtcacagtggcagccacaggcattcagtttgtgggcatttcctgtcatttcggatcctgctatagggaaggttcagctctcctgtctggggcatctactggagcacctcagaagacaaggaggaaaacactggctcatgttttctttccatgtgagggaggggaggtttctagatgatactaaaagcctgttgccactgttgtgtcatgatttccattcttcatcatggaaagccacaagcctcagaaggcagccagaggacaggaagagtctgtgatgctcatgtctgtgtcatggcatgagggggaattgacgagtgcttgcttagcatcagctctcattgtattgaaggctgtgcccttggtgtgcttagcagtgagcagcgtcttcattaggtagctctggctgggctttgtcagccagcgtgtgagaaaggagaaccaaaaccaatacctccttatagaagccagaaggatcacattggatgagagaaggtgtctataactgggttcttcccaatcccagctctttcattaactaaatatgatcttggacatatctcttaacctccatcggccttagtttttgcatccaaaaagaagtgattgggctggtcttggaaggtttttttcttttttttcccctgtgtaacattcttcattgttcatcaacatttaagaaatttaattttgtagatgtttttactaaagagggtaacaaactattttggaactgctgtatgttattcaagggaagcacgctgtttggaggaaggagcatacttaatgggtagtattgaggatgaaagggaatttctctctctgccattttatttgataatattaaagaaataaagactggaaagggggattccttgttaaaggtcagattttaaattgcatataaaatgaagtgagttgtgtttttttgaaccctcaaaagaaagcctgagaggtgatttatgcctctggcaaggtattatcatgataacttcagttcttctccataaatgccttcagcaaatacccagtgcttatgtgctgtgtgtatgtcttaaaccttaactttcatgaaatctcattccatcttagttcttcatcaagtccatagataaaatcctctctaagcgtttctgaagtatgtatccctgaacaaatttagtgaaataaaatcattaatctgtgttgatcccattttgccatacctttcactttacctcactgtctccttttgtgaaatattttaagaaagcaacgtccctcacaggactgttttgaggaatgcctcatggctgtgaaggagtttgtacaatgcaacattttgcttagcccttcagtacattttacttggattgttttcaagaactttattttttttgagaagaagtcttgctctatcacctaggctggagtgcagtggtgcgatctcagctcactgcaacctccacc

SEQ ID NO: 18475 - protein, 479 aa, Homo sapiens; identical to SEQ ID NO: 2244

SEQ ID NO: 18476 - DNA, 1288 bp, Homo sapiens
gggcttaccacccaaaagatgggaggcagaagatacccacctgagttgcccagagcccacagtgtttgctttctcaccactccggactccacctttgagctctttgcgagagatgtggatttccagctttgaacaatccaagaaagaagcccaggcactaagcttattggtatttggcaaacctggtatcctgcagccgagcatgaacatgaaatacattagaacttggcaatgagagatcccatctgttggtttccagggatgtaagtgagtaataaaagctgtttcaagtttatccactatccactcttcaagtgaaaagaacttatgtgtgtctaccttcttctccataccctgagccacctctctcactttctttagttgtgccttgccctatcgcctcccattttcccttcaaagtagaatgtcttgtaaagacacagtaactcctgtgtgttttgattagtgagatgttaccacttaccccttctgctgcgcagaataatattaagaattgctatgcttatgattcaggctggacagcctggacattttgagcagcgcgagagtagaagtgaatacccccaggaactccaattgtgctgaagctgatttgtctgttcgtaggatgatgtgcagcctgtcacagtggcagccacaggcattcagtttgtgggcatttcctgtcatttcggatcctgctatagggaaggttcagctctcctgtctggggcatctactggagcacctcagaagacaaggaggaaaacactggctcatgttttctttccatgtgagggaggggaggtttctagatgatactaaaagcctgttgccactgttgtgtcatgatttccattcttcatcatggaaagccacaagcctcagaaggcagccagaggacaggaagagtctgtgatgctcatgtctgtgtcatggcatgagggggaattgacgagtgcttgcttagcatcagctctcattgtattgaaggctgtgcccttggtgtgcttagcagtgagcagcgtcttcattaggtagctctggctgggctttgtcagccagcgtgtgagaaaggagaaccaaaaccaatacctccttatagaagccagaaggatcacattggatgagagaaggtgtctataactgggttcttcccaatcccagctctttcattaactaaatatgatcttggacatatctcttaacctccatcggccttagtttttgcatccaaaaagaagtgattgggctggtcttggaaggtttttttcttttttttcccctg

SEQ ID NO: 18477 - protein, 40 aa, Homo sapiens
MWISSFEQSKKEAQALSLLVFGKPGILQPSMNMKYIRTWQ

SEQ ID NO: 18478 - DNA, 2294 bp, Homo sapiens
ggtcttcccggcgcccaggcttgggctcatagggagaaaggaagctgcgctgcattctgcgggacgaaccctgctccgcgcgagaatttttttgattccttcttatttggagaaatctccagctgctctgatgatagcctaagaagactgcatgctgcttcctctcgatgccaagccagaccctctcacaacctcggatctcagtccttcatggagacctggtcccagcaggaatggcagtgcaggaaattggcgcccagatggttcttccatgtgaagttgtctcgggctctgggctgacgagagaacacctggtaaccaggttagccctctgtcagtcacccagggcagggcagcatggtgcggattcagaggaggaagcttttggcatcttgcctgtgcgtcacagccaccgtctttctgcttgtcacactccaggtcatggttgagctggggaagtttgaaaggaaggagtttaaaagttccagtttgcaagatggacatacaaaaatggaggaagcacctacgcatcttaattcatttcttaagaaagaaggattgaccttcaacaggaaaagaaaatgggaattggacagctaccccattatgctctggtggtccccgctgacgggggagactgggaggttaggccaatgtggagcagatgcttgtttcttcaccatcaaccggacctacctccatcatcacatgaccaaagcattcctcttctatggtactgactttaacatagatagcttacctctgcctcggaaagcccatcatgactgggctgtttttcatgaagagtccccgaaaaacaattataagctctttcataaaccagtgatcaccttgttcaactacactgccacgttcagcaggcattcccacttgccactaactacccaatacttggagagcattgaagtcctgaagtcactccgatacctagttcctttgcagtccaaaaacaagcttagaaaaagacttgctccgctggtgtatgtacagtcagactgtgacccaccatcagacagggacagctatgttcgcgagctgatgacttacatcgaggtcgattcctatggtgaatgtttacgaaacaaagacctccctcagcagctgaaaaatccagcctctatggatgccgatggcttttataggatcattgcacagtataagtttatcctagcttttgagaatgcagtttgtgatgactacatcactgagaagttctggaggccactgaaactgggggtagtccctgtatattacggatcccccagcatcacagactggcttccaagtaacaaaagtgctattcttgtatcagaattttctcaccccagggaactggcaagttacatcagacgactggattctgatgacagattgtatgaggcctatgtagaatggaagctgaagggtgagatctctaaccagcgacttctgacagctctcagggaacggaaatggggagtgcaagacgtcaaccaggacaattacatcgatgcatttgagtgtatggtgtgcaccaaggtgtgggctaatatcaggcttcaggaaaagggcttaccacccaaaagatgggaggcagaagatacccacctgagttgcccagagcccacagtgtttgctttctcaccactccggactccacctttgagctctttgcgagagatgtggatttccagctttgaacaatccaagaaagaagcccaggcactaaggtggctggttgataggaatcaaaacttttcatctcaagagttttggggcctagtattcaaggactgatttcaaaaatgatcagaatgaaacagactagagccttcttgaggtttattttctaggttgccttaatatttgaacataatagctattctgttgactatccatcaggataataattagttgctgcagtactcataatgagccctttcaaggaatagatgtaaattacccttaggggtagccactatattttttatactaaaaaaggaaatatttcttatggacactggttatcttccatgtccgtgtctgtggacccacatacttactgccttttgtggaaattcacctagagtgagtactttccttgtgcaatggagggagacgatctagctatagattcttgatactcacctcactctcaacagcttattggtatttggcaaacctggtatcctgcagccgagcatgaacatgaaatacattagaacttggcaatgagagatcccatctgttggtttccagggatgtaagtgagtaataaaagctgtttcaagttt

SEQ ID NO: 18479 - protein, 479 aa, Homo sapiens; identical to SEQ ID NO: 2244

SEQ ID NO: 18480 - DNA, 2117 bp, Homo sapiens
cccaggcttgggctcatagggagaaaggaagctgcgctgcattctgcgggacgaaccctgctccgcgcgagaatttttttgattccttcttatttggagaaatctccagctgctctgatgatagcctaagaagactgcatgctgcttcctctcgatgccaagccagaccctctcacaacctcggatctcagtccttcatggagacctggtcccagcaggaatggcagtgcaggaaattggcgcccagatggttcttccatgtgaagttgtctcgggctctgggctgacgagagaacacctggtaaccaggttagccctctgtcagtcacccagggcagggcagcatggtgcggattcagaggaggaagcttttggcatcttgcctgtgcgtcacagccaccgtctttctgcttgtcacactccaggtgaaactgaggtttagtgaatggacgtgtcaggcagaaacaaagtcattgaaatagaaggtcatggttgagctggggaagtttgaaaggaaggagtttaaaagttccagtttgcaagatggacatacaaaaatggaggaagcacctacgcatcttaattcatttcttaagaaagaaggattgaccttcaacaggaaaagaaaatgggaattggacagctaccccattatgctctggtggtccccgctgacgggggagactgggaggttaggccaatgtggagcagatgcttgtttcttcaccatcaaccggacctacctccatcatcacatgaccaaagcattcctcttctatggtactgactttaacatagatagcttacctctgcctcggaaagcccatcatgactgggctgtttttcatgaagagtccccgaaaaacaattataagctctttcataaaccagtgatcaccttgttcaactacactgccacgttcagcaggcattcccacttgccactaactacccaatacttggagagcattgaagtcctgaagtcactccgatacctagttcctttgcagtccaaaaacaagcttagaaaaagacttgctccgctggtgtatgtacagtcagactgtgacccaccatcagacagggacagctatgttcgcgagctgatgacttacatcgaggtcgattcctatggtgaatgtttacgaaacaaagacctccctcagcagctgaaaaatccagcctctatggatgccgatggcttttataggatcattgcacagtataagtttatcctagcttttgagaatgcagtttgtgatgactacatcactgagaagttctggaggccactgaaactgggggtagtccctgtatattacggatcccccagcatcacagactggcttccaagtaacaaaagtgctattcttgtatcagaattttctcaccccagggaactggcaagttacatcagacgactggattctgatgacagattgtatgaggcctatgtagaatggaagctgaagggtgagatctctaaccagcgacttctgacagctctcagggaacggaaatggggagtgcaagacgtcaaccaggacaattacatcgatgcatttgagtgtatggtgtgcaccaaggtgtgggctaatatcaggcttcaggaaaaggtaagcaaatcaaaggtgggcatagagccagcaggctggccatcttgatgttctctgctctcctgcatttccttctgttgttgccacctcatcagtgttcttcattcctatcagaaagaccgggctttgcaggaaggttgaatattccattactaccttttgggactgtcgtaaagtttacaagccctggacaggccttcattcctgaaagccttcattctcctttattgtttcttctgggggatcccgtgctgcaggtgctgggcagtgacacagaaaactgcagaaaaggggaagagtccctaacataaaaaattaagagttcttgccacacatgatggctcacgcctgtaattggagcactttgggaggttgaggtgggtggatcacttgagcccaggggttcgagaccagcctgggcaacatggcaaaaccccatctctactaaaaatataaaaattagcccggcatggtgacatgcacttgtaatcccagctactc

SEQ ID NO: 18481 - protein, 391 aa, Homo sapiens
MVELGKFERKEFKSSSLQDGHTKMEEAPTHLNSFLKKEGLTFNRKRKWELDSYPIMLWWSPLTGETGRLGQCGADACFFTINRTYLHHHMTKAFLFYGTDFNIDSLPLPRKAHHDWAVFHEESPKNNYKLFHKPVITLFNYTATFSRHSHLPLTTQYLESIEVLKSLRYLVPLQSKNKLRKRLAPLVYVQSDCDPPSDRDSYVRELMTYIEVDSYGECLRNKDLPQQLKNPASMDADGFYRIIAQYKFILAFENAVCDDYITEKFWRPLKLGVVPVYYGSPSITDWLPSNKSAILVSEFSHPRELASYIRRLDSDDRLYEAYVEWKLKGEISNQRLLTALRERKWGVQDVNQDNYIDAFECMVCTKVWANIRLQEKVSKSKVGIEPAGWPS

SEQ ID NO: 18482 - DNA, 2108 bp, Homo sapiens
ggtcttcccggcgcccaggcttgggctcatagggagaaaggaagctgcgctgcattctgcgggacgaaccctgctccgcgcgagaatttttttgattccttcttatttggagaaatctccagctgctctgatgatagcctaagaagactgcatgctgcttcctctcgatgccaagccagaccctctcacaacctcggatctcagtccttcatggagacctggtcccagcaggaatggcagtgcaggaaattggcgcccagatggttcttccatgtgaagttgtctcgggctctgggctgacgagagaacacctggtaaccaggttagccctctgtcagtcacccagggcagggcagcatggtgcggattcagaggaggaagcttttggcatcttgcctgtgcgtcacagccaccgtctttctgcttgtcacactccaggtcatggttgagctggggaagtttgaaaggaaggagtttaaaagttccagtttgcaagatggacatacaaaaatggaggaagcacctacgcatcttaattcatttcttaagaaagaaggattgaccttcaacaggaaaagaaaatgggaattggacagctaccccattatgctctggtggtccccgctgacgggggagactgggaggttaggccaatgtggagcagatgcttgtttcttcaccatcaaccggacctacctccatcatcacatgaccaaagcattcctcttctatggtcccaagaagaatcaccacctttggcagaaaatgatggtactgactttaacatagatagcttacctctgcctcggaaagcccatcatgactgggctgtttttcatgaagagtccccgaaaaacaattataagctctttcataaaccagtgatcaccttgttcaactacactgccacgttcagcaggcattcccacttgccactaactacccaatacttggagagcattgaagtcctgaagtcactccgatacctagttcctttgcagtccaaaaacaagcttagaaaaagacttgctccgctggtgtatgtacagtcagactgtgacccaccatcagacagggacagctatgttcgcgagctgatgacttacatcgaggtcgattcctatggtgaatgtttacgaaacaaagacctccctcagcagctgaaaaatccagcctctatggatgccgatggcttttataggatcattgcacagtataagtttatcctagcttttgagaatgcagtttgtgatgactacatcactgagaagttctggaggccactgaaactgggggtagtccctgtatattacggatcccccagcatcacagactggcttccaagtaacaaaagtgctattcttgtatcagaattttctcaccccagggaactggcaagttacatcagacgactggattctgatgacagattgtatgaggcctatgtagaatggaagctgaagggtgagatctctaaccagcgacttctgacagctctcagggaacggaaatggggagtgcaagacgtcaaccaggacaattacatcgatgcatttgagtgtatggtgtgcaccaaggtgtgggctaatatcaggcttcaggaaaaggtaagcaaatcaaaggtgggcatagagccagcaggctggccatcttgatgttctctgctctcctgcatttccttctgttgttgccacctcatcagtgttcttcattcctatcagaaagaccgggctttgcaggaaggttgaatattccattactaccttttgggactgtcgtaaagtttacaagccctggacaggccttcattcctgaaagccttcattctcctttattgtttcttctgggggatcccgtgctgcaggtgctgggcagtgacacagaaaactgcagaaaaggggaagagtccctaacataaaaaattaagagttcttgccacacatgatggctcacgcctgtaattggagcactttgggaggttgaggtgggtggatcacttgagcccaggggttcgagaccagcctgggcaacatggcaaaaccccatctctactaaaaatataaaaattagcccggcatggtgacatgcacttgtaatcccagctactc

SEQ ID NO: 18483 - protein, 357 aa, Homo sapiens
MGIGQLPHYALVVPADGGDWEVRPMWSRCLFLHHQPDLPPSSHDQSIPLLWSQEESPPLAENDGTDFNIDSLPLPRKAHHDWAVFHEESPKNNYKLFHKPVITLFNYTATFSRHSHLPLTTQYLESIEVLKSLRYLVPLQSKNKLRKRLAPLVYVQSDCDPPSDRDSYVRELMTYIEVDSYGECLRNKDLPQQLKNPASMDADGFYRIIAQYKFILAFENAVCDDYITEKFWRPLKLGVVPVYYGSPSITDWLPSNKSAILVSEFSHPRELASYIRRLDSDDRLYEAYVEWKLKGEISNQRLLTALRERKWGVQDVNQDNYIDAFECMVCTKVWANIRLQEKVSKSKVGIEPAGWPS

SEQ ID NO: 18484 - DNA, 2070 bp, Homo sapiens
ggtcttcccggcgcccaggcttgggctcatagggagaaaggaagctgcgctgcattctgcgggacgaaccctgctccgcgcgagaatttttttgattccttcttatttggagaaatctccagctgctctgatgatagcctaagaagactgcatgctgcttcctctcgatgccaagccagaccctctcacaacctcggatctcagtccttcatggagacctggtcccagcaggaatggcagtgcaggaaattggcgcccagatggttcttccatgtgaagttgtctcgggctctgggctgacgagagaacacctggtaaccaggttagccctctgtcagtcacccagggcagggcagcatggtgcggattcagaggaggaagcttttggcatcttgcctgtgcgtcacagccaccgtctttctgcttgtcacactccaggtcatggttgagctggggaagtttgaaaggaaggagtttaaaagttccagtttgcaagatggacatacaaaaatggaggaagcacctacgcatcttaattcatttcttaagaaagaaggattgaccttcaacaggaaaagaaaatgggaattggacagctaccccattatgctctggtggtccccgctgacgggggagactgggaggttaggccaatgtggagcagatgcttgtttcttcaccatcaaccggacctacctccatcatcacatgaccaaagcattcctcttctatggtactgactttaacatagatagcttacctctgcctcggaaagcccatcatgactgggctgtttttcatgaagagtccccgaaaaacaattataagctctttcataaaccagtgatcaccttgttcaactacactgccacgttcagcaggcattcccacttgccactaactacccaatacttggagagcattgaagtcctgaagtcactccgatacctagttcctttgcagtccaaaaacaagcttagaaaaagacttgctccgctggtgtatgtacagtcagactgtgacccaccatcagacagggacagctatgttcgcgagctgatgacttacatcgaggtcgattcctatggtgaatgtttacgaaacaaagacctccctcagcagctgaaaaatccagcctctatggatgccgatggcttttataggatcattgcacagtataagtttatcctagcttttgagaatgcagtttgtgatgactacatcactgagaagttctggaggccactgaaactgggggtagtccctgtatattacggatcccccagcatcacagactggcttccaagtaacaaaagtgctattcttgtatcagaattttctcaccccagggaactggcaagttacatcagacgactggattctgatgacagattgtatgaggcctatgtagaatggaagctgaagggtgagatctctaaccagcgacttctgacagctctcagggaacggaaatggggagtgcaagacgtcaaccaggacaattacatcgatgcatttgagtgtatggtgtgcaccaaggtgtgggctaatatcaggcttcaggaaaaggtaagcaaatcaaaggtgggcatagagccagcaggctggccatcttgatgttctctgctctcctgcatttccttctgttgttgccacctcatcagtgttcttcattcctatcagaaagaccgggctttgcaggaaggttgaatattccattactaccttttgggactgtcgtaaagtttacaagccctggacaggccttcattcctgaaagccttcattctcctttattgtttcttctgggggatcccgtgctgcaggtgctgggcagtgacacagaaaactgcagaaaaggggaagagtccctaacataaaaaattaagagttcttgccacacatgatggctcacgcctgtaattggagcactttgggaggttgaggtgggtggatcacttgagcccaggggttcgagaccagcctgggcaacatggcaaaaccccatctctactaaaaatataaaaattagcccggcatggtgacatgcacttgtaatcccagctactc

SEQ ID NO: 18485 - protein, 419 aa, Homo sapiens
MVRIQRRKLLASCLCVTATVFLLVTLQVMVELGKFERKEFKSSSLQDGHTKMEEAPTHLNSFLKKEGLTFNRKRKWELDSYPIMLWWSPLTGETGRLGQCGADACFFTINRTYLHHHMTKAFLFYGTDFNIDSLPLPRKAHHDWAVFHEESPKNNYKLFHKPVITLFNYTATFSRHSHLPLTTQYLESIEVLKSLRYLVPLQSKNKLRKRLAPLVYVQSDCDPPSDRDSYVRELMTYIEVDSYGECLRNKDLPQQLKNPASMDADGFYRIIAQYKFILAFENAVCDDYITEKFWRPLKLGVVPVYYGSPSITDWLPSNKSAILVSEFSHPRELASYIRRLDSDDRLYEAYVEWKLKGEISNQRLLTALRERKWGVQDVNQDNYIDAFECMVCTKVWANIRLQEKVSKSKVGIEPAGWPS

SEQ ID NO: 18486 - DNA, 1179 bp, Homo sapiens
gtggcctgcgtttgtaatcccagctactccagaggctgaggcaggagaatcacttgaactcgggaagaggaggctgcagtaggctgagatcacgccattgcactctagcctgggcgacagagagagactctgtctcaaaaaataaaaaaataaaaaataaataaaaaaataagttgtatggcagaagaagaatctctccttaaaagcatccctattatttggaaatgaatttataactcacatagtagatattgatctgaaatgtggaataaattttacctttggagttgtatcctatggctttctaaaagcctttcttttaagtgactggttgtacatttgcaggggaagaaggtcagatgaaaagatagtttgtggctacaagtcatctcccatggatcaaactactggggagagccacattgttccatcataaaaatgctgagagagctattggcaacaggcagactttagttttcagtgatggctctgctgctctagtgttgactttggcgtctcaggtgatccatgactttttaaagccaatataatttcttactccttctggagtgctgcttggctttcactcagtggttttttttttttttcttttttggccttggataccgttgagaatctaatgaaagtcacgggccctccccagggagttacagactccatgcaatgcttcaatgatcagcggcctttatctaacaccaggagcagcgagcacataaaagaggtcatggttgagctggggaagtttgaaaggaaggagtttaaaagttccagtttgcaagatggacatacaaaaatggaggaagcacctacgcatcttaattcatttcttaagaaagaaggattgaccttcaacaggaaaagaaaatgggaattggacagctaccccattatgctctggtggtccccgctgacgggggagactgggaggttaggccaatgtggagcagatgcttgtttcttcaccatcaaccggacctacctccatcatcacatgaccaaagcattcctcttctatggtaagcaggactttcgcctttctcccttgtttgctgtggtcttcctccaaagctgagttacagtttacctctgaaaagtgatggtggagctccccttgaaaacactttgacacccctgatttcctttgcatttgctctgtgg

SEQ ID NO: 18487 - protein, 150 aa, Homo sapiens
MKVTGPPQGVTDSMQCFNDQRPLSNTRSSEHIKEVMVELGKFERKEFKSSSLQDGHTKMEEAPTHLNSFLKKEGLTFNRKRKWELDSYPIMLWWSPLTGETGRLGQCGADACFFTINRTYLHHHMTKAFLFYGKQDFRLSPLFAVVFLQS

SEQ ID NO: 18488 - DNA, 3488 bp, Homo sapiens
accggaagttgcacgctgagccgcggacaccatgcagtcggatgatgttatctgggatacactaggaaacaagcaattttgttccttcaaaataagaaccaagactcagagcttctgccgaaatgaatatagcctgactggactgtgtaatcggtcatcctgtcccctggcaaatagtcagtatgccactattaaagaagagaaaggacagtgctacttgtatatgaaggttatagaacgagcggcttttcctcggcgtctctgggaacgggtccggcttagtaaaaactatgagaaagcactggagcaaatagatgaaaatctgatttactggccccgtttcattcgacacaaatgtaagcagagattcaccaagatcacccaatacctaattcgaattagaaaacttacactaaagcgacagaggaaacttgttcctttgagtaagaaggtggagcgtagggagaaaagaagagaggaaaaggcattaatagctgctcagctggacaatgccattgagaaggaattactggagagactgaaacaagatacgtatggcgacatctacaacttccccattcatgccttcgacaaagccctggaacaacaggaggcagagagtgactcttcagatactgaggaaaaagatgatgatgatgatgatgaggaagatgtggggaaaagagaatttgtcgaagatggtgaggtagatgagagtgacataagtgattttgaggatatggataaactggatgccagcagtgatgaagatcaggatggtaaatcctccagtgaggaggaggaagaaaaggcccttagtgcgaaacacaaaggcaaaatgcccttgagaggaccactgcagagaaaacgagcctatgtggaaatagaatacgagcaggagacagagcccgtggccaaagccaaaaccacgtgatttccctttcagcatttatacccaggactgaacatgcagaactgttttttttttttttttatcttaaacacatacacacctccagtttttgctcttttgtgttgtactgaacacaatatttgtgtttttattatttatgccacgtcagtggggcaagaaatctggagtgagtgaagaaagctaagttgtgaacaagagtgtttttatagcatatgtgttgaagtaacagcttgtgcccgagaaacttaacagatgagttcttgaatctgggatgagatgacggatgtaaatatttctaaattttaaatgctacattacttggtgtccttttttctcccaaactttatttagaaatggaaggagttcaattttttcttgttctactttccctattcttatggaggtaaaaggaaaggaaggaaggaaaaagcagctttcacttacaaagtttcgtgtaaaaatatctttttttcttaaataactccattcatacaaattgggatgggaagaaaatcctttcctcttgggaaagtaatacaagtcttaagttccattgtagggtgcgccttcagaaacctgctgcacttttctgatatagttcaccacttttctgtcttcacagctttggggaattttggccaggagaccctgaaacatgaaaccaaacaggctttgatatttttttttttttaattactttccccttttgcttgattcttcttccttggtatcatattcaaaggaggaaagaatggatgacacttagggacaggtcactaagcagaataggtattagttggttttttattatttttaaatttatatagctctcatgtattgaaggtgctactttaaaaactgtgttaatgtacttgcaaatctcctgctggctcatgaaacagcagaattccagccaaggcaaattcagttggatctagggcttgaaaactgcccaagattaaagagctaagatgaaatagtttgaataaactggtaaaataacaattcatactatctctacatatttttaggatatgaatttttttttcctgctgggtagattgtccagtgacttatggcatgaatttcttttcatgctaccttcaatcttcaactaaagatttctaaaaggggtaagaaatgaggcagtagtttattaaatacatagaagtacacagctattatatgctgtggctttgagaagttaacttttgtggaatatgaaaccaaaggaagaatttccatgtagataaattaagaatagggaaaaacatctacctaaaagatggttgtccctaaaaaactggaaacatctgaaatgctctatttatgttattattcctgggagcttatagcccattatttttactttttttttttaattcagaagactagaacagaacttaaattttacaaacttttgatcataatgcttttgcccatactgtctcgtccttagccccagtgacatgtgctgatcctcctgcctttagttctaaatggttctgaatagctttaaaagatgaataagaaaaaagatcaagctcttttgaggctagagggctcatatggagatctaaaaccctccatgttcatttccagacttggtcaggcacatacatagtaaattataatcaatcatgggaattacataaggataatgaggcccaactgaaaccaagtttcagtctgccttacctttacccgtccttgagaacagcggtccaggagaatcaggcagtctgtggcctcctgtagcagggcgctcttaacagactcaggtgtaaggtttggatcccttgctacatcacaaatcagtttcaagagggccttcagtaagaccacaagtctgcaggaaactctggaatcaggaagaaaagctatgttcatactctaaatctggatattaaaattggaagagacttcaaagactgtcaagtggaaagctatcatttcctaaattaaggaacttaggtcaaagttaaatgaaaaagacctaaaaacagaaccaaagacagcctctagatttcttaccctcaagtctcctgttagcatactgcctatacacacagacacaccctctgccacactgctctcttccttccagaagcttggttctactgtaagcaacagctccttcatgggctgagaaggggaaaccaggatctccccaaccaagggcctatacttttatttttcaactctattaactgaactatgcttggagagagccctgaatcctttaactttaatgccatcttaggcctggaagttagagtgagggaaatgagcttggcttctgggactgtgtcaagttgaattttctgtcatttaatttcagatcctagctcatcatcagtgaagtccagcctacttacttgtaactattaacctttctaaaagttttcatcgccttggtaaagctccagaaatggacaatgctagtgactgcacaatattgtgactgtacttaatgccactgaactgtacactttaaaatggaaaatttatatgtatttttaccacaataaacaaaaaaccctaaaaaaacttt

SEQ ID NO: 18489 - protein, 300 aa, Homo sapiens; identical to SEQ ID NO: 2246

SEQ ID NO: 18490 - DNA, 3586 bp, Homo sapiens
accggaagttgcacgctgagccgcggacaccatgcagtcggatgatgttatctgggatacactaggaaacaagcaattttgttccttcaaaataagaaccaagactcagagcttctgccgaaatgaatatagcctgactggactgtgtaatcggtcatcctgtcccctggcaaatagtcagtatgccactattaaagaagagaaaggacagtgctacttgtatatgaaggttatagaacgagcggcttttcctcggcgtctctgggaacgggtccggcttagtaaaaactatgagaaagcactggagcaaatagatgaaaatctgatttactggccccgtttcattcgacacaaatgtaagcagagattcaccaagatcacccaatacctaattcgaattagaaaacttacactaaagcgacagaggaaacttgttcctttgagtaagaaggtggagcgtagggagaaaagaagagaggaaaaggcattaatagctgctcagctggacaatgccattgagaaggaattactggagagactgaaacaagatacgtatggcgacatctacaacttccccattcatgccttcgacaaagccctggaacaacaggaggcagagagtgactcttcagatactgaggaaaaagatgatgatgatgatgatgaggaagatgtggggaaaagagaatttgtcgaagatggtgaggtagatgagagtgacataagtgattttgaggatatggataaactggatgccagcagtgatgaagatcaggatggtaaatcctccagtgaggaggaggaagaaaaggcccttagtgcgaaacacaaaggcaaaatgcccttgagaggaccactgcagagaaaacgagcctatgtggaaatagaatacgagcaggagacagagcccgtggccaaagccaaaaccacgtgatttccctttcagcatttatacccaggactgaacatgcagaactgttttttttttttttttatcttaaacacatacacacctccagtttttgctcttttgtgttgtactgaacacaatatttgtgtttttattatttatgccacgtcagtggggcaagaaatctggagtgagtgaagaaagctaagttgtgaacaagagtgtttttatagcatatgtgttgaagtaacagcttgtgcccgagaaacttaacagatgagttcttgaatctgggatgagatgacggatgtaaatatttctaaattttaaatgctacattacttggtgtccttttttctcccaaactttatttagaaatggaaggagttcaattttttcttgttctactttccctattcttatggaggtaaaaggaaaggaaggaaggaaaaagcagctttcacttacaaagtttcgtgtaaaaatatctttttttcttaaataactccattcatacaaattgggatgggaagaaaatcctttcctcttgggaaagtaatacaagtcttaagttccattgtagggtgcgccttcagaaacctgctgcacttttctgatatagttcaccacttttctgtcttcacagctttggggaattttggccaggagaccctgaaacatgaaaccaaacaggctttgatatttttttttttttaattactttccccttttgcttgattcttcttccttggtatcatattcaaaggaggaaagaatggatgacacttagggacaggtcactaagcagaataggtattagttggttttttattatttttaaatttatatagctctcatgtattgaaggtgctactttaaaaactgtgttaatgtacttgcaaatctcctgctggctcatgaaacagcagaattccagccaaggcaaattcagttggatctagggcttgaaaactgcccaagattaaagagctaagatgaaatagtttgaataaactggtaaaataacaattcatactatctctacatatttttaggatatgaatttttttttcctgctgggtagattgtccagtgacttatggcatgaatttcttttcatgctaccttcaatcttcaactaaagatttctaaaaggggtaagaaatgaggcagtagtttattaaatacatagaagtacacagctattatatgctgtggctttgagaagttaacttttgtggaatatgaaaccaaaggaagaatttccatgtagataaattaagaatagggaaaaacatctacctaaaagatggttgtccctaaaaaactggaaacatctgaaatgctctatttatgttattattcctgggagcttatagcccattatttttactttttttttttaattcagaagactagaacagaacttaaattttacaaacttttgatcataatgcttttgcccatactgtctcgtccttagccccagtgacatgtgctgatcctcctgcctttagttctaaatggttctgaatagctttaaaagatgaataagaaaaaagatcaagctcttttgaggctagagggctcatatggagatctaaaaccctccatgttcatttccagacttggtcaggcacatacatagtaaattataatcaatcatgggaattacataaggataatgaggcccaactgaaaccaagtttcagtctgccttacctttacccgtccttgagaacagcggtccaggagaatcaggcagtctgtggcctcctgtagcagggcgctcttaacagactcaggtgtaaggtttggatcccttgctacatcacaaatcagtttcaagagggccttcagtaagaccacaagtctgcaggaaactctggaatcaggaagaaaagctatgttcatactctaaatctggatattaaaattggaagagacttcaaagactgtcaagtggaaagctatcatttcctaaattaaggaacttaggtcaaagttaaatgaaaaagacctaaaaacagaaccaaagacagcctctagatttcttaccctcaagtctcctgttagcatactgcctatacacacagacacaccctctgccacactgctctcttccttccagaagcttggttctactgtaagcaacagctccttcatgggctgagaaggggaaaccaggatctccccaaccaagggcctatacttttatttttcaactctattaactgaactatgcttggagagagccctgaatcctttaactttaatgccatcttaggcctggaagttagagtgagggaaatgagcttggcttctgggactgtgtcaagttgaattttctgtcatttaatttcagatcctagctcatcatcagtgaagtccagcctacttacttgtaactattaacctttctaaaagttttcatcgccttggtaaagctccagaaatggacaatgctagtgactgcacaatattgtgactgtacttaatgccactgaactgtacactttaaaatggaaaatttatatgtatttttaccacaataaacaaaaaaccctaaaaaaactttaatgaaaggtggaaaataatttaacttacaatgtgaaaatacaatgtgaaatgtacaataaatcatatttatggacagatgcgtgactgggagaaaaa

SEQ ID NO: 18491 - protein, 300 aa, Homo sapiens; identical to SEQ ID NO: 2246

SEQ ID NO: 18492 - DNA, 373 bp, Homo sapiens
gcacgctgagccgcggacaccatgcagtcggatgatgttatctgggatacactaggaaacaagcaattttgttccttcaaaataagaaccaagactcagagcttctgccgaaatgaatatagcctgactggactgtgtaatcggtcatcctgtcccctggcaaatagtcagtatgccactattaaagaagagaaaggacagtgctacttgtatatgaaggttatagaacgagcggcttttcctcggcgtctctgggaacgggtccggcttagtaaaaactatgagaaagcactggagcaaatagatgaaaatctgatttactggccccgtttcattcgacacaaatgtaagcagagattcaccaagatcaccc

SEQ ID NO: 18493 - protein, 116 aa, Homo sapiens
MQSDDVIWDTLGNKQFCSFKIRTKTQSFCRNEYSLTGLCNRSSCPLANSQYATIKEEKGQCYLYMKVIERAAFPRRLWERVRLSKNYEKALEQIDENLIYWPRFIRHKCKQRFTKI

SEQ ID NO: 18494 - DNA, 804 bp, Homo sapiens
accctaaaacttctcatgcaacatacttggcccagggtctcctggccaaaattccccaaagctgtgaagacagaaaagtggtgaactatatcagaaaagtgcagcaggtttctgaaggcgcaccctacaatggaacttaagacttgtattactttcccaagaggaaaggattttcttcccatcccaatttgtatgaatggagttatttaagaaaaaaagatatttttacacgaaactttgtaagtgaaagctgctttttccttccttcctttccttttacctccataagaatagggaaagtagaacaagaaaaaattgaactccttccatttctaaataaagtttgggagaaaaaaggacaccaagtaatgtagcatttaaaatttagaaatatttacatccgtcatctcatcccagattcaagaactcatctgttaagtttctcgggcacaagctgttacttcaacacatatgctataaaaacactcttgttcacaacttagctttcttcactcactccagatttcttgccccactgacgtggcataaataataaaaacacaaatattgtgttcagtacaacacaaaagagcaaaaactggaggtgtgtatgtgtttaagataaaaaaaaaaaaaaaacagttctgcatgttcagtcctgggtataaatgctgaaagggaaatcacgtggttttggctttggccacgggctctgtctcctgctcgtattctatttccacataggctcgttttctctgcagtggtcctctcaagggcattttgcctttgtgtttcgcactaagg

SEQ ID NO: 18495 - protein, 44 aa, Homo sapiens
MLKGKSRGFGFGHGLCLLLVFYFHIGSFSLQWSSQGHFAFVFRT

SEQ ID NO: 18496 - DNA, 363 bp, Homo sapiens
accctaaaacttctcatgcaacatacttggcccagggtctcctggccaaaattccccaaagctgtgaagacagaaaagtggtgaactatatcagaaaagtgcagcaggtttctgaaggcgcaccctacaatggaacttaagacttgtattactttcccaagaggaaaggattttcttcccatcccaatttgtatgaatggagttatttaagaaaaaaagatatttttacacgaaactttgtaagtgaaagctgctttttccttccttcctttccttttacctccataagaatagggaaagtagaacaagaaaaaattgaactccttccatttctaaataaagtttgggagaaaaaaggacacc

SEQ ID NO: 18497 - protein, 45 aa, Homo sapiens
PKTSHATYLAQGLLAKIPQSCEDRKVVNYIRKVQQVSEGAPYNGT

SEQ ID NO: 18498 - DNA, 2261 bp, Homo sapiens
ggtccggatcctgttagacaccggcgggcgcgagccgttgcaggtacctgggggtggttaagttggtgacatggctcagaagtttatttctttaaatttttaagttttttttctttttagtcttcagaaaggcaacagtagtcttttaacgtcactgttaaaagtgtaagactcttttactccctgagagtcccctttccctttcttgcgtcctttcctctttattcttttttttttttttttttttactgagacggagtctcactctgtcgcccaggctggagtgcagtggcgcgatctcggctcactgcaaactccgcctcccgggttcaccctttctctttattcttatcccggtcagactcgccccctcctccaagacatctctctgttttattttatttgattttagttctctttgggtgatcgctccttccctcttcaacggatccctccccgcctccatcctcgttctgtgggagagaccagccttctggtgctgcagtcaggaatggagcttgacagcgctctggaagccccatcgcaggaagactctaatttgtccgaggagttgtctcactccgcctttggacaggccttctccaagattttacactgtcttgcccgcccggaggcacgacgaggcaatgtaaaagatgcagttcttaaagacctcggtgatctaatagaagccacagaatttgataggttatttgaggggactggtgcacggctccgcggaatgccggagacactggggcaggtagcaaaagccctggagaagtatgcagccccctccaaggaggaggaaggtggaggtgatgggcactccgaagcggccgagaaagcagcccaagttgggttactgtttcttaaactgttagggaaagttgagactgctaagaattccctggtcggccctgcatggcagacgggcctgcatcacttggcaggacccgtttatatttttgccatcacacacagcttggagcaaccatggaccactccgagatctcgggaagttgctagggaggtgctcacctcactgcttcaagttactgaatgcggttctgtggcaggattcctacatggagaaaatgaagatgagaaagggagactttcggtgatactagggcttctcaaacccgacttgtataaggaatcctggaagaataaccctgccatcaaacatgttttctcatggactctgcaacaggtcactcggccctggctgagccagcatctggaaagggtacttcccgcatcattggtcatttcagatgactatcagactgagaacaaaatcctgggtgtacactgtctccatcacattgtgcttaatgtgccagctgctgatttgctccagtataacagagcccaggtcctataccatgccatttccaaccacctgtacacaccagagcaccacctcattcaggctgtgctcctgtgtctgctggatttattccccatcctggagaaaaccctgcactggaaaggagatggagctcgacccaccacccattgtgatgaggtcctgcggctgatcctgacccacatggagccagagcaccgccttcttttacgcaggacctacgcaagaaacctgccggctttcgtgaacaggttggggatcctaactgtccggcacttaaagaggctggagagagtcatcattggttatctggaggtttatgatggacctgaggaggaagctagactgaagatattggaaaccctaaaacttctcatgcaacatacttggcccagagtttcctgcagacttgtggtcttactgaaggccctcttgaaactgatttgtgatgtagcaagggatccaaaccttacacctgagtctgttaagagcgccctgctacaggaggccacagactgcctgattctcctggaccgctgttctcaaggacgggtaaagggtctcctggccaaaattccccaaagctgtgaagacagaaaagtggtgaactatatcagaaaagtgcagcaggtttctgaaggcgcaccctacaatggaacttaagacttgtattactttcccaagaggaaaggattttcttcccatcccaatttgtatgaatggagttatttaagaaaaaaagatatttttacacgaaactttgtaagtgaaagctgctttttccttccttcctttccttttacctccataagaatagggaaagtagaacaagaaaaaattgaactccttccatttctaaataaagtttgggagaaaaaaggacacc

SEQ ID NO: 18499 - protein, 508 aa, Homo sapiens
MELDSALEAPSQEDSNLSEELSHSAFGQAFSKILHCLARPEARRGNVKDAVLKDLGDLIEATEFDRLFEGTGARLRGMPETLGQVAKALEKYAAPSKEEEGGGDGHSEAAEKAAQVGLLFLKLLGKVETAKNSLVGPAWQTGLHHLAGPVYIFAITHSLEQPWTTPRSREVAREVLTSLLQVTECGSVAGFLHGENEDEKGRLSVILGLLKPDLYKESWKNNPAIKHVFSWTLQQVTRPWLSQHLERVLPASLVISDDYQTENKILGVHCLHHIVLNVPAADLLQYNRAQVLYHAISNHLYTPEHHLIQAVLLCLLDLFPILEKTLHWKGDGARPTTHCDEVLRLILTHMEPEHRLLLRRTYARNLPAFVNRLGILTVRHLKRLERVIIGYLEVYDGPEEEARLKILETLKLLMQHTWPRVSCRLVVLLKALLKLICDVARDPNLTPESVKSALLQEATDCLILLDRCSQGRVKGLLAKIPQSCEDRKVVNYIRKVQQVSEGAPYNGT

SEQ ID NO: 18500 - DNA, 1908 bp, Homo sapiens
gcagcaatatgagctaggtccggatcctgttagacaccggcgggcgcgagccgttgcagttctctttgggtgatcgctccttccctcttcaacggatccctccccgcctccatcctcgttctgtgggagagaccagccttctggtgctgcagtcaggaatggagcttgacagcgctctggaagccccatcgcaggaagactctaatttgtccgaggagttgtctcactccgcctttggacaggccttctccaagattttacactgtcttgcccgcccggaggcacgacgaggcaatgtaaaagatgcagttcttaaagacctcggtgatctaatagaagccacagaatttgataggttatttgaggggactggtgcacggctccgcggaatgccggagacactggggcaggtagcaaaagccctggagaagtatgcagccccctccaaggaggaggaaggtggaggtgatgggcactccgaagcggccgagaaagcagcccaagttgggttactgtttcttaaactgttagggaaagttgagactgctaagaattccctggtcggccctgcatggcagacgggcctgcatcacttggcaggacccgtttatatttttgccatcacacacagcttggagcaaccatggaccactccgagatctcgggaagttgctagggaggtgctcacctcactgcttcaagttactgaatgcggttctgtggcaggattcctacatggagaaaatgaagatgagaaagggagactttcggtgatactagggcttctcaaacccgacttgtataaggaatcctggaagaataaccctgccatcaaacatgttttctcatggactctgcaacaggtcactcggccctggctgagccagcatctggaaagggtacttcccgcatcattggtcatttcagatgactatcagactgagaacaaaatcctgggtgtacactgtctccatcacattgtgcttaatgtgccagctgctgatttgctccagtataacagagcccaggtcctataccatgccatttccaaccacctgtacacaccagagcaccacctcattcaggctgtgctcctgtgtctgctggatttattccccatcctggagaaaaccctgcactggaaaggagatggagctcgacccaccacccattgtgatgaggtcctgcggctgatcctgacccacatggagccagagcaccgccttcttttacgcaggacctacgcaagaaacctgccggctttcgtgaacaggttggggatcctaactgtccggcacttaaagaggctggagagagtcatcattggttatctggaggtttatgatggacctgaggaggaagctagactgaagatattggaaaccctaaaacttctcatgcaacatacttggcccagagtttcctgcagacttgtggtcttactgaaggccctcttgaaactgatttgtgatgtagcaagggatccaaaccttacacctgagtctgttaagagcgccctgctacaggaggccacagactgcctgattctcctggaccgctgttctcaaggacgggtaaagggtctcctggccaaaattccccaaagctgtgaagacagaaaagtggtgaactatatcagaaaagtgcagcaggtttctgaaggcgcaccctacaatggaacttaagacttgtattactttcccaagaggaaaggattttcttcccatcccaatttgtatgaatggagttatttaagaaaaaaagatatttttacacgaaactttgtaagtgaaagctgctttttccttccttcctttccttttacctccataagaatagggaaagtagaacaagaaaaaattgaactccttccatttctaaataaagtttgggagaaaaaaggacacc

SEQ ID NO: 18501 - protein, 508 aa, Homo sapiens; identical to SEQ ID NO: 18499

SEQ ID NO: 18502 - DNA, 1858 bp, Homo sapiens
gggcgcgagccgttgcaggtacctgggggtggttaagttggtgacatggctcagaagtttatttctttaaatttttaagttttttttctttttagtcttcagaaaggcaacagtagtcttttaacgtcactgttaaaagtttctctttgggtgatcgctccttccctcttcaacggatccctccccgcctccatcctcgttctgtgggagagaccagccttctggtgctgcagtcaggaatggagcttgacagcgctctggaagccccatcgcaggaagactctaatttgtccgaggagttgtctcactccgcctttggacaggccttctccaagattttacactgtcttgcccgcccggaggcacgacgaggcaatgtaaaagatgcagttcttaaagacctcggtgatctaatagaagccacagaatttgataggttatttgaggggactggtgcacggctccgcggaatgccggagacactggggcaggtagcaaaagccctggagaagtatgcagccccctccaaggaggaggaaggtggaggtgatgggcactccgaagcggccgagaaagcagcccaagttgggttactgtttcttaaactgttagggaaagttgagactgctaagaattccctggtcggccctgcatggcagacgggcctgcatcacttggcaggacccgtttatatttttgccatcacacacagcttggagcaaccatggaccactccgagatctcgggaagttgctagggaggtgctcacctcactgcttcaagttactgaatgcggttctgtggcaggattcctacatggagaaaatgaagatgagaaagggagactttcggtgatactagggcttctcaaacccgacttgtataaggaatcctggaagaataaccctgccatcaaacatgttttctcatggactctgcaacaggtcactcggccctggctgagccagcatctggaaagggtacttcccgcatcattggtcatttcagatgactatcagactgagaacaaaatcctgggtgtacactgtctccatcacattgtgcttaatgtgccagctgctgatttgctccagtataacagagcccaggtcctataccatgccatttccaaccacctgtacacaccagagcaccacctcattcaggctgtgctcctgtgtctgctggatttattccccatcctggagaaaaccctgcactggaaaggagatggagctcgacccaccacccattgtgatgaggtcctgcggctgatcctgacccacatggagccagagcaccgccttcttttacgcaggacctacgcaagaaacctgccggctttcgtgaacaggttggggatcctaactgtccggcacttaaagaggctggagagagtcatcattggttatctggaggtttatgatggacctgaggaggaagctagactgaagatattggaaaccctaaaacttctcatgcaacatacttggcccagagtttcctgcagacttgtggtcttactgaaggccctcttgaaactgatttgtgatgtagcaagggatccaaaccttacacctgagtctgttaagagcgccctgctacaggaggccacagactgcctgattctcctggaccgctgttctcaaggacgggtaaagggtctcctggccaaaattccccaaagctgtgaagacagaaaagtggtgaactatatcagaaaagtgcagcaggtttctgaaggcgcaccctacaatggaacttaagacttgtattactttcccaagaggaaaggattttcttcccatcccaatttgtatgaatggagttatttaagaaaaaaagatatttttacacg

SEQ ID NO: 18503 - protein, 508 aa, Homo sapiens; identical to SEQ ID NO: 18499

SEQ ID NO: 18504 - DNA, 1777 bp, Homo sapiens
gcagcaatatgagctaggtccggatcctgttagacaccggcgggcgcgagccgttgcagttctctttgggtgatcgctccttccctcttcaacggatccctccccgcctccatcctcgttctgtgggagagaccagccttctggtgctgcagtcaggaatggagcttgacagcgctctggaagccccatcgcaggaagactctaatttgtccgaggagttgtctcactccgcctttggacaggccttctccaagattttacactgtcttgcccgcccggaggcacgacgaggcaatgtaaaagatgcagttcttaaagacctcggtgatctaatagaagccacagaatttgataggttatttgaggggactggtgcacggctccgcggaatgccggagacactggggcaggtagcaaaagccctggagaagtatgcagccccctccaaggaggaggaaggtggaggtgatgggcactccgaagcggccgagaaagcagcccaagttgggttactgtttcttaaactgttagggaaagttgagactgctaagaattccctggtcggccctgcatggcagacgggcctgcatcacttggcaggacccgtttatatttttgccatcacacacagcttggagcaaccatggaccactccgagatctcgggaagttgctagggaggtgctcacctcactgcttcaagttactgaatgcggttctgtggcaggattcctacatggagaaaatgaagatgagaaagggagactttcggtgatactagggcttctcaaacccgacttgtataaggaatcctggaagaataaccctgccatcaaacatgttttctcatggactctgcaacaggtcactcggccctggctgagccagcatctggaaagggtacttcccgcatcattggtcatttcagatgactatcagactgagaacaaaatcctgggtgtacactgtctccatcacattgtgcttaatgtgccagctgctgatttgctccagtataacagagcccaggtcctataccatgccatttccaaccacctgtacacaccagagcaccacctcattcaggctgtgctcctgtgtctgctggatttattccccatcctggagaaaaccctgcactggaaaggagatggagctcgacccaccacccattgtgatgaggtcctgcggctgatcctgacccacatggagccagagcaccgccttcttttacgcaggacctacgcaagaaacctgccggctttcgtgaacaggttggggatcctaactgtccggcacttaaagaggctggagagagtcatcattggttatctggaggtttatgatggacctgaggaggaagctagactgaagatattggaaaccctaaaacttctcatgcaacatacttggcccagagtttcctgcagacttgtggtcttactgaaggccctcttgaaactgatttgtgatgtagcaagggatccaaaccttacacctgagtctgttaagagcgccctgctacaggaggccacagactgcctgattctcctggaccgctgttctcaaggacgggtaaagggtctcctggccaaaattccccaaagctgtgaagacagaaaagtggtgaactatatcagaaaagtgcagcaggtttctgaaggcgcaccctacaatggaacttaagacttgtattactttcccaagaggaaaggattttcttcccatcccaatttgtatgaatggagttatttaagaaaaaaagatatttttacacg

SEQ ID NO: 18505 - protein, 508 aa, Homo sapiens; identical to SEQ ID NO: 18499

SEQ ID NO: 18506 - DNA, 1868 bp, Homo sapiens; identical to SEQ ID NO: 2249

SEQ ID NO: 18507 - protein, 155 aa, Homo sapiens; identical to SEQ ID NO: 2250

SEQ ID NO: 18508 - DNA, 451 bp, Homo sapiens
ttttttttttttttgagatggagtctcgctcccatcgcgcaggctggaatgtagtggcgcgatctcggctcactgcaacctccacctcccaggttcaagcgattttccttcctcagcctcccaagtagctgggattacaggcgcgtgagcccctgcgccgggtctagagacttcttcaaagctgggaaggtacagggtgtgccctctgaacagcagcagagcttgttgcaaacctgaactttctggtcctctgctgcccctttgtggactacctggaaacaacagcccaatatatcgctgtaggagcatgaaattggacttgggagaatagcaccagaagaactggtggaggtttgaaggctggtggaggatacgagggagtcacgactgttcttttctccagcaaggttggggttcccaggagagaggcctagaactctttcaaactgtc

SEQ ID NO: 18509 - protein, 36 aa, Homo sapiens
MESRSHRAGWNVVARSRLTATSTSQVQAIFLPQPPK

SEQ ID NO: 18510 - DNA, 1608 bp, Homo sapiens
ggacatgtgactctcccacctcgtttcgtggcagagccaaagagctgagcaaaaggagctgctgcagcttgaagaaaaagccacccctgaaggctcctgccagagccaggcttaccttctctccctcgagaatcttctcccgaaggaccagcccagggaagggaagcagctgctctggactcactcaagtgtgtctcacaccccttcctcttccagcagcagctacctggcaactgaacccatcatcaccacagccactcctgcagctgccacggtttctgccacctctaagatgtgccctggtaactggctttgggcttctatgacttttatggcccgcttctcccggagtagctcaaggtctcctgttcgaactcgagggaccctggaggagatgccaaccgttcaacatcctttcctcaatgtcttcgagttggagcggctcctctacacaggcaagacagcctgtaaccatgccgacgaggtctggccaggcctctatctcggagaccaggacatggctaacaaccgccgggagcttcgccgcctgggcatcacgcacgtcctcaatgcctcacacagccggtggcgaggcacgcccgaggcctatgaggggctgggcatccgctacctgggtgttgaggcccacgactcgccagcctttgacatgagcatccacttccagacggctgccgacttcatccaccgggcgctgagccagccaggagggaagatcctggtgcattgtgctgtgggcgtgagccgatccgccaccctggtactggcctacctcatgctgtaccaccaccttaccctcgtggaggccatcaagaaagtcaaagaccaccgaggcatcatccccaaccggggcttcctgaggcagctcctggccctggaccgcaggctgcggcagggtctggaagcatgaggggagggggagagaggtcaggccaggcccgtgggtaggtccctggctcccagctggagataggaggcccaggtggcaggtagcaggaggcccagatcacccatcctcccctggggtcaggagaggccgagccccaggccactgtcactctttgtgggaggggacggggagtgaggttgggcagtgtggtggatgggcacccaggaagggttgaccagggaaggaggcagctaggctgtagatggaagatggtcctgggattcgaacaccgctgggatctggccagggtgctccctgggattcacagtcccttcccctctttgtgcccaagtgtttccctctctccctcaccaaaacaaaagggccatctctgccctgcacttgtgcagaaagtcagggatacggcaagcatgaatgcaatggtgtagagttgtgtgaaacccctagcatagagacagacagcgaagagatggtgtgaaaagcttgcagaaccagacagagaaccccacagactttccactccaagcacaggaggaggtagctagcgtgtgagggttggcactaggcccacggctgctgcttgggccaaaaacatacagaggtgcatggctggcagtcttgaaattgtcactcgcttactggatccaagcgtctcgaggataaataaagatcatgaaaaa

SEQ ID NO: 18511 - protein, 211 aa, Homo sapiens; identical to SEQ ID NO: 2252

SEQ ID NO: 18512 - DNA, 1818 bp, Homo sapiens
tgggaggagtgtgtgtgtttaagacagtgcctgggatgacttataatgtaatctttaggcaaaacgctttgtaattggtgcagctctgagaacacacgcatgcattccaggcggtgctgctggggctcggcggggccgtgtctggtctgcaaggcgcgcgggctcgtggggggttggctggggagcccacgctgcctggcgactcgggccaccgaatgtgagaccgagtccctttatgtcaccagcgcacacgctgatttgaaccctgcttcgacgtgtgtgtcatggcttaaaaatagctgctaatctgtcaacctgtcttgggcagaaacagcggcggcgacagcagcaggagcgtcatggccgtggcgctgtctgcgccggcgatccgcctttcggactgaggcccagcgcagcgcttgcaaagagcagctacctggcaactgaacccatcatcaccacagccactcctgcagctgccacggtttctgccacctctaagatgtgccctggtaactggctttgggcttctatgacttttatggcccgcttctcccggagtagctcaaggtctcctgttcgaactcgagggaccctggaggagatgccaaccgttcaacatcctttcctcaatgtcttcgagttggagcggctcctctacacaggcaagacagcctgtaaccatgccgacgaggtctggccaggcctctatctcggagaccaggacatggctaacaaccgccgggagcttcgccgcctgggcatcacgcacgtcctcaatgcctcacacagccggtggcgaggcacgcccgaggcctatgaggggctgggcatccgctacctgggtgttgaggcccacgactcgccagcctttgacatgagcatccacttccagacggctgccgacttcatccaccgggcgctgagccagccaggagggaagatcctggtgcattgtgctgtgggcgtgagccgatccgccaccctggtactggcctacctcatgctgtaccaccaccttaccctcgtggaggccatcaagaaagtcaaagaccaccgaggcatcatccccaaccggggcttcctgaggcagctcctggccctggaccgcaggctgcggcagggtctggaagcatgaggggagggggagagaggtcaggccaggcccgtgggtaggtccctggctcccagctggagataggaggcccaggtggcaggtagcaggaggcccagatcacccatcctcccctggggtcaggagaggccgagccccaggccactgtcactctttgtgggaggggacggggagtgaggttgggcagtgtggtggatgggcacccaggaagggttgaccagggaaggaggcagctaggctgtagatggaagatggtcctgggattcgaacaccgctgggatctggccagggtgctccctgggattcacagtcccttcccctctttgtgcccaagtgtttccctctctccctcaccaaaacaaaagggccatctctgccctgcacttgtgcagaaagtcagggatacggcaagcatgaatgcaatggtgtagagttgtgtgaaacccctagcatagagacagacagcgaagagatggtgtgaaaagcttgcagaaccagacagagaaccccacagactttccactccaagcacaggaggaggtagctagcgtgtgagggttggcactaggcccacggctgctgcttgggccaaaaacatacagaggtgcatggctggcagtcttgaaattgtcactcgcttactggatccaagcgtctcgaggataaataaagatcatgaaaaa

SEQ ID NO: 18513 - protein, 211 aa, Homo sapiens; identical to SEQ ID NO: 2252

SEQ ID NO: 18514 - DNA, 495 bp, Homo sapiens
cttcgccgcctgggcatcacgcacgtcctcaatgcctcacacagccggtggcgaggcacgcccgaggcctatgaggggctgggcatccgctacctgggtgttgaggcccacgactcgccagcctttgacatgagcatccacttccagacggctgccgacttcatccaccaaaacaaaagggccatctctgccctgcacttgtgcagaaagtcagggatacggcaagcatgaatgcaatggtgtagagttgtgtgaaacccctagcatagagacagacagcgaagagatggtgtgaaaagcttgcagaaccagacagagaaccccacagactttccactccaagcacaggaggaggtagctagcgtgtgagggttggcactaggcccacggctgctgcttgggccaaaaacatacagaggtgcatggctggcagtcttgaaattgtcactcgcttactggatccaagcgtctcgaggataaataaagatcatgaaa

SEQ ID NO: 18515 - protein, 33 aa, Homo sapiens
MSIHFQTAADFIHQNKRAISALHLCRKSGIRQA

SEQ ID NO: 18516 - DNA, 499 bp, Homo sapiens
aaaataaaataaataaaataaaaatacccaagtctggacagaaagactctgttccagtaataatatcattcatgtatcacatatttattattacatgccagtgctacataccaggcacaatagatgacttctctgaccttccatctattgtgcaatgtctctgggaaaaggcagccactggaagccaggagcagtaggtaggaagctgcagtggtttctcttgagaccaagcaaagcggcagtgcctacagagattctgcaatttgaaggctatggagagaaaaacatcaaaggaagagccatccccacttctctccctcaaagttatacaaggatttcttttgcttctttggtttgttttggttttggtttctttcttttatttttttttggagacagtatcactctgtcacccaggctggaaggttgcagtgagctgagattgcaccattgcacttcagcctgggagacatagcaagactctgtcccacctcccaaa

SEQ ID NO: 18517 - protein, 106 aa, Homo sapiens [sequence omitted]

SEQ ID NO: 18518 - DNA, 1328 bp, Homo sapiens
taatgcttcagatagcagaggaccgacagctgtgactttatttggtgatggaataaataagagtctcactgtgtcacccaggattggctcgctgcatcacccaggatcggcccactgcaacctccaccttccaggttcaaacgattcttctgcctctgccttttgagtagctgggattacaggcacgagccaccatgcccagctaatttttgtatttttagtagagccgggctttcaccacgttggccaggctggtcttgaactcccgatctcagatgatctaccaaccttggccacccaaagtgctgggtttacaggtgtgagccaccatgcctgacctccaatttcatgaacttctcaggccctctgtgcatgccatgcttaataaggtaataaaaaggtaagattataaagaaggaagaggcctatcaaggaaagaaggctctttatttgctttgctgtcatggtatccttcccattccactggcttccagcacatatgtggaaactttttgggaaagttccccaaaactttggggaactgtgttcccctgaagtttggagggtgaggagtgaaagaggttgagaagaatgagctggctgggttggacattcagaggtgacaatggccagatcaaccttgatggagtcttgttctgtcaccaggctggagtgcagtggtgcgatctcagctcactacaacctccacctcctgggttcaagtgaatcccctgcctcagcctccctagtagctgggactacaggcacacaccaccacacctggctaattttttgtattttttagtagagacggggtttcaccatgttggccaggatggtctcaatctcttgacctcatgatctgcccaccccaccctcccaaagttctgggattacaggcctgagccactgcacctggctgctagttcttaagagggaggtatgagacgtatgtatagactaagtgaaaggaaaatatcttgggcccccaaaatcactaagctaaaaggaaaattcaagctggaaactgctcagagcaaacctgcttcccattctattcaaagtcatccctctgctcactgaggtaaatgcatattctgattggctcctttgtaaaagctaattagaaactcaaaagaatgcaactatttgtctctcacctacttgtgacctggaagacccctccctgcttcaagttctccccacctttttggacaaaaccagtgtacttcttactgtattgattaatgtcttgtgtctccctaaagtgtataaaaccaagttgtgccctgaccaccttgggcacaggtcatcaggacttcctgagg

SEQ ID NO: 18519 - protein, 59 aa, Homo sapiens
MARSTLMESCSVTRLECSGAISAHYNLHLLGSSESPASASLVAGTTGTHHHTWLIFCIF

SEQ ID NO: 18520 - DNA, 783 bp, Homo sapiens
atgcgtccgtcctcctccccacctcgtggccggcagcagccctccagctttggctccgtggactggctctcccagaacagctgctcagggccgacccacacccccaggcctgccgacgtctccccggggagccaccctggcccgggccagacatccggcacccgggagccccctcaggccgtcagcatcaagaaggctcggtcctcaaatctgcctgcgccggagagggccgtggctgggttgggtaagaagccaaacccctggcaggccccctgtgtaggcacagccttcaccaccgagcagctgccgtgcccttgggcacccctgccagggccccaggctctgatgctgccccctggctctctctggggtctctgccaagtggaacaagaggccctggcctctgcgggggtttcctgctatgggcagcctctggcgtaccaccggccaagcccaggaagtggcgccgtgagtgagccgggactgtgccggcagcctgctgggggctgctcttctcgggccagggaaagtggggcagccaggacctgcggctgtgcctggactgaaaccgtcgcacatgtccccactcttcagcatgtgctcacctgtccacctcctcgcagcagcctcgggacaaaacagaatgactcaaggacagcacttcctgctgaaaatctcgaagtgcccagaatgggaggcacggaagcccctcccggggaggactctccctcattgatggagcatttttggtgcagacccctcaccgcacacaccgaagcttag

SEQ ID NO: 18521 - protein, 260 aa, Homo sapiens
MRPSSSPPRGRQQPSSFGSVDWLSQNSCSGPTHTPRPADVSPGSHPGPGQTSGTREPPQAVSIKKARSSNLPAPERAVAGLGKKPNPWQAPCVGTAFTTEQLPCPWAPLPGPQALMLPPGSLWGLCQVEQEALASAGVSCYGQPLAYHRPSPGSGAVSEPGLCRQPAGGCSSRARESGAARTCGCAWTETVAHVPTLQHVLTCPPPRSSLGTKQNDSRTALPAENLEVPRMGGTEAPPGEDSPSLMEHFWCRPLTAHTEA

SEQ ID NO: 18522 - DNA, 756 bp, Homo sapiens
ccaggctggtcttgaactcctgacctcaagtgatctgcccgtcccaggcctcctaaagtgttgggattacaggcgtgagccattgtgcccggcaagagaggctttcttaatttcccttctcaacgacctgttaattaatcttcctcttcaaaccctgctattggtgaagccagtcgggtttcttactttgctcttttgccgagtcaggagccagctggaatgggttcagcttgtctttactctcccctgagtcacttcgagtttggttctactgatctacaggaagcttcttcccaccactgaattcaagggacagtcttcccatatgtctttaccagctctcgcaaatgaagacagagcctgtctatgtcattcagactggcctcaaactccagggctcaacaaagcctcctgcctcaacttccccagtagctgggactacaggtatatgctcagcttcaattatttttgtattagtttgccagggctgttataacaaagtgccaccaactgggtggcttagacaacagaaatttattgcttcacagttctggaggctggacgtccaaaatcaaggtgttggtagaattggttccttctgaggactgtgaggaaggaatctgttccaagcctctctccttggcttatggatgaccatcttctccctgttcctcttcagattgtctttcttctatgtatgtctgtgtcaaaatttcccctttttataagaatgccaggtgtattggattaaaagcc

SEQ ID NO: 18523 - protein, 84 aa, Homo sapiens
MKTEPVYVIQTGLKLQGSTKPPASTSPVAGTTGICSASIIFVLVCQGCYNKVPPTGWLRQQKFIASQFWRLDVQNQGVGRIGSF

SEQ ID NO: 18524 - DNA, 1456 bp, Homo sapiens
agaatgatttcactacagactctctggaaagcctgggagctgaattccggaagatccccacatcgatgaaagcaaagcgaagccaccaagccgtcatcatgtccacgtcgctacgagtcagcccatccatccatggctaccacttcgacacagcctctcgtaagaaagccgtgggcaacatctttgaaaacacagaccaagaatcactagaaaggctcttcagaaactctggagacaagaaagcagaggagagagccaagatcatttttgccatagatcaagatgtggaggagaaaacgcgtgccctgatggccttgaagaagaggacaaaagacaagcttttccagtttctgaaactgcggaaatattccatcaaagttcactgaagagaagaggatggataaggacgttatccaagaatggacattcaaagaccaagtgagtttgtgagattctaacagatgcagcattttgctgctaccttacaagcttctcttctgtcaggactccagaggctggaaagggaccgggactggaaagggaccaggactgaacagactggttacaaagactccaaacaatttcatgccctgtgctgttacagaggagaacaaaatgctttcagcaaggatttgaaaactcttccgtccctgcaggaaaggattgatgctgatagaagagcctggacagatgtaatgagaactaaagaaaacagatggctggagatgacatttatccagggtcactttgtcaggccctaggacttaaatcgaagttgaacttttttttttttttttaaccaaatagataggggaagggaggagggagagggaggacagggagagaaaataccatgcataaattgtttactgaatttttatatctgagtgttcaaaatatttccaagcctgagtattgtctattggtatagatttttagaaatcaataattgattatttatttgcacttattacaatgcctgaaaaagtgcaccacatggatgttaagtagaaattcaagaaagtaagatgtcttcagcaactcagtaaaaccttacgccaccttttggtttgtaaaaggttttttatacatttcaaacaggttgcacaaaagttaaaataatggggtcttttataaatccaaagtactgtgaaaacattttacatattttttaaatcttctgactaatgctaaaacgtaatctaattaaatttcatacagttactgcagtaagcattaggaagtgaatatgatatacaaaatagtttataaagactctatagtttctataatttattttactggcaaatgtcatgcaacaataataaattattgtaaactttgtggcttttggtctgtgatgcttggtctcaaaggaaaaaataagatggtaaatgttgatatttacaaacttttctaaagatgtgtctctaacaataaaagttaattttagagt

SEQ ID NO: 18525 - protein, 106 aa, Homo sapiens
MKAKRSHQAVIMSTSLRVSPSIHGYHFDTASRKKAVGNIFENTDQESLERLFRNSGDKKAEERAKIIFAIDQDVEEKTRALMALKKRTKDKLFQFLKLRKYSIKVH

SEQ ID NO: 18526 - DNA, 1170 bp, Homo sapiens
cggaagatccccacatcgatgaaagcaaagcgaagccaccaagccgtcatcatgtccacgtcgctacgagtcagcccatccatccatggctaccacttcgacacagcctctcgtaagaaagccgtgggcaacatctttgaaaacacagaccaagaatcactagaaaggctcttcagaaacttgcggaaatattccatcaaagttcactgaagagaagaggatggataaggacgttatccaagaatggacattcaaagaccaagtgagtttgtgagattctaacagatgcagcattttgctgctaccttacaagcttctcttctgtcaggactccagaggctggaaagggaccgggactggaaagggaccaggactgaacagactggttacaaagactccaaacaatttcatgccctgtgctgttacagaggagaacaaaatgctttcagcaaggatttgaaaactcttccgtccctgcaggaaaggattgatgctgatagaagagcctggacagatgtaatgagaactaaagaaaacagatggctggagatgacatttatccagggtcactttgtcaggccctaggacttaaatcgaagttgaacttttttttttttttttaaccaaatagataggggaagggaggagggagagggaggacagggagagaaaataccatgcataaattgtttactgaatttttatatctgagtgttcaaaatatttccaagcctgagtattgtctattggtatagatttttagaaatcaataattgattatttatttgcacttattacaatgcctgaaaaagtgcaccacatggatgttaagtagaaattcaagaaagtaagatgtcttcagcaactcagtaaaaccttacgccaccttttggtttgtaaaaggttttttatacatttcaaacaggttgcacaaaagttaaaataatggggtcttttataaatccaaagtactgtgaaaacattttacatattttttaaatcttctgactaatgctaaaacgtaatctaattaaatttcatacagttactgcagtaagcattaggaagtgaatatgatatacaaaatagtttataaagactctatagtttctataatttattttactggcaaatgtcatgcaacaataataaattattgtaaactttgtg

SEQ ID NO: 18527 - protein, 63 aa, Homo sapiens
MKAKRSHQAVIMSTSLRVSPSIHGYHFDTASRKKAVGNIFENTDQESLERLFRNLRKYSIKVH

SEQ ID NO: 18528 - DNA, 1280 bp, Homo sapiens
cggaagatccccacatcgatgaaagcaaagcgaagccaccaagccgtcatcatgtccacgtcgctacgagtcagcccatccatccatggctaccacttcgacacagcctctcgtaagaaagccgtgggcaacatctttgaaaacacagaccaagaatcactagaaaggctcttcagaaacttgcggaaatattccatcaaagttcactgaagagaagaggatggataaggacgttatccaagaatggacattcaaagaccaagtgagtttgtgagattctaacagatgcagcattttgctgctaccttacaagcttctcttctgtcaggactccagaggctggaaagggaccgggactggaaagggaccaggactgaacagactggttacaaagactccaaacaatttcatgccctgtgctgttacagaggagaacaaaatgctttcagcaaggatttgaaaactcttccgtccctgcaggaaaggattgatgctgatagaagagcctggacagatgtaatgagaactaaagaaaacagatggctggagatgacatttatccagggtcactttgtcaggccctaggacttaaatcgaagttgaacttttttttttttttttaaccaaatagataggggaagggaggagggagagggaggacagggagagaaaataccatgcataaattgtttactgaatttttatatctgagtgttcaaaatatttccaagcctgagtattgtctattggtatagatttttagaaatcaataattgattatttatttgcacttattacaatgcctgaaaaagtgcaccacatggatgttaagtagaaattcaagaaagtaagatgtcttcagcaactcagtaaaaccttacgccaccttttggtttgtaaaaggttttttatacatttcaaacaggttgcacaaaagttaaaataatggggtcttttataaatccaaagtactgtgaaaacattttacatattttttaaatcttctgactaatgctaaaacgtaatctaattaaatttcatacagttactgcagtaagcattaggaagtgaatatgatatacaaaatagtttataaagactctatagtttctataatttattttactggcaaatgtcatgcaacaataataaattattgtaaactttgtggcttttggtctgtgatgcttggtctcaaaggaaaaaataagatggtaaatgttgatatttacaaacttttctaaagatgtgtctctaacaataaaagttaattttagagt

SEQ ID NO: 18529 - protein, 63 aa, Homo sapiens; identical to SEQ ID NO: 18527

SEQ ID NO: 18530 - DNA, 1659 bp, Homo sapiens
cggaagatccccacatcgatgaaagcaaagcgaagccaccaagccgtcatcatgtccacgtcgctacgagtcagcccatccatccatggctaccacttcgacacagcctctcgtaagaaagccgtgggcaacatctttgaaaacacagaccaagaatcactagaaaggctcttcagaaacttgcggaaatattccatcaaagttcactgaagagaagaggatggataaggacgttatccaagaatggacattcaaagaccaagtgagtttgtgagattctaacagatgcagcattttgctgctaccttacaagcttctcttctgtcaggactccagaggctggaaagggaccgggactggaaagggaccaggactgaacagactggttacaaagactccaaacaatttcatgccctgtgctgttacagaggagaacaaaatgctttcagcaaggatttgaaaactcttccgtccctgcaggaaaggattgatgctgatagaagagcctggacagatgtaatgagaactaaagaaaacagatggctggagatgacatttatccagggtcactttgtcaggccctaggacttaaatcgaagttgaacttttttttttttttttaaccaaatagataggggaagggaggagggagagggaggacagggagagaaaataccatgcataaattgtttactgaatttttatatctgagtgttcaaaatatttccaagcctgagtattgtctattggtatagatttttagaaatcaataattgattatttatttgcacttattacaatgcctgaaaaagtgcaccacatggatgttaagtagaaattcaagaaagtaagatgtcttcagcaactcagtaaaaccttacgccaccttttggtttgtaaaaggttttttatacatttcaaacaggttgcacaaaagttaaaataatggggtcttttataaatccaaagtactgtgaaaacattttacatattttttaaatcttctgactaatgctaaaacgtaatctaattaaatttcatacagttactgcagtaagcattaggaagtgaatatgatatacaaaatagtttataaagactctatagtttctataatttattttactggcaaatgtcatgcaacaataataaattattgtaaactttgtggcttttggtctgtgatgcttggtctcaaaggaaaaaataagatggtaaatgttgatatttacaaacttttctaaagatgtgtctctaacaataaaagttaattttagagtagttttatattaattaccaaactttttcaaaacaaattcttacgtcaaatatctgggaagtttctctgtcccaatcttaaaatataaaatatagatatagaagttcatagattgactccttggcatttctatttatgtatccattaaggatgagttttaaaaggctttctcttcatacttttgaaaaatttcttctatgattacagtagctatgtacatgtgtacatctatttttcccaagcaatatgttttgggtttagagtctgagtgatgaccaagattctgtgtgttactactgtttgtttaataggaacaaatatagaaataatattatctctttgcttatttcccgttaaaactataataaaatgtttctagg

SEQ ID NO: 18531 - protein, 63 aa, Homo sapiens; identical to SEQ ID NO: 18527

SEQ ID NO: 18532 - DNA, 358 bp, Homo sapiens
ttaagtcctagggcctgacaaagtgaccctggataaatgtcatctccagccatctgttttctttagttctcattacatctgtccaggctcttctatcagcatcaatcctttcctgcagggacggaagagttttcaaatccttgctgaaacttgtcttttgtcctcttcttcaaggccatcagggcacgcgttttctcctccacatcttgatctatggcaaaaatgatcttggctctctcctctgctttcttgtctccagagtttctgaagagcctttctagtgattcttggtctgtgttttcaaagatgttgcccacggctttcttacgagaggctgtgtcgaagtggtagccatgga

SEQ ID NO: 18533 - protein, 45 aa, Homo sapiens
MAKMILALSSAFLSPEFLKSLSSDSWSVFSKMLPTAFLREAVSKW

SEQ ID NO: 18534 - DNA, 528 bp, Homo sapiens
acagcaaatatcttccactgagatcgtgtggttttaatcatacaaggagagtggcagaagaacagaaagattgaaaccaaggacagagaacacctgaaattgcttcagggtcatatgtcacagcgctgggcatttcatttgggtatctatcatcattcccattctgcaatgaggaaatgctgtcagagtgattaagtaatttgcccatggtctcacatagaagcctgtcttctccagggaacacagcactcagaatcgtctcggcccctgcataagcctgcatgagcctgggctctggggacccatcctggtgcatcattcgttggctctgtgacaatgggcacatcgtttaacctctcttggcttcattctccttactggaatgatggagagagttttgcctatttcagaggcttgctcttctatacgtgagcctataagtaacttgtcttaagaatttccactccttctgtactctgatttaaatttgaaggcatcaaaacaaaaacaatcaagatttcagattcc

SEQ ID NO: 18535 - protein, 31 aa, Homo sapiens
MGTSFNLSWLHSPYWNDGESFAYFRGLLFYT

SEQ ID NO: 18536 - DNA, 842 bp, Homo sapiens
aggttgaattcatggttttatggccttaatcatctagcagatacaatacaaacctatttgaccaacaaacccagaagtaacctggccaggcgcagtggcatacacctgtaattccaacacagtgggaggatctcttgatgccaagagtgcaagaccagcctgggcaacatagtcagtggcccggacaatgcttttgatgaacagatgatgagtgacaatgcaagatgaactgtgacaaggatcccgtgggttgtcaaatgagttaagaggaaggaaaaattcctttgggttgccgaggccaagacaagcttcatttcaagcttagtcttgaagatgagtgggattaagataaaaaataaagaatggaaatgagcatgaacaaaaacgtgatggtgaaagcatatttgctattttcaaaagccaggagcagtgctatcagtgacaggcaaacaggcctggaaaagaaggtaccaagacaaggatatcttcaaaatacaggcttgagcacttaatctaaagccagaaaaaaacattggcttcaactgtccatcaaactctattaaatataagaaagtttcctaaatatatcatttttccctgttagaattcattgtctctactgatttcaaaatcagcaaatatttattgtaaaaaagaaagaaaaaatacttgttaaaatctatttctataaaaactactgctactggtttctccctaaatgctcggcagtgagcaaagaaagatactgttaacatttagtagctgctgcggtcaccttggcataatcgagtgaacacagactttaatggcagtttaattagatttaccacggggaagatgtc

SEQ ID NO: 18537 - protein, 49 aa, Homo sapiens
MEMSMNKNVMVKAYLLFSKARSSAISDRQTGLEKKVPRQGYLQNTGLST

SEQ ID NO: 18538 - DNA, 613 bp, Homo sapiens
ggtgaaggagatggcacaggcagaggtacagagtggtgactgaaaccacacgccatgttgggagacttccaaacaagtctagagagttggcacttagggatgaagaaatcatcttctggtcagtggcccggacaatgcttttgatgaacagatgatgagtgacaatgcaagatgaactgtgacaaggatcccgtgggttgtcaaatgagttaagaggaaggaaaaattcctttgggttgccgaggccaagacaagcttcatttcaagcttagtcttgaagatgagtgggattaagataaaaaataaagaatggaaatgagcatgaacaaaaacgtgatggtgaaagcatatttgctattttcaaaagccaggagcagtgctatcagtgacaggcaaacaggcctggaaaagaaggtaccaagacaaggatatcttcaaaatacaggcttgagcacttaatctaaagccagaaaaaaacattggcttcaactgtccatcaaactctattaaatataagaaagtttcctaaatatatcatttttccctgttagaattcattgtctctactgatttcaaaatcagcaaatatttattgtaaaaaagaaagaaaaaa

SEQ ID NO: 18539 - protein, 49 aa, Homo sapiens; identical to SEQ ID NO: 18537

SEQ ID NO: 18540 - DNA, 663 bp, Homo sapiens
gtggtgactgaaaccacacgccatgttgggagacttccaaacaagtctagagagttggcacttagggatgaagaaatcatcttctgggtacacttggtctttcctgatgacgcttttaagagaaaggcagagttgaccctgggctttcaaaaaactgttctttcaggcaaaacctcagagagaactggctgctagtgatcctctgcagagaccttgaagagcacggcaattatgaaacttcaacaagaaaagatttaagctgatcttttaaaaaaatatatactgtcaggaattttgtagaaatgactttaatgtaataactgcttctttgacttatgttttgtcttgtggtgaaaagaaaaatatttataaaagcatgcctgtgtcctaaaattggggacacaaacttaaatgactgaaggcacttgaggagtggaggcaaggatggtgaaaccaggccctgtaccaagcaggagagcgtgaacctgctaaagagagtgactgcttctcatttccagtcaatgcgactggtgtcgcattccagtcaaatggagttgcgacaccatttcagccacagcgattgatctggattttctgtaaaattccctgatttttacatattgccaattaattaattaattaaaaagaaatgtagatgttcaa

SEQ ID NO: 18541 - protein, 37 aa, Homo sapiens
MLGDFQTSLESWHLGMKKSSSGYTWSFLMTLLRERQS

SEQ ID NO: 18542 - DNA, 473 bp, Homo sapiens
ggatttttggtggggtgttgatgcaatgttttgcaactagatagggatgatggctggctgcacagcattgatggagttcaatggtgcaatcgcggctcacggcaactagaggagttataacacaagatttggggtgacggcatggaaattaaaagctggtgaagcacatggcctttagatctggatgtacttgagctgtgggatacagagcataaaggggagcacaccactaagataaatctaggttcttgtctcataaccaggaaaaattagacatgccgacaaattgaaagaagctttaggagtcagatcctgatagagaccagacactgctggaattctcactccaacaaaagattacttcaaggtcggaacccaaacctgggtgaagaataactcacttataacctggcaggatccatgatggtgccagccccttcaccaaatgtgaccataattcaaaaggatcacac

SEQ ID NO: 18543 - protein, 40 aa, Homo sapiens
TCRQIERSFRSQILIETRHCWNSHSNKRLLQGRNPNLGEE

SEQ ID NO: 18544 - DNA, 3879 bp, Homo sapiens
agacatgagtggacaccttagggggctcggctgcggaaaaggtgctgcagtccacagggaacatggggggattggacgggttgcctgaagaagagaggaaagaatccctcaccccagcccccaaaaggctgtgatgggatggggaaaccccataatcgctgtcttccggacaccttttgccccttggctgcagttccactggtcggcgcccttctcagcctggcttggaaccgtcctcactcacctccactcctcccagcagcgctcaggcacaacggtgtgtcctccctgtgacaacgagttgaaatctgaggccatcattgaacatctctgtgccagcgagtttgcactgaggatgaaaataaaagaagtgaaaaaagaaaatggcgacaagaagattgtccccaagaagaagaagcccctgaagttggggcccatcaagaagaaggacctgaagaagcttgtgctgtacctgaagaatggggctgactgtccctgccaccagctggacaacctcagccaccacttcctcatcatgggccgcaaggtgaagagccagtacttgctgacggccatccacaagtgggacaagaaaaacaaggagttcaaaaacttcatgaagaaaatgaaaaaccatgagtgccccacctttcagtccgtgtttaagtgattctcccgggggcagggtggggagggagcctcgggtggggtgggagcgggggggacagtgccccgggaacccggtgggtcacacacacgcactgcgcctgtcagtagtggacattgtaatccagtcggcttgttcttgcagcattcccgctcccttccctccatagccacgctccaaaccccagggtagccatggccgggtaaagcaagggccatttagattaggaaggtttttaagatccgcaatgtggagcagcagccactgcacaggaggaggtgacaaaccatttccaacagcaacacagccactaaaacacaaaaagggggattgggcggaaagtgagagccagcagcaaaaactacattttgcaacttgttggtgtggatctattggctgatctatgcctttcaactagaaaattctaatgattggcaagtcacgttgttttcaggtccagagtagtttctttctgtctgctttaaatggaaacagactcataccacacttacaattaaggtcaagcccagaaagtgataagtgcagggaggaaaagtgcaagtccattatgtaatagtgacagcaaagggaccaggggagaggcattgccttctctgcccacagtctttccgtgtgattgtctttgaatctgaatcagccagtctcagatgccccaaagtttcggttcctatgagcccggggcatgatctgatccccaagacatgtggaggggcagcctgtgcctgcctttgtgtcagaaaaaggaaaccacagtgagcctgagagagacggcgattttcgggctgagaaggcagtagttttcaaaacacatagttaaaaaagaaacaaatgaaaaaaattttagaacagtccagcaaattgctagtcagggtgaattgtgaaattgggtgaagagcttaggattctaatctcatgttttttccttttcacatttttaaaagaacaatgacaaacacccacttatttttcaaggttttaaaacagtctacattgagcatttgaaaggtgtgctagaacaaggtctcctgatccgtccgaggctgcttcccagaggagcagctctccccaggcatttgccaagggaggcggatttccctggtagtgtagctgtgtggctttccttcctgaagagtccgtggttgccctagaacctaacaccccctagcaaaactcacagagctttccgtttttttctttcctgtaaagaaacatttcctttgaacttgattgcctatggatcaaagaaattcagaacagcctgcctgtccccccgcactttttacatatatttgtttcatttctgcagatggaaagttgacatgggtggggtgtccccatccagcgagagagtttcaaaagcaaaacatctctgcagtttttcccaagtaccctgagatacttcccaaagcccttatgtttaatcagcgatgtatataagccagttcacttagacaactttacccttcttgtccaatgtacaggaagtagttctaaaaaaaatgcatattaatttcttcccccaaagccggattcttaattctctgcaacactttgaggacatttatgattgtccctctgggccaatgcttatacccagtgaggatgctgcagtgaggctgtaaagtggccccctgcggccctagcctgacccggaggaaaggatggtagattctgttaactcttgaagactccagtatgaaaatcagcatgcccgcctagttacctaccggagagttatcctgataaattaacctctcacagttagtgatcctgtccttttaacaccttttttgtggggttctctctgacctttcatcgtaaagtgctggggaccttaagtgatttgcctgtaattttggatgattaaaaaatgtgtatatatattagctaattagaaatattctacttctctgttgtcaaactgaaattcagagcaagttcctgagtgcgtggatctgggtcttagttctggttgattcactcaagagttcagtgctcatacgtatctgctcattttgacaaagtgcctcatgcaaccgggccctctctctgcggcagagtccttagtggaggggtttacctggaacattagtagttaccacagaatacggaagagcaggtgactgtgctgtgcagctctctaaatgggaattctcaggtaggaagcaacagcttcagaaagagctcaaaataaattggaaatgtgaatcgcagctgtgggttttaccaccgtctgtctcagagtcccaggaccttgagtgtcattagttactttattgaaggttttagacccatagcagctttgtctctgtcacatcagcaatttcagaaccaaaagggaggctctctgtaggcacagagctgcactatcacgagcctttgtttttctccacaaagtatctaacaaaaccaatgtgcagactgattggcctggtcattggtctccgagagaggaggtttgcctgtgatttcctaattatcgctagggccaaggtgggatttgtaaagctttacaataatcattctggatagagtcctgggaggtccttggcagaactcagttaaatctttgaagaatatttgtagttatcttagaagatagcatgggaggtgaggattccaaaaacattttatttttaaaatatcctgtgtaacacttggctcttggtacctgtgggttagcatcaagttctccccagggtagaattcaatcagagctccagtttgcatttggatgtgtaaattacagtaatcccatttcccaaacctaaaatctgtttttctcatcagactctgagtaactggttgctgtgtcataacttcatagatgcaggaggctcaggtgatctgtttgaggagagcaccctaggcagcctgcagggaataacatactggccgttctgacctgttgccagcagatacacaggacatggatgaaattcccgtttcctctagtttcttcctgtagtactcctcttttagatcctaagtctcttacaaaagctttgaatactgtgaaaatgttttacattccatttcatttgtgttgtttttttaactgcattttaccagatgttttgatgttatcgcttatgttaatagtaattcccgtacgtgttcattttattttcatgctttttcagccatgtatcaatattcacttgactaaaatcactcaattaatcaatgat

SEQ ID NO: 18545 - protein, 178 aa, Homo sapiens
MGWGNPIIAVFRTPFAPWLQFHWSAPFSAWLGTVLTHLHSSQQRSGTTVCPPCDNELKSEAIIEHLCASEFALRMKIKEVKKENGDKKIVPKKKKPLKLGPIKKKDLKKLVLYLKNGADCPCHQLDNLSHHFLIMGRKVKSQYLLTAIHKWDKKNKEFKNFMKKMKNHECPTFQSVFK

SEQ ID NO: 18546 - DNA, 4466 bp, Homo sapiens
gcactccagccctgcagcctccggagtcagtgccgcgcgcccgccgccccgcgccttcctgctcgccgcacctccgggagccggggcgcacccagcccgcagcgccgcctccccgcccgcgccgcctccgaccgcaggccgagggccgccactggccggggggaccgggcagcagcttgcggccgcggagccgggcaacgctggggactgcgccttttgtccccggaggtccctggaagtttgcggcaggacgcgcgcggggaggcggcggaggcagccccgacgtcgcggagaacagggcgcagagccggcatgggcatcgggcgcagcgaggggggccgccgcggggcagccctgggcgtgctgctggcgctgggcgcggcgcttctggccgtgggctcggccagcgagtacgactacgtgagcttccagtcggacatcggcccgtaccagagcgggcgcttctacaccaagccacctcagtgcgtggacatccccgcggacctgcggctgtgccacaacgtgggctacaagaagatggtgctgcccaacctgctggagcacgagaccatggcggaggtgaagcagcaggccagcagctgggtgcccctgctcaacaagaactgccacgccggcacccaggtcttcctctgctcgctcttcgcgcccgtctgcctggaccggcccatctacccgtgtcgctggctctgcgaggccgtgcgcgactcgtgcgagccggtcatgcagttcttcggcttctactggcccgagatgcttaagtgtgacaagttccccgagggggacgtctgcatcgccatgacgccgcccaatgccaccgaagcctccaagccccaaggcacaacggtgtgtcctccctgtgacaacgagttgaaatctgaggccatcattgaacatctctgtgccagcgagtttgcactgaggatgaaaataaaagaagtgaaaaaagaaaatggcgacaagaagattgtccccaagaagaagaagcccctgaagttggggcccatcaagaagaaggacctgaagaagcttgtgctgtacctgaagaatggggctgactgtccctgccaccagctggacaacctcagccaccacttcctcatcatgggccgcaaggtgaagagccagtacttgctgacggccatccacaagtgggacaagaaaaacaaggagttcaaaaacttcatgaagaaaatgaaaaaccatgagtgccccacctttcagtccgtgtttaagtgattctcccgggggcagggtggggagggagcctcgggtggggtgggagcgggggggacagtgccccgggaacccggtgggtcacacacacgcactgcgcctgtcagtagtggacattgtaatccagtcggcttgttcttgcagcattcccgctcccttccctccatagccacgctccaaaccccagggtagccatggccgggtaaagcaagggccatttagattaggaaggtttttaagatccgcaatgtggagcagcagccactgcacaggaggaggtgacaaaccatttccaacagcaacacagccactaaaacacaaaaagggggattgggcggaaagtgagagccagcagcaaaaactacattttgcaacttgttggtgtggatctattggctgatctatgcctttcaactagaaaattctaatgattggcaagtcacgttgttttcaggtccagagtagtttctttctgtctgctttaaatggaaacagactcataccacacttacaattaaggtcaagcccagaaagtgataagtgcagggaggaaaagtgcaagtccattatgtaatagtgacagcaaagggaccaggggagaggcattgccttctctgcccacagtctttccgtgtgattgtctttgaatctgaatcagccagtctcagatgccccaaagtttcggttcctatgagcccggggcatgatctgatccccaagacatgtggaggggcagcctgtgcctgcctttgtgtcagaaaaaggaaaccacagtgagcctgagagagacggcgattttcgggctgagaaggcagtagttttcaaaacacatagttaaaaaagaaacaaatgaaaaaaattttagaacagtccagcaaattgctagtcagggtgaattgtgaaattgggtgaagagcttaggattctaatctcatgttttttccttttcacatttttaaaagaacaatgacaaacacccacttatttttcaaggttttaaaacagtctacattgagcatttgaaaggtgtgctagaacaaggtctcctgatccgtccgaggctgcttcccagaggagcagctctccccaggcatttgccaagggaggcggatttccctggtagtgtagctgtgtggctttccttcctgaagagtccgtggttgccctagaacctaacaccccctagcaaaactcacagagctttccgtttttttctttcctgtaaagaaacatttcctttgaacttgattgcctatggatcaaagaaattcagaacagcctgcctgtccccccgcactttttacatatatttgtttcatttctgcagatggaaagttgacatgggtggggtgtccccatccagcgagagagtttcaaaagcaaaacatctctgcagtttttcccaagtaccctgagatacttcccaaagcccttatgtttaatcagcgatgtatataagccagttcacttagacaactttacccttcttgtccaatgtacaggaagtagttctaaaaaaaatgcatattaatttcttcccccaaagccggattcttaattctctgcaacactttgaggacatttatgattgtccctctgggccaatgcttatacccagtgaggatgctgcagtgaggctgtaaagtggccccctgcggccctagcctgacccggaggaaaggatggtagattctgttaactcttgaagactccagtatgaaaatcagcatgcccgcctagttacctaccggagagttatcctgataaattaacctctcacagttagtgatcctgtccttttaacaccttttttgtggggttctctctgacctttcatcgtaaagtgctggggaccttaagtgatttgcctgtaattttggatgattaaaaaatgtgtatatatattagctaattagaaatattctacttctctgttgtcaaactgaaattcagagcaagttcctgagtgcgtggatctgggtcttagttctggttgattcactcaagagttcagtgctcatacgtatctgctcattttgacaaagtgcctcatgcaaccgggccctctctctgcggcagagtccttagtggaggggtttacctggaacattagtagttaccacagaatacggaagagcaggtgactgtgctgtgcagctctctaaatgggaattctcaggtaggaagcaacagcttcagaaagagctcaaaataaattggaaatgtgaatcgcagctgtgggttttaccaccgtctgtctcagagtcccaggaccttgagtgtcattagttactttattgaaggttttagacccatagcagctttgtctctgtcacatcagcaatttcagaaccaaaagggaggctctctgtaggcacagagctgcactatcacgagcctttgtttttctccacaaagtatctaacaaaaccaatgtgcagactgattggcctggtcattggtctccgagagaggaggtttgcctgtgatttcctaattatcgctagggccaaggtgggatttgtaaagctttacaataatcattctggatagagtcctgggaggtccttggcagaactcagttaaatctttgaagaatatttgtagttatcttagaagatagcatgggaggtgaggattccaaaaacattttatttttaaaatatcctgtgtaacacttggctcttggtacctgtgggttagcatcaagttctccccagggtagaattcaatcagagctccagtttgcatttggatgtgtaaattacagtaatcccatttcccaaacctaaaatctgtttttctcatcagactctgagtaactggttgctgtgtcataacttcatagatgcaggaggctcaggtgatctgtttgaggagagcaccctaggcagcctgcagggaataacatactggccgttctgacctgttgccagcagatacacaggacatggatgaaattcccgtttcctctagtttcttcctgtagtactcctcttttagatcctaagtctcttacaaaagctttgaatactgtgaaaatgttttacattccatttcatttgtgttgtttttttaactgcattttaccagatgttttgatgttatcgcttatgttaatagtaattcccgtacgtgttcattttattttcatgctttttcagccatgtatcaatattcacttgactaaaatcactcaattaatcaatgat

SEQ ID NO: 18547 - protein, 314 aa, Homo sapiens; identical to SEQ ID NO: 2256

SEQ ID NO: 18548 - DNA, 255 bp, Homo sapiens
agttagcagcaggattctggatggctgacaccgatgctgctgcaccttttggaaaaaatggatccaactgcttgccccgtcatcccagatggctaggcccccattcatcccctctcgctctcctactggaggaactgctgtatgaatcataaagctctgggtagggaagcagggagcaggttccaggcagagctgacaagtgacttcacttttgagcatcggttgaaccagatttaacgtctcttccagttctaa

SEQ ID NO: 18549 - protein, 43 aa, Homo sapiens
MADTDAAAPFGKNGSNCLPRHPRWLGPHSSPLALLLEELLYES

SEQ ID NO: 18550 - DNA, 1742 bp, Homo sapiens
atgtaagatgcgacttgctcttccttgccttacgccatgattgtgaggcttccccagccacgtggaactagatgggggtctcacgatgttgctcaggctggtcttgaactcctggcctgaagcgatcctaccaccttgacctcccaaagtgttgggattacatgtatgaaccaccatgcccggctctatttctccatgtcttgaatgaggaaaccgaggcttacagttaatgacttatggaattccgcactctcacaatggtatataatgctttctttgatgttaataatggtgggagtgtttatagctcttgtgtggaacacctaagggagaaacttagcacatcaaatcagcaataagatgagactaggggagctggagcattcatggaacggaggaggccgggtcttgggatcctgtcactcacagataatcacagaaacaccaaacaagcatcaggtatgagaatcgtcctggggctcggtcatctctgggcatgtctcagaggcaacctgcagcagcgaaatggtgtatttattctcagtttgagtaggattatcattactcacccttcattgagaatccctttacctggaggaggaaagaatgtatcctcagtttccccacttcttccgtgtggtgtgggaagctgcagaccggcagagggcgctccgggcagtcggcaaacagtccaggggcagatctacccagagccagcggagtggcctcctggaaacggccacagcttcatgaagatctgcagcgtggtggggcttcggggcttccggcacagacctcactggagcttggggagaggcatgaccacaacctcctggcctgaagcgattctaccacgtcgacttccgaaagtgttcaagaggcagagaacaacctccgaattgttctccgtgtttccagtcttgctcttcttaaactaattcttcaaatcatagccaccatgatctttccgcaccgcagggccttcctgccttcccttaggaagacccccactccgaatagctgtggcaagcgtcagctccatttcccacaaccccgtctttacacgctactgctcaacaattctgagccattctcttttttgttgtcgttgaattcatttattttaataatgtaagtactttgccattttaggttccattcaggtttttttttttttttttttttttttttgagtcggggtctcgctctgttgcccaggctggagtgcagtggtgtagtcacagatcactgcagccttgaactcctgggctctgagccattttcaagacccagattcactggccggtctctcccttctggagctatgcacgagttatacattctgcctagaatctttatccacaggactccctttcttgaccaacttctctcttcagttcccactttagatgttatcttttctggggaaacttccctgtcctctaagatgggatcacagacccaccccacatgcttccatgccccccaccttgcactgatgtggcaccggggctggtgacactgcggctggtgtggtgactatatgtttccttgattgacccttctggtaaactgtgagcttggtgatcctccgacccgcgggtttctaagttccctgatctcctctcctctagggctccaccccatttcagccccttacacctaagtacttctctgtatcttcttcacggtaggaactctgtagacgctgtatggtgaatgaaatatttatcaagcaattt

SEQ ID NO: 18551 - protein, 183 aa, Homo sapiens [sequence omitted]

SEQ ID NO: 18552 - DNA, 922 bp, Homo sapiens
gcggaaggcggggtcggccctggccccgcccacatcatttcccttcctcggcccagccccacagcgcgcagcttcggcagggtggctttacggccggaggagagggtgggtcccagacctgaggtaggaggccgagctgaggggcggggaagaggctttttgcggcaggaccgcggggtgtcctgtcctcgccatgaggccgcagcaggcgccggtgtccggaaaggtgttcattcagcgagactacagcagtggcacacgctgccagttccagaccaagttccctgcggagctggagaaccggattgataggcagcagtttgaagaaacagttcgaactctaaataacctttatgcagaagcagagaagctcggcggccagtcatatctcgaaggttgtttggcttgtttaacagcatataccatcttcctatgcatggaaactcattatgagaaggttctgaagaaagtctccaaatacattcaagagcagaatgagaagatctatgctccacaaggcctcctcctgacagaccctattgagcgaggactgcgagttattgaaattaccatttatgaagacagaggcatgagcagtggaagataaaccgaagaattaaagatcccacttccagccgggcccctcatgtatccactggccgaccgcagagtgtccctacctcctctccagagcatcattcctttctatctgctgccagagccacggtgccatttactccaaggactcactttctaaaattccacacctggagtgacctctagtcgctcagcatccactttgtgtctccaaattgtgtaggactctgtaatcttttgattagtttctgagaaaacacaatgaagcacttcacttttttttattcaaagccatttaataaaacacagttggtcagcccagtgc

SEQ ID NO: 18553 - protein, 137 aa, Homo sapiens; identical to SEQ ID NO: 2258

SEQ ID NO: 18554 - DNA, 1068 bp, Homo sapiens
gcggaaggcggggtcggccctggccccgcccacatcatttcccttcctcggcccagccccacagcgcgcagcttcggcagggtggctttacggccggaggagagggtgggtcccagacctgaggtaggaggccgagctgaggggcggggaagaggctttttgcggcaggaccgcggggtgtcctgtcctcgccatgaggccgcagcaggcgccggtgtccggaaaggtgttcattcagcgagactacagcagtggcacacgctgccagttccagaccaagttccctgcggagctggagaaccggattgataggcagcagtttgaagaaacagttcgaactctaaataacctttatgcagaagcagagaagctcggcggccagtcatatctcgaaggttgtttggcttgtttaacagcatataccatcttcctatgcatggaaactcattatgagaaggttctgaagaaagtctccaaatacattcaagagcagaatgagaagatctatgctccacaaggcctcctcctgacagaccctattgagcgaggactgcgagttattgaaattaccatttatgaagacagaggcatgagcagtggaagataaaccgaagaattaaagatcccacttccagccgggcccctcatgtatccactggccgaccgcagagtgtccctacctcctctccagagcatcattcctttctatctgctgccagagccacggtgccatttactccaaggactcactttctaaaattccacacctggagtgacctctagtcgctcagcatccactttgtgtctccaaattgtgtaggactctgtaatcttttgattagtttctgagaaaacacaatgaagcacttcacttttttttattcaaagccatttaataaaacacagttggtcagcccagtgcaaagcttgttatctgccaccagtacataccattggttctcttcattccttgggccagcttctcaggtggctttagacctcaacaagccgtatcttcaccagtgttctatcttgttcccctaaattaataaaatgtttttctccagg

SEQ ID NO: 18555 - protein, 137 aa, Homo sapiens; identical to SEQ ID NO: 2258

SEQ ID NO: 18556 - DNA, 1274 bp, Homo sapiens
gcggaaggcggggtcggccctggccccgcccacatcatttcccttcctcggcccagccccacagcgcgcagcttcggcagggtggctttacggccggaggagagggtgggtcccagacctgaggtaggaggccgagctgaggggcggggaagaggctttttgcggcaggaccgcggggtgtcctgtcctcgccatgaggccgcagcaggcgccggtgtccggaaaggtgttcattcagcgagactacagcagtggcacacgctgccagttccagaccaagttccctgcggagctggagaaccggattgataggcagcagtttgaagaaacagttcgaactctaaataacctttatgcagaagcagagaagctcggcggccagtcatatctcgaaggttgtttggcttgtttaacagcatataccatcttcctatgcatggaaactcattatgagaaggttctgaagaaagtctccaaatacattcaagagcagaatgagaagatctatgctccacaaggcctcctcctgacagaccctattgagcgaggactgcgagttattgaaattaccatttatgaagacagaggcatgagcagtggaagataaaccgaagaattaaagatcccacttccagccgggcccctcatgtatccactggccgaccgcagagtgtccctacctcctctccagagcatcattcctttctatctgctgccagagccacggtgccatttactccaaggactcactttctaaaattccacacctggagtgacctctagtcgctcagcatccactttgtgtctccaaattgtgtaggactctgtaatcttttgattagtttctgagaaaacacaatgaagcacttcacttttttttattcaaagccatttaataaaacacagttggtcagcccagtgcaaagcttgttatctgccaccagtacataccattggttctcttcattccttgggccagcttctcaggtggctttagacctcaacaagccgtatcttcaccagtgttctatcttgttcccctaaattaataaaatgtttttctccaggattttggtgagggttggctgtggctgtcgttttgcacctcccagatttcaaagaattactggttttaccatgactcaaatcttaagatctgtttctactattcagttcctcaaactgaagcttattgaaaaaaaaatgtataatgttatttgttttattatagcaattatgcctaattaaagcagtatttaatgcaatttccagtt

SEQ ID NO: 18557 - protein, 137 aa, Homo sapiens; identical to SEQ ID NO: 2258

SEQ ID NO: 18558 - DNA, 2019 bp, Homo sapiens
gcggaaggcggggtcggccctggccccgcccacatcatttcccttcctcggcccagccccacagcgcgcagcttcggcagggtggctttacggccggaggagagggtgggtcccagacctgaggtaggaggccgagctgaggggcggggaagaggctttttgcggcaggaccgcggggtgtcctgtcctcgccatgaggccgcagcaggcgccggtgtccggaaaggtgttcattcagcgagactacagcagtggcacacgctgccagttccagaccaagttccctgcggagctggagaaccggattgataggcagcagtttgaagaaacagttcgaactctaaataacctttatgcagaagcagagaagctcggcggccagtcatatctcgaaggttgtttggcttgtttaacagcatataccatcttcctatgcatggaaactcattatgagaaggttctgaagaaagtctccaaatacattcaagagcagaatgagaagatctatgctccacaaggcctcctcctgacagaccctattgagcgaggactgcgagttattgaaattaccatttatgaagacagaggcatgagcagtggaagataaaccgaagaattaaagatcccacttccagccgggcccctcatgtatccactggccgaccgcagagtgtccctacctcctctccagagcatcattcctttctatctgctgccagagccacggtgccatttactccaaggactcactttctaaaattccacacctggagtgacctctagtcgctcagcatccactttgtgtctccaaattgtgtaggactctgtaatcttttgattagtttctgagaaaacacaatgaagcacttcacttttttttattcaaagccatttaataaaacacagttggtcagcccagtgcaaagcttgttatctgccaccagtacataccattggttctcttcattccttgggccagcttctcaggtggctttagacctcaacaagccgtatcttcaccagtgttctatcttgttcccctaaattaataaaatgtttttctccaggattttggtgagggttggctgtggctgtcgttttgcacctcccagatttcaaagaattactggttttaccatgactcaaatcttaagatctgtttctactattcagttcctcaaactgaagcttattgaaaaaaaaatgtataatgttatttgttttattatagcaattatgcctaattaaagcagtatttaatgcaatttccagttatttctttggagaattttatgtcattgttccattaccttgaatgttggaaagatatgatacgtgctgcttgttcatcacaaaaatcagtaagcacaataaagtggatgccaaaccatcagacacataaatgttcccgctgtgtccctggatatggaataagcaggtataaaaaatattttaattatagttttgttataaatataacttatgagaaaaaaatttgataggaataatactgtatattactaatttttaactatccctaaggcaaaccttatgacccacagaattttctcatatacagtattcagtgcacagaaatcttatgattggctcaagtacagtaagttacttctcagtaaaactctcaagtctgagtccatatttgtagctctgcttttggctgtacgttcctaggatcggggctgcttatgcctttcgtttatccttggggtttgagagcgctgtatttgggagagagtttaaaaatacattaggagagagaaaccattaaaagtttcactgtcagatatattgtaggtgctaatactggatttcgtctcagatttaatttcttttatgggtctgttagtcattcaacaaatcccataagtatgtgttaatattttaattgtgtaaaactcatttgttactttacagcctgtaatagtgtgtctgcattttcaacctgttgcaataactttgctgaaatattaacacattaataaaacttttcttaaacaa

SEQ ID NO: 18559 - protein, 137 aa, Homo sapiens; identical to SEQ ID NO: 2258

SEQ ID NO: 18560 - DNA, 654 bp, Homo sapiens
ggctttttgcggcaggacgtaagtgacggcgaaggcggtgcgaccgcagagtgtccctacctcctctccagagcatcattcctttctatctgctgccagagccacggtgccatttactccaaggactcactttctaaaattccacacctggagtgacctctagtcgctcagcatccactttgtgtctccaaattgtgtaggactctgtaatcttttgattagtttctgagaaaacacaatgaagcacttcacttttttttattcaaagccatttaataaaacacagttggtcagcccagtgcaaagcttgttatctgccaccagtacataccattggttctcttcattccttgggccagcttctcaggtggctttagacctcaacaagccgtatcttcaccagtgttctatcttgttcccctaaattaataaaatgtttttctccaggattttggtgagggttggctgtggctgtcgttttgcacctcccagatttcaaagaattactggttttaccatgactcaaatcttaagatctgtttctactattcagttcctcaaactgaagcttattgaaaaaaaaatgtataatgttatttgttttattatagcaattatgcctaattaaagcagtatttaatgcaatttccagtt

SEQ ID NO: 18561 - protein, 64 aa, Homo sapiens
MFFSRILVRVGCGCRFAPPRFQRITGFTMTQILRSVSTIQFLKLKLIEKKMYNVICFIIAIMPN

SEQ ID NO: 18562 - DNA, 1399 bp, Homo sapiens
ggctttttgcggcaggacgtaagtgacggcgaaggcggtgcgaccgcagagtgtccctacctcctctccagagcatcattcctttctatctgctgccagagccacggtgccatttactccaaggactcactttctaaaattccacacctggagtgacctctagtcgctcagcatccactttgtgtctccaaattgtgtaggactctgtaatcttttgattagtttctgagaaaacacaatgaagcacttcacttttttttattcaaagccatttaataaaacacagttggtcagcccagtgcaaagcttgttatctgccaccagtacataccattggttctcttcattccttgggccagcttctcaggtggctttagacctcaacaagccgtatcttcaccagtgttctatcttgttcccctaaattaataaaatgtttttctccaggattttggtgagggttggctgtggctgtcgttttgcacctcccagatttcaaagaattactggttttaccatgactcaaatcttaagatctgtttctactattcagttcctcaaactgaagcttattgaaaaaaaaatgtataatgttatttgttttattatagcaattatgcctaattaaagcagtatttaatgcaatttccagttatttctttggagaattttatgtcattgttccattaccttgaatgttggaaagatatgatacgtgctgcttgttcatcacaaaaatcagtaagcacaataaagtggatgccaaaccatcagacacataaatgttcccgctgtgtccctggatatggaataagcaggtataaaaaatattttaattatagttttgttataaatataacttatgagaaaaaaatttgataggaataatactgtatattactaatttttaactatccctaaggcaaaccttatgacccacagaattttctcatatacagtattcagtgcacagaaatcttatgattggctcaagtacagtaagttacttctcagtaaaactctcaagtctgagtccatatttgtagctctgcttttggctgtacgttcctaggatcggggctgcttatgcctttcgtttatccttggggtttgagagcgctgtatttgggagagagtttaaaaatacattaggagagagaaaccattaaaagtttcactgtcagatatattgtaggtgctaatactggatttcgtctcagatttaatttcttttatgggtctgttagtcattcaacaaatcccataagtatgtgttaatattttaattgtgtaaaactcatttgttactttacagcctgtaatagtgtgtctgcattttcaacctgttgcaataactttgctgaaatattaacacattaataaaacttttcttaaacaa

SEQ ID NO: 18563 - protein, 79 aa, Homo sapiens [sequence omitted]

SEQ ID NO: 18564 - DNA, 807 bp, Homo sapiens
aggacgtaagtgacggcgaaggcggtgcgacagcagctggagggcagaggaggcggcgcggggtgtcctgtcctcgccatgaggccgcagcaggcgccggtgtccggaaaggtgttcattcagcgagactacagcagtggcacacgctgccagttccagaccaagttccctgcggagctggagaaccggattgataggcagcagtttgaagaaacagttcgaactctaaataacctttatgcagaagcagagaagctcggcggccagtcatatctcgaaggttgtttggcttgtttaacagcatataccatcttcctatgcatggaaactcattatgagaaggttctgaagaaagtctccaaatacattcaagagcagaatgagaagatctatgctccacaaggcctcctcctgacagaccctattgagcgaggactgcgagttattgaaattaccatttatgaagacagaggcatgagcagtggaagataaaccgaagaattaaagatcccacttccagccgggcccctcatgtatccactggccgaccgcagagtgtccctacctcctctccagagcatcattcctttctatctgctgccagagccacggtgccatttactccaaggactcactttctaaaattccacacctggagtgacctctagtcgctcagcatccactttgtgtctccaaattgtgtaggactctgtaatcttttgattagtttctgagaaaacacaatgaagcacttcacttttttttattcaaagccatttaataaaacacagttggtcagcccagtgc

SEQ ID NO: 18565 - protein, 137 aa, Homo sapiens; identical to SEQ ID NO: 2258

SEQ ID NO: 18566 - DNA, 953 bp, Homo sapiens
aggacgtaagtgacggcgaaggcggtgcgacagcagctggagggcagaggaggcggcgcggggtgtcctgtcctcgccatgaggccgcagcaggcgccggtgtccggaaaggtgttcattcagcgagactacagcagtggcacacgctgccagttccagaccaagttccctgcggagctggagaaccggattgataggcagcagtttgaagaaacagttcgaactctaaataacctttatgcagaagcagagaagctcggcggccagtcatatctcgaaggttgtttggcttgtttaacagcatataccatcttcctatgcatggaaactcattatgagaaggttctgaagaaagtctccaaatacattcaagagcagaatgagaagatctatgctccacaaggcctcctcctgacagaccctattgagcgaggactgcgagttattgaaattaccatttatgaagacagaggcatgagcagtggaagataaaccgaagaattaaagatcccacttccagccgggcccctcatgtatccactggccgaccgcagagtgtccctacctcctctccagagcatcattcctttctatctgctgccagagccacggtgccatttactccaaggactcactttctaaaattccacacctggagtgacctctagtcgctcagcatccactttgtgtctccaaattgtgtaggactctgtaatcttttgattagtttctgagaaaacacaatgaagcacttcacttttttttattcaaagccatttaataaaacacagttggtcagcccagtgcaaagcttgttatctgccaccagtacataccattggttctcttcattccttgggccagcttctcaggtggctttagacctcaacaagccgtatcttcaccagtgttctatcttgttcccctaaattaataaaatgtttttctccagg

SEQ ID NO: 18567 - protein, 137 aa, Homo sapiens; identical to SEQ ID NO: 2258

SEQ ID NO: 18568 - DNA, 1159 bp, Homo sapiens
aggacgtaagtgacggcgaaggcggtgcgacagcagctggagggcagaggaggcggcgcggggtgtcctgtcctcgccatgaggccgcagcaggcgccggtgtccggaaaggtgttcattcagcgagactacagcagtggcacacgctgccagttccagaccaagttccctgcggagctggagaaccggattgataggcagcagtttgaagaaacagttcgaactctaaataacctttatgcagaagcagagaagctcggcggccagtcatatctcgaaggttgtttggcttgtttaacagcatataccatcttcctatgcatggaaactcattatgagaaggttctgaagaaagtctccaaatacattcaagagcagaatgagaagatctatgctccacaaggcctcctcctgacagaccctattgagcgaggactgcgagttattgaaattaccatttatgaagacagaggcatgagcagtggaagataaaccgaagaattaaagatcccacttccagccgggcccctcatgtatccactggccgaccgcagagtgtccctacctcctctccagagcatcattcctttctatctgctgccagagccacggtgccatttactccaaggactcactttctaaaattccacacctggagtgacctctagtcgctcagcatccactttgtgtctccaaattgtgtaggactctgtaatcttttgattagtttctgagaaaacacaatgaagcacttcacttttttttattcaaagccatttaataaaacacagttggtcagcccagtgcaaagcttgttatctgccaccagtacataccattggttctcttcattccttgggccagcttctcaggtggctttagacctcaacaagccgtatcttcaccagtgttctatcttgttcccctaaattaataaaatgtttttctccaggattttggtgagggttggctgtggctgtcgttttgcacctcccagatttcaaagaattactggttttaccatgactcaaatcttaagatctgtttctactattcagttcctcaaactgaagcttattgaaaaaaaaatgtataatgttatttgttttattatagcaattatgcctaattaaagcagtatttaatgcaatttccagtt

SEQ ID NO: 18569 - protein, 137 aa, Homo sapiens; identical to SEQ ID NO: 2258

SEQ ID NO: 18570 - DNA, 1904 bp, Homo sapiens
aggacgtaagtgacggcgaaggcggtgcgacagcagctggagggcagaggaggcggcgcggggtgtcctgtcctcgccatgaggccgcagcaggcgccggtgtccggaaaggtgttcattcagcgagactacagcagtggcacacgctgccagttccagaccaagttccctgcggagctggagaaccggattgataggcagcagtttgaagaaacagttcgaactctaaataacctttatgcagaagcagagaagctcggcggccagtcatatctcgaaggttgtttggcttgtttaacagcatataccatcttcctatgcatggaaactcattatgagaaggttctgaagaaagtctccaaatacattcaagagcagaatgagaagatctatgctccacaaggcctcctcctgacagaccctattgagcgaggactgcgagttattgaaattaccatttatgaagacagaggcatgagcagtggaagataaaccgaagaattaaagatcccacttccagccgggcccctcatgtatccactggccgaccgcagagtgtccctacctcctctccagagcatcattcctttctatctgctgccagagccacggtgccatttactccaaggactcactttctaaaattccacacctggagtgacctctagtcgctcagcatccactttgtgtctccaaattgtgtaggactctgtaatcttttgattagtttctgagaaaacacaatgaagcacttcacttttttttattcaaagccatttaataaaacacagttggtcagcccagtgcaaagcttgttatctgccaccagtacataccattggttctcttcattccttgggccagcttctcaggtggctttagacctcaacaagccgtatcttcaccagtgttctatcttgttcccctaaattaataaaatgtttttctccaggattttggtgagggttggctgtggctgtcgttttgcacctcccagatttcaaagaattactggttttaccatgactcaaatcttaagatctgtttctactattcagttcctcaaactgaagcttattgaaaaaaaaatgtataatgttatttgttttattatagcaattatgcctaattaaagcagtatttaatgcaatttccagttatttctttggagaattttatgtcattgttccattaccttgaatgttggaaagatatgatacgtgctgcttgttcatcacaaaaatcagtaagcacaataaagtggatgccaaaccatcagacacataaatgttcccgctgtgtccctggatatggaataagcaggtataaaaaatattttaattatagttttgttataaatataacttatgagaaaaaaatttgataggaataatactgtatattactaatttttaactatccctaaggcaaaccttatgacccacagaattttctcatatacagtattcagtgcacagaaatcttatgattggctcaagtacagtaagttacttctcagtaaaactctcaagtctgagtccatatttgtagctctgcttttggctgtacgttcctaggatcggggctgcttatgcctttcgtttatccttggggtttgagagcgctgtatttgggagagagtttaaaaatacattaggagagagaaaccattaaaagtttcactgtcagatatattgtaggtgctaatactggatttcgtctcagatttaatttcttttatgggtctgttagtcattcaacaaatcccataagtatgtgttaatattttaattgtgtaaaactcatttgttactttacagcctgtaatagtgtgtctgcattttcaacctgttgcaataactttgctgaaatattaacacattaataaaacttttcttaaacaa

SEQ ID NO: 18571 - protein, 137 aa, Homo sapiens; identical to SEQ ID NO: 2258

SEQ ID NO: 18572 - DNA, 991 bp, Homo sapiens
cgacagcagctggagggcagaggaggcgggtttgtgtttcccgggccgaaccgggttgtggggggcgcggggcctgggccaggcggcagctaaggcccgcggtgacagcatgggtgaaggggagcggggcagaggaggccttgggctgttttcggcggcgggtgggggcgaggggctggcgggtcagagtcccgggtccaggccggggctctgactcgcggttggtgttcccccgaccccgcagcgcggggtgtcctgtcctcgccatgaggccgcagcaggcgccggtgtccggaaaggtgttcattcagcgagactacagcagtggcacacgctgccagttccagaccaagttccctgcggagctggagaaccggattgataggcagcagtttgaagaaacagttcgaactctaaataacctttatgcagaagcagagaagctcggcggccagtcatatctcgaaggttgtttggcttgtttaacagcatataccatcttcctatgcatggaaactcattatgagaaggttctgaagaaagtctccaaatacattcaagagcagaatgagaagatctatgctccacaaggcctcctcctgacagaccctattgagcgaggactgcgagttattgaaattaccatttatgaagacagaggcatgagcagtggaagataaaccgaagaattaaagatcccacttccagccgggcccctcatgtatccactggccgaccgcagagtgtccctacctcctctccagagcatcattcctttctatctgctgccagagccacggtgccatttactccaaggactcactttctaaaattccacacctggagtgacctctagtcgctcagcatccactttgtgtctccaaattgtgtaggactctgtaatcttttgattagtttctgagaaaacacaatgaagcacttcacttttttttattcaaagccatttaataaaacacagttggtcagccca

SEQ ID NO: 18573 - protein, 137 aa, Homo sapiens; identical to SEQ ID NO: 2258

SEQ ID NO: 18574 - DNA, 1141 bp, Homo sapiens
cgacagcagctggagggcagaggaggcgggtttgtgtttcccgggccgaaccgggttgtggggggcgcggggcctgggccaggcggcagctaaggcccgcggtgacagcatgggtgaaggggagcggggcagaggaggccttgggctgttttcggcggcgggtgggggcgaggggctggcgggtcagagtcccgggtccaggccggggctctgactcgcggttggtgttcccccgaccccgcagcgcggggtgtcctgtcctcgccatgaggccgcagcaggcgccggtgtccggaaaggtgttcattcagcgagactacagcagtggcacacgctgccagttccagaccaagttccctgcggagctggagaaccggattgataggcagcagtttgaagaaacagttcgaactctaaataacctttatgcagaagcagagaagctcggcggccagtcatatctcgaaggttgtttggcttgtttaacagcatataccatcttcctatgcatggaaactcattatgagaaggttctgaagaaagtctccaaatacattcaagagcagaatgagaagatctatgctccacaaggcctcctcctgacagaccctattgagcgaggactgcgagttattgaaattaccatttatgaagacagaggcatgagcagtggaagataaaccgaagaattaaagatcccacttccagccgggcccctcatgtatccactggccgaccgcagagtgtccctacctcctctccagagcatcattcctttctatctgctgccagagccacggtgccatttactccaaggactcactttctaaaattccacacctggagtgacctctagtcgctcagcatccactttgtgtctccaaattgtgtaggactctgtaatcttttgattagtttctgagaaaacacaatgaagcacttcacttttttttattcaaagccatttaataaaacacagttggtcagcccagtgcaaagcttgttatctgccaccagtacataccattggttctcttcattccttgggccagcttctcaggtggctttagacctcaacaagccgtatcttcaccagtgttctatcttgttcccctaaattaataaaatgtttttctccagg

SEQ ID NO: 18575 - protein, 137 aa, Homo sapiens; identical to SEQ ID NO: 2258

SEQ ID NO: 18576 - DNA, 1347 bp, Homo sapiens
cgacagcagctggagggcagaggaggcgggtttgtgtttcccgggccgaaccgggttgtggggggcgcggggcctgggccaggcggcagctaaggcccgcggtgacagcatgggtgaaggggagcggggcagaggaggccttgggctgttttcggcggcgggtgggggcgaggggctggcgggtcagagtcccgggtccaggccggggctctgactcgcggttggtgttcccccgaccccgcagcgcggggtgtcctgtcctcgccatgaggccgcagcaggcgccggtgtccggaaaggtgttcattcagcgagactacagcagtggcacacgctgccagttccagaccaagttccctgcggagctggagaaccggattgataggcagcagtttgaagaaacagttcgaactctaaataacctttatgcagaagcagagaagctcggcggccagtcatatctcgaaggttgtttggcttgtttaacagcatataccatcttcctatgcatggaaactcattatgagaaggttctgaagaaagtctccaaatacattcaagagcagaatgagaagatctatgctccacaaggcctcctcctgacagaccctattgagcgaggactgcgagttattgaaattaccatttatgaagacagaggcatgagcagtggaagataaaccgaagaattaaagatcccacttccagccgggcccctcatgtatccactggccgaccgcagagtgtccctacctcctctccagagcatcattcctttctatctgctgccagagccacggtgccatttactccaaggactcactttctaaaattccacacctggagtgacctctagtcgctcagcatccactttgtgtctccaaattgtgtaggactctgtaatcttttgattagtttctgagaaaacacaatgaagcacttcacttttttttattcaaagccatttaataaaacacagttggtcagcccagtgcaaagcttgttatctgccaccagtacataccattggttctcttcattccttgggccagcttctcaggtggctttagacctcaacaagccgtatcttcaccagtgttctatcttgttcccctaaattaataaaatgtttttctccaggattttggtgagggttggctgtggctgtcgttttgcacctcccagatttcaaagaattactggttttaccatgactcaaatcttaagatctgtttctactattcagttcctcaaactgaagcttattgaaaaaaaaatgtataatgttatttgttttattatagcaattatgcctaattaaagcagtatttaatgcaatttccagtt

SEQ ID NO: 18577 - protein, 137 aa, Homo sapiens; identical to SEQ ID NO: 2258

SEQ ID NO: 18578 - DNA, 2092 bp, Homo sapiens
cgacagcagctggagggcagaggaggcgggtttgtgtttcccgggccgaaccgggttgtggggggcgcggggcctgggccaggcggcagctaaggcccgcggtgacagcatgggtgaaggggagcggggcagaggaggccttgggctgttttcggcggcgggtgggggcgaggggctggcgggtcagagtcccgggtccaggccggggctctgactcgcggttggtgttcccccgaccccgcagcgcggggtgtcctgtcctcgccatgaggccgcagcaggcgccggtgtccggaaaggtgttcattcagcgagactacagcagtggcacacgctgccagttccagaccaagttccctgcggagctggagaaccggattgataggcagcagtttgaagaaacagttcgaactctaaataacctttatgcagaagcagagaagctcggcggccagtcatatctcgaaggttgtttggcttgtttaacagcatataccatcttcctatgcatggaaactcattatgagaaggttctgaagaaagtctccaaatacattcaagagcagaatgagaagatctatgctccacaaggcctcctcctgacagaccctattgagcgaggactgcgagttattgaaattaccatttatgaagacagaggcatgagcagtggaagataaaccgaagaattaaagatcccacttccagccgggcccctcatgtatccactggccgaccgcagagtgtccctacctcctctccagagcatcattcctttctatctgctgccagagccacggtgccatttactccaaggactcactttctaaaattccacacctggagtgacctctagtcgctcagcatccactttgtgtctccaaattgtgtaggactctgtaatcttttgattagtttctgagaaaacacaatgaagcacttcacttttttttattcaaagccatttaataaaacacagttggtcagcccagtgcaaagcttgttatctgccaccagtacataccattggttctcttcattccttgggccagcttctcaggtggctttagacctcaacaagccgtatcttcaccagtgttctatcttgttcccctaaattaataaaatgtttttctccaggattttggtgagggttggctgtggctgtcgttttgcacctcccagatttcaaagaattactggttttaccatgactcaaatcttaagatctgtttctactattcagttcctcaaactgaagcttattgaaaaaaaaatgtataatgttatttgttttattatagcaattatgcctaattaaagcagtatttaatgcaatttccagttatttctttggagaattttatgtcattgttccattaccttgaatgttggaaagatatgatacgtgctgcttgttcatcacaaaaatcagtaagcacaataaagtggatgccaaaccatcagacacataaatgttcccgctgtgtccctggatatggaataagcaggtataaaaaatattttaattatagttttgttataaatataacttatgagaaaaaaatttgataggaataatactgtatattactaatttttaactatccctaaggcaaaccttatgacccacagaattttctcatatacagtattcagtgcacagaaatcttatgattggctcaagtacagtaagttacttctcagtaaaactctcaagtctgagtccatatttgtagctctgcttttggctgtacgttcctaggatcggggctgcttatgcctttcgtttatccttggggtttgagagcgctgtatttgggagagagtttaaaaatacattaggagagagaaaccattaaaagtttcactgtcagatatattgtaggtgctaatactggatttcgtctcagatttaatttcttttatgggtctgttagtcattcaacaaatcccataagtatgtgttaatattttaattgtgtaaaactcatttgttactttacagcctgtaatagtgtgtctgcattttcaacctgttgcaataactttgctgaaatattaacacattaataaaacttttcttaaacaa

SEQ ID NO: 18579 - protein, 137 aa, Homo sapiens; identical to SEQ ID NO: 2258

SEQ ID NO: 18580 - DNA, 469 bp, Homo sapiens
agcttatatgctgccagcctcaccctccacaccttggccttgtacttctggcctccagaaccgcaggaaagtacatttctgttgcttaggccgctcagcctgtggcactttgttacagcttctcacccagttcaggcccttttaattgattgctgggcctttgcagttgtttttgcttctaatatattcatctctcaatttatttctggaggctgccacccgaggggcagaacttcaattgtgtccctaatgggaaaccttgctgggatcatgtggtctacagcacaaggttgctaaagcatcttctgccagaattctgtgagtatctggttaggtgggtctggaatatactgagtttaaaaaagttaaataggtttctttactgcaagatgtttcagagactttaatatgctactctgctgtatgaatctccaggcaggaaatcttataaaatgtgtttctgaaatga

SEQ ID NO: 18581 - protein, 45 aa, Homo sapiens
MLPASPSTPWPCTSGLQNRRKVHFCCLGRSACGTLLQLLTQFRPF

SEQ ID NO: 18582 - DNA, 2387 bp, Homo sapiens
agaaattctttctccctatgtcccagcctacccccactttaccgaggccaacagccgcctcagaaaccagattcaggagctaacatgccccaggtctcacgaggatcagagactccagaggccagggaaggagatcaaggtagtcaagcgggggtcgtctcagatctggttgtgctcgagctatgcaaatgcctctcacggagatgcgaggacctatctattatgatgaccagggccacatccggagggggcaacagactttcatctatcagcccttttcaaccactgatctactaaactggaaacactctgaaccctgccatcttgctcctggtatcagagagccctgtcgtgcataactgtgtagaagtgttggactcggtttactccagcagacctgatctccgggaccagccttgggcatcagtagactggaagctatatgtggacaggagcagcttcatcaacccacaaggagagagatgtgcgggatatgtggtggaaccctggacactgtcgttgaagccagatcgttgctccaaggcacttcagcccagaaagatgagctcattgctttaatttgggccttagaactcagttaaggccttctacggtcccaggctttctgctgcatacactgaagggccacgaagtacagtcatctggacttggcacctggaatacaaggatggaaagcatcatttctgccagcttcttatggtcctgaggcgagacagtcatgagagaggaaaactgcaatgacttctgaccactgccagcctcgcttcctgcattttcttcttcggcttactcttgccaagttggagttgcctaacttccaagagggtatttgctcttttttttttctcactccacaaactcttcccaggtagttcagtccactcccatctaccagtcactatacgccgatgaatgccaatattattatttccagcttagacattgttcttggattgcagatgtgaggtttgacttgtttactagacattgctggctgaggatccctagcataacatggcccaaattcaatttatttccaaagctgtctcatctcctttgttctctgtaatgatgttgctatccattcgatcaacatactcagaaatatcaccccctccttccttcttccaagataagtgagttgctcacgacatgatcatgttttggcagtgtactctgtccattcccatcacttagtaagaatcatctaggttatgctgaagtatgaagttaatctccaaatttctctggctcagtacagaaaaagtccatttctcccttctgcaatgcacccaatgcaggtctgcagggtctctgctgtgcgttgtccctcagggactcaggctgaagaggcccccttgtcttatctggccacctcctctgcacatggctcaggattttccaggcaaggggttgagcagaggcttttcagtgctgggcctggatgtgacataagatgcttctgctcacagccttgtggtcagaacaagtcacatcatccctcctacttgcaggggtgctgggcagcgtagtcatccacagatcaggagagggagcagaggcaggtgttcccgggctgcagcgatctccactgcactgctgtgggctgaactgtgccctccaccccaccaagcttatatgctgccagcctcaccctccacaccttagaatgtggctgtatctcgacatagggtccttacagaggtagttaagttaaagcagggtcattagggtgggccctaaggtactctgactggtgtttttatgagaagaggagattaggacttacagggagagacactaggtatgtgagcacacagagaaaagaccatgtgaagacgagaagaaggcaactgtctccaatccagacggagatgccaggcacagcccttctgtcacaaccctcagaaggaaccaaccctgccgacaccttggccttgtacttctggcctccagaaccgcaggaaagtacatttctgttgcttaggccgctcagcctgtggcactttgttacagcttctcacccagttcaggcccttttaattgattgctgggcctttgcagttgtttttgcttctaatatattcatctctcaatttatttctggaggctgccacccgaggggcagaacttcaattgtgtccctaatgggaaaccttgctgggatcatgtggtctacagcacaaggttgctaaagcatcttctgccagaattctgtgagtatctggttaggtgggtctggaatatactgagtttaaaaaagttaaataggtttctttactgcaagatgtttcagagactttaatatgctactctgctgtatgaatctccaggcaggaaatcttataaaatgtgtttctgaaatg

SEQ ID NO: 18583 - protein, 106 aa, Homo sapiens
MPGTALLSQPSEGTNPADTLALYFWPPEPQESTFLLLRPLSLWHFVTASHPVQALLIDCWAFAVVFASNIFISQFISGGCHPRGRTSIVSLMGNLAGIMWSTAQGC

SEQ ID NO: 18584 - DNA, 456 bp, Homo sapiens
atgtttatgcaaatctgtaagagaggtggtattatagatatcaagggaaggggtactgttcaaaaaggaatgccccacaagtgttaccatggcaaaacgaagagtctgcagtgttgcccagcatgctgttggcattgttgtaacaaacaagttaagggaaagattcttgccaagagaattaatgtgcgtattgagcacattaagcactctaagagccgagatagcttcctgaaacgcctgaaggaacatgatcagaaaaagaaagaagccaaagagaaaggtacctgggttcaactgaagcgccatcctgctccacccagagacacgcactgtgtgagaaccagtgggaaggagcctgagctgaggaagctattccctatggattcatggcatattaactgtttaaatgaaataaaagacttctggactgtaaaaatgtttctcttcattgagtag

SEQ ID NO: 18585 - protein, 151 aa, Homo sapiens
MFMQICKRGGIIDIKGRGTVQKGMPHKCYHGKTKSLQCCPACCWHCCNKQVKGKILAKRINVRIEHIKHSKSRDSFLKRLKEHDQKKKEAKEKGTWVQLKRHPAPPRDTHCVRTSGKEPELRKLFPMDSWHINCLNEIKDFWTVKMFLFIE

SEQ ID NO: 18586 - DNA, 2095 bp, Homo sapiens
aatgcagagagctgaggctagagaggcagccaggggccgatcgtgaagatgctgtgtgtgggtgtgtggttggaaggagtttggacttgatcctatcagtcagtgcttttcaagctgatttttaagctgtgaagcccatgattgatatgaagttagcatgtaaaacagatgaaaatgatagaatggaggtgggagtgtgtgtcccagagccctctttttgagaccattcaccattttccaaggagctgtaggtgttggaaaccaatgaatcttgtagccgggagttagaagaccatatctgcctcttgattgaattgttctactagcagcatgaagggggacagatgatttctgctgaagattgtgagtttattcagaggtttgaaatgaaacgaagccctgaagagaagcaagagatgcttcaaactgaaggcagccagtgtgctaaaacatttataaatctgatgactcatatctgcaaagaacagaccgttcagtatatactaactatggtggatgatatgctgcaggaaaatcatcagcgtgttagcattttctttgactatgcaagatgtagcaagaacactgcgtggccctactttctgccaatgttgaatcgccaggatcccttcactgttcatatggcagcaagaattattgccaagttagcagcttggggaaaagaactgatggaaggcagtgacttaaattactatttcaattggataaaaactcagctgagttcacagaaactgcgtggtagcggtgttgctgttgaaacaggaacagtctcttcaagtgatagttcgcagtatgtgcagtgcgtggccgggtgtttgcagctgatgctccgggtcaatgagtaccgctttgcttgggtggaagcagatggggtaaattgcataatgggagtgttgagtaacaagtgtggctttcagctccagtatcaaatgattttttcaatatggctcctggcattcagtcctcaaatgtgtgaacacctgcggcgctataatatcattccagttctgtctgatatccttcaggagtctgtcaaagagaaagtaacaagaatcattcttgcagcatttcgtaactttttagaaaaatcaactgaaagagaaactcgccaagaatatgccctggctatgattcagtgcaaagttctgaaacagttggagaacttggaacagcagaagtacgatgatgaagatatcagcgaagatatcaaatttcttttggaaaaacttggagagagtgtccaggaccttagttcatttgatgaatacagttcagaacttaaatctggaaggttggaatggagtcctgtgcacaaatctgagaaattttggagagagaatgctgtgaggttaaatgagaagaattatgaactcttgaaaatcttgacaaaacttttggaagtgtcagatgatccccaagtcttagctgttgctgctcacgatgttggagaatatgtgcggcattatccacgaggcaaacgggtcatcgagcagctcggtgggaagcagctggtcatgaaccacatgcatcatgaagaccagcaggtccgctataatgctctgctggccgtgcagaagctcatggtgcacaactgggaataccttggcaagcagctccagtccgagcagccccagaccgctgccgcccgaagctaagcctgcctctggccttcccctccgcctcaatgcagaaccagtagtgggagcactgtgtttagagttaagagtgaacactgtttgattttacttggaatttcctctgttatatagcttttcccaatgctaatttccaaacaacaacaacaaaataacatgtttgcctgttaagttgtataaaagtaggtgattctgtatttaaagaaaatattactgttacatatactgcttgcaatttctgtatttattgttctctggaaataaatatagttattaaaggattctcactccaaacatggcctctctctttacttggactttgaacaaaagtcaactgttgtctcttttcaaaccaaattgggagaattgttgcaaagtagtgaatggcaaataaatgttttaaaatctatcgctctatc

SEQ ID NO: 18587 - protein, 443 aa, Homo sapiens
MISAEDCEFIQRFEMKRSPEEKQEMLQTEGSQCAKTFINLMTHICKEQTVQYILTMVDDMLQENHQRVSIFFDYARCSKNTAWPYFLPMLNRQDPFTVHMAARIIAKLAAWGKELMEGSDLNYYFNWIKTQLSSQKLRGSGVAVETGTVSSSDSSQYVQCVAGCLQLMLRVNEYRFAWVEADGVNCIMGVLSNKCGFQLQYQMIFSIWLLAFSPQMCEHLRRYNIIPVLSDILQESVKEKVTRIILAAFRNFLEKSTERETRQEYALAMIQCKVLKQLENLEQQKYDDEDISEDIKFLLEKLGESVQDLSSFDEYSSELKSGRLEWSPVHKSEKFWRENAVRLNEKNYELLKILTKLLEVSDDPQVLAVAAHDVGEYVRHYPRGKRVIEQLGGKQLVMNHMHHEDQQVRYNALLAVQKLMVHNWEYLGKQLQSEQPQTAAARS

SEQ ID NO: 18588 - DNA, 2036 bp, Homo sapiens
tgcagaccaggtcaggcgactcttgcagtttctccagcttgcctggtgcgtgctggtgtctcgccgcttggtcctctcctgttcttcggcccccggttgccagattgcttttcttccaggcctcaaccagatttgttgaaagacattcaagattacgaagtttagatgaccaaaatggatatccgaggtgctgtggatgctgctgtccccaccaatattattgctgccaaggctgcagaagttcgtgcaaacaaagtcaactggcaatcctatcttcagggacagatgatttctgctgaagattgtgagtttattcagaggtttgaaatgaaacgaagccctgaagagaagcaagagatgcttcaaactgaaggcagccagtgtgctaaaacatttataaatctgatgactcatatctgcaaagaacagaccgttcagtatatactaactatggtggatgatatgctgcaggaaaatcatcagcgtgttagcattttctttgactatgcaagatgtagcaagaacactgcgtggccctactttctgccaatgttgaatcgccaggatcccttcactgttcatatggcagcaagaattattgccaagttagcagcttggggaaaagaactgatggaaggcagtgacttaaattactatttcaattggataaaaactcagctgagttcacagaaactgcgtggtagcggtgttgctgttgaaacaggaacagtctcttcaagtgatagttcgcagtatgtgcagtgcgtggccgggtgtttgcagctgatgctccgggtcaatgagtaccgctttgcttgggtggaagcagatggggtaaattgcataatgggagtgttgagtaacaagtgtggctttcagctccagtatcaaatgattttttcaatatggctcctggcattcagtcctcaaatgtgtgaacacctgcggcgctataatatcattccagttctgtctgatatccttcaggagtctgtcaaagagaaagtaacaagaatcattcttgcagcatttcgtaactttttagaaaaatcaactgaaagagaaactcgccaagaatatgccctggctatgattcagtgcaaagttctgaaacagttggagaacttggaacagcagaagtacgatgatgaagatatcagcgaagatatcaaatttcttttggaaaaacttggagagagtgtccaggaccttagttcatttgatgaatacagttcagaacttaaatctggaaggttggaatggagtcctgtgcacaaatctgagaaattttggagagagaatgctgtgaggttaaatgagaagaattatgaactcttgaaaatcttgacaaaacttttggaagtgtcagatgatccccaagtcttagctgttgctgctcacgatgttggagaatatgtgcggcattatccacgaggcaaacgggtcatcgagcagctcggtgggaagcagctggtcatgaaccacatgcatcatgaagaccagcaggtccgctataatgctctgctggccgtgcagaagctcatggtgcacaactgggaataccttggcaagcagctccagtccgagcagccccagaccgctgccgcccgaagctaagcctgcctctggccttcccctccgcctcaatgcagaaccagtagtgggagcactgtgtttagagttaagagtgaacactgtttgattttacttggaatttcctctgttatatagcttttcccaatgctaatttccaaacaacaacaacaaaataacatgtttgcctgttaagttgtataaaagtaggtgattctgtatttaaagaaaatattactgttacatatactgcttgcaatttctgtatttattgttctctggaaataaatatagttattaaaggattctcactccaaacatggcctctctctttacttggactttgaacaaaagtcaactgttgtctcttttcaaaccaaattgggagaattgttgcaaagtagtgaatggcaaataaatgttttaaaatctatcgctctatc

SEQ ID NO: 18589 - protein, 483 aa, Homo sapiens; identical to SEQ ID NO: 2262

SEQ ID NO: 18590 - DNA, 2431 bp, Homo sapiens
agctgcttccgggcggaggtcctcggcctcccctaggcgaggcactaggtctgggggcggcgggtcttagcgtgcccgccacgctcgccgcctcccacctgccctggctggctggggcccgacccttgcgtcgctccggggcccaagttacggactcgggaatccagttgtccgcaccgaacaagccccgccgcagcgcccgcccctcctcttgctgctttggagtctcccggcttccgccttccgcagcagtcacgtgcctccgatcacgtgaccggcgcctctgtcattctactgcggccgccctggcttccttctacctgtgcggccctcaacgtctccttggtgcgggacccgcttcactttcggctcccggagtctccctccactgctcagacctctggacctgacaggagacgcctacttggctctgacgcggcgccccagcccggctgtgtccccggcgccccggaccaccctccctgccggctttgggtgcgttgtggggtcccgaggattcgcgagatttgttgaaagacattcaagattacgaagtttagatgaccaaaatggatatccgaggtgctgtggatgctgctgtccccaccaatattattgctgccaaggctgcagaagttcgtgcaaacaaagtcaactggcaatcctatcttcagggacagatgatttctgctgaagattgtgagtttattcagaggtttgaaatgaaacgaagccctgaagagaagcaagagatgcttcaaactgaaggcagccagtgtgctaaaacatttataaatctgatgactcatatctgcaaagaacagaccgttcagtatatactaactatggtggatgatatgctgcaggaaaatcatcagcgtgttagcattttctttgactatgcaagatgtagcaagaacactgcgtggccctactttctgccaatgttgaatcgccaggatcccttcactgttcatatggcagcaagaattattgccaagttagcagcttggggaaaagaactgatggaaggcagtgacttaaattactatttcaattggataaaaactcagctgagttcacagaaactgcgtggtagcggtgttgctgttgaaacaggaacagtctcttcaagtgatagttcgcagtatgtgcagtgcgtggccgggtgtttgcagctgatgctccgggtcaatgagtaccgctttgcttgggtggaagcagatggggtaaattgcataatgggagtgttgagtaacaagtgtggctttcagctccagtatcaaatgattttttcaatatggctcctggcattcagtcctcaaatgtgtgaacacctgcggcgctataatatcattccagttctgtctgatatccttcaggagtctgtcaaagagaaagtaacaagaatcattcttgcagcatttcgtaactttttagaaaaatcaactgaaagagaaactcgccaagaatatgccctggctatgattcagtgcaaagttctgaaacagttggagaacttggaacagcagaagtacgatgatgaagatatcagcgaagatatcaaatttcttttggaaaaacttggagagagtgtccaggaccttagttcatttgatgaatacagttcagaacttaaatctggaaggttggaatggagtcctgtgcacaaatctgagaaattttggagagagaatgctgtgaggttaaatgagaagaattatgaactcttgaaaatcttgacaaaacttttggaagtgtcagatgatccccaagtcttagctgttgctgctcacgatgttggagaatatgtgcggcattatccacgaggcaaacgggtcatcgagcagctcggtgggaagcagctggtcatgaaccacatgcatcatgaagaccagcaggtccgctataatgctctgctggccgtgcagaagctcatggtgcacaactgggaataccttggcaagcagctccagtccgagcagccccagaccgctgccgcccgaagctaagcctgcctctggccttcccctccgcctcaatgcagaaccagtagtgggagcactgtgtttagagttaagagtgaacactgtttgattttacttggaatttcctctgttatatagcttttcccaatgctaatttccaaacaacaacaacaaaataacatgtttgcctgttaagttgtataaaagtaggtgattctgtatttaaagaaaatattactgttacatatactgcttgcaatttctgtatttattgttctctggaaataaatatagttattaaaggattctcactccaaacatggcctctctctttacttggactttgaacaaaagtcaactgttgtctcttttcaaaccaaattgggagaattgttgcaaagtagtgaatggcaaataaatgttttaaaatctatcgctctatc

SEQ ID NO: 18591 - protein, 483 aa, Homo sapiens; identical to SEQ ID NO: 2262

SEQ ID NO: 18592 - DNA, 1967 bp, Homo sapiens
aatgcagagagctgaggctagagaggcagccaggggccgatcgtgaagatgctgtgtgtgggtgtgtggttggaaggagtttggacttgatcctatcagtcagtgcttttcaagctgatttttaagctgtgaagcccatgattgatatgaagttagcatgtaaaacagatgaaaatgatagaatggaggtgggagtgtgtgtcccagagccctctttttgagaccattcaccattttccaaggagctgtaggtgttggaaaccaatgaatcttgtagccgggagttagaagaccatatctgcctcttgattgaattgttctactagcagcatgaagggggacagatgatttctgctgaagattgtgagtttattcagaggtttgaaatgaaacgaagccctgaagagaagcaagagatgcttcaaactgaaggcagccagtgtgctaaaacatttataaatctgatgactcatatctgcaaagaacagaccgttcagtatatactaactatggtggatgatatgctgcaggaaaatcatcagcgtgttagcattttctttgactatgcaagatgtagcaagaacactgcgtggccctactttctgccaatgttgaatcgccaggatcccttcactgttcatatggcagcaagaattattgccaagttagcagcttggggaaaagaactgatggaaggcagtgacttaaattactatttcaattggataaaaactcagctgagttcacagaaactgcgtggtagcggtgttgctgttgaaacaggaacagtctcttcaagtgatagttcgcagtatgtgcagtgcgtggccgggtgtttgcagctgatgctccgggtcaatgagtaccgctttgcttgggtggaagcagatggggtaaattgcataatgggagtgttgagtaacaagtgtggctttcagctccagtatcaaatgattttttcaatatggctcctggcattcagtcctcaaatgtgtgaacacctgcggcgctataatatcattccagttctgtctgatatccttcaggagtctgtcaaagagaaagtaacaagaatcattcttgcagcatttcgtaactttttagaaaaatcaactgaaagagaaactcgccaagaatatgccctggctatgattcagtgcaaagttctgaaacagttggagaacttggaacagcagaagtacgatgatgaagatatcagcgaagatatcaaatttcttttggaaaaacttggagagagtgtccaggaccttagttcatttgatgaatacagttcagaacttaaatctggaaggttggaatggagtcctgtgcacaaatctgagaaattttggagagagaatgctgtgaggttaaatgagaagaattatgaactcttgaaaatcttgacaaaacttttggaagtgtcagatgatccccaagtcttagctgttgctgctcacgatgttggagaatatgtgcggcattatccacgaggcaaacgggtcatcgagcagctcggtgggaagcagctggtcatgaaccacatgcatcatgaagaccagcaggtccgctataatgctctgctggccgtgcagaagctcatggtgcacaactgggaataccttggcaagcagctccagtccgagcagccccagaccgctgccgcccgaagctaagcctgcctctggccttcccctccgcctcaatgcagaaccagtagtgggagcactgtgtttagagttaagagtgaacactgtttgattttacttggaatttcctctgttatatagcttttcccaatgctaatttccaaacaacaacaacaaaataacatgtttgcctgttaagttgtataaaagtaggtgattctgtatttaaagaaaatattactgttacatatactgcttgcaatttctgtatttattgttctctggaaataaatatagttattaaaggattctcactcc

SEQ ID NO: 18593 - protein, 443 aa, Homo sapiens; identical to SEQ ID NO: 18587

SEQ ID NO: 18594 - DNA, 2303 bp, Homo sapiens
agctgcttccgggcggaggtcctcggcctcccctaggcgaggcactaggtctgggggcggcgggtcttagcgtgcccgccacgctcgccgcctcccacctgccctggctggctggggcccgacccttgcgtcgctccggggcccaagttacggactcgggaatccagttgtccgcaccgaacaagccccgccgcagcgcccgcccctcctcttgctgctttggagtctcccggcttccgccttccgcagcagtcacgtgcctccgatcacgtgaccggcgcctctgtcattctactgcggccgccctggcttccttctacctgtgcggccctcaacgtctccttggtgcgggacccgcttcactttcggctcccggagtctccctccactgctcagacctctggacctgacaggagacgcctacttggctctgacgcggcgccccagcccggctgtgtccccggcgccccggaccaccctccctgccggctttgggtgcgttgtggggtcccgaggattcgcgagatttgttgaaagacattcaagattacgaagtttagatgaccaaaatggatatccgaggtgctgtggatgctgctgtccccaccaatattattgctgccaaggctgcagaagttcgtgcaaacaaagtcaactggcaatcctatcttcagggacagatgatttctgctgaagattgtgagtttattcagaggtttgaaatgaaacgaagccctgaagagaagcaagagatgcttcaaactgaaggcagccagtgtgctaaaacatttataaatctgatgactcatatctgcaaagaacagaccgttcagtatatactaactatggtggatgatatgctgcaggaaaatcatcagcgtgttagcattttctttgactatgcaagatgtagcaagaacactgcgtggccctactttctgccaatgttgaatcgccaggatcccttcactgttcatatggcagcaagaattattgccaagttagcagcttggggaaaagaactgatggaaggcagtgacttaaattactatttcaattggataaaaactcagctgagttcacagaaactgcgtggtagcggtgttgctgttgaaacaggaacagtctcttcaagtgatagttcgcagtatgtgcagtgcgtggccgggtgtttgcagctgatgctccgggtcaatgagtaccgctttgcttgggtggaagcagatggggtaaattgcataatgggagtgttgagtaacaagtgtggctttcagctccagtatcaaatgattttttcaatatggctcctggcattcagtcctcaaatgtgtgaacacctgcggcgctataatatcattccagttctgtctgatatccttcaggagtctgtcaaagagaaagtaacaagaatcattcttgcagcatttcgtaactttttagaaaaatcaactgaaagagaaactcgccaagaatatgccctggctatgattcagtgcaaagttctgaaacagttggagaacttggaacagcagaagtacgatgatgaagatatcagcgaagatatcaaatttcttttggaaaaacttggagagagtgtccaggaccttagttcatttgatgaatacagttcagaacttaaatctggaaggttggaatggagtcctgtgcacaaatctgagaaattttggagagagaatgctgtgaggttaaatgagaagaattatgaactcttgaaaatcttgacaaaacttttggaagtgtcagatgatccccaagtcttagctgttgctgctcacgatgttggagaatatgtgcggcattatccacgaggcaaacgggtcatcgagcagctcggtgggaagcagctggtcatgaaccacatgcatcatgaagaccagcaggtccgctataatgctctgctggccgtgcagaagctcatggtgcacaactgggaataccttggcaagcagctccagtccgagcagccccagaccgctgccgcccgaagctaagcctgcctctggccttcccctccgcctcaatgcagaaccagtagtgggagcactgtgtttagagttaagagtgaacactgtttgattttacttggaatttcctctgttatatagcttttcccaatgctaatttccaaacaacaacaacaaaataacatgtttgcctgttaagttgtataaaagtaggtgattctgtatttaaagaaaatattactgttacatatactgcttgcaatttctgtatttattgttctctggaaataaatatagttattaaaggattctcactcc

SEQ ID NO: 18595 - protein, 483 aa, Homo sapiens; identical to SEQ ID NO: 2262

SEQ ID NO: 18596 - DNA, 2249 bp, Homo sapiens
agctgcttccgggcggaggtcctcggcctcccctaggcgaggcactaggtctgggggcggcgggtcttagcgtgcccgccacgctcgccgcctcccacctgccctggctggctggggcccgacccttgcgtcgctccggggcccaagttacggactcgggaatccagttgtccgcaccgaacaagccccgccgcagcgcccgcccctcctcttgctgctttggagtctcccggcttccgccttccgcagcagtcacgtgcctccgatcacgtgaccggcgcctctgtcattctactgcggccgccctggcttccttctacctgtgcggccctcaacgtctccttggtgcgggacccgcttcactttcggctcccggagtctccctccactgctcagacctctggacctgacaggagacgcctacttggctctgacgcggcgccccagcccggctgtgtccccggcgccccggaccaccctccctgccggctttgggtgcgttgtggggtcccgaggattcgcgagatttgttgaaagacattcaagattacgaagtttagatgaccaaaatggatatccgaggtgctgtggatgctgctgtccccaccaatattattgctgccaaggctgcagaagttcgtgcaaacaaagtcaactggcaatcctatcttcagggacagatgatttctgctgaagattgtgagtttattcagaggtttgaaatgaaacgaagccctgaagagaagcaagagatgcttcaaactgaaggcagccagtgtgctaaaacatttataaatctgatgactcatatctgcaaagaacagaccgttcagtatatactaactatggtggatgatatgctgcaggaaaatcatcagcgtgttagcattttctttgactatgcaagatgtagcaagaacactgcgtggccctactttctgccaatgttgaatcgccaggatcccttcactgttcatatggcagcaagaattattgccaagttagcagcttggggaaaagaactgatggaaggcagtgacttaaattactatttcaattggataaaaactcagctgagttcacagagttcgcagtatgtgcagtgcgtggccgggtgtttgcagctgatgctccgggtcaatgagtaccgctttgcttgggtggaagcagatggggtaaattgcataatgggagtgttgagtaacaagtgtggctttcagctccagtatcaaatgattttttcaatatggctcctggcattcagtcctcaaatgtgtgaacacctgcggcgctataatatcattccagttctgtctgatatccttcaggagtctgtcaaagagaaagtaacaagaatcattcttgcagcatttcgtaactttttagaaaaatcaactgaaagagaaactcgccaagaatatgccctggctatgattcagtgcaaagttctgaaacagttggagaacttggaacagcagaagtacgatgatgaagatatcagcgaagatatcaaatttcttttggaaaaacttggagagagtgtccaggaccttagttcatttgatgaatacagttcagaacttaaatctggaaggttggaatggagtcctgtgcacaaatctgagaaattttggagagagaatgctgtgaggttaaatgagaagaattatgaactcttgaaaatcttgacaaaacttttggaagtgtcagatgatccccaagtcttagctgttgctgctcacgatgttggagaatatgtgcggcattatccacgaggcaaacgggtcatcgagcagctcggtgggaagcagctggtcatgaaccacatgcatcatgaagaccagcaggtccgctataatgctctgctggccgtgcagaagctcatggtgcacaactgggaataccttggcaagcagctccagtccgagcagccccagaccgctgccgcccgaagctaagcctgcctctggccttcccctccgcctcaatgcagaaccagtagtgggagcactgtgtttagagttaagagtgaacactgtttgattttacttggaatttcctctgttatatagcttttcccaatgctaatttccaaacaacaacaacaaaataacatgtttgcctgttaagttgtataaaagtaggtgattctgtatttaaagaaaatattactgttacatatactgcttgcaatttctgtatttattgttctctggaaataaatatagttattaaaggattctcactcc

SEQ ID NO: 18597 - protein, 465 aa, Homo sapiens; identical to SEQ ID NO: 2264

SEQ ID NO: 18598 - DNA, 1626 bp, Homo sapiens
cctgacaggagacgcctacttggctctgacgcggcgccccagcccggctgtgtccccggccaaatcttcagatacagagattaagttccaaattgattaagatcgttggaaacccggaatataattttggatttgttgaaagacattcaagattacgaagtttagatgaccaaaatggatatccgaggtgctgtggatgctgctgtccccaccaatattattgctgccaaggctgcagaagttcgtgcaaacaaagtcaactggcaatcctatcttcagggacagatgatttctgctgaagattgtgagtttattcagaggtttgaaatgaaacgaagccctgaagagaagcaagagatgcttcaaactgaaggcagccagtgtgctaaaacatttataaatctgatgactcatatctgcaaagaacagaccgttcagtatatactaactatggtggatgatatgctgcaggaaaatcatcagcgtgttagcattttctttgactatgcaagatgtagcaagaacactgcgtggccctactttctgccaatgttgaatcgccaggatcccttcactgttcatatggcagcaagaattattgccaagttagcagcttggggaaaagaactgatggaaggcagtgacttaaattactatttcaattggataaaaactcagctgagttcacagaaactgcgtggtagcggtgttgctgttgaaacaggaacagtctcttcaagtgatagttcgcagtatgtgcagtgcgtggccgggtgtttgcagctgatgctccgggtcaatgagtaccgctttgcttgggtggaagcagatggggtaaattgcataatgggagtgttgagtaacaagtgtggctttcagctccagtatcaaatgattttttcaatatggctcctggcattcagtcctcaaatgtgtgaacacctgcggcgctataatatcattccagttctgtctgatatccttcaggagtctgtcaaagagaaagtaacaagaatcattcttgcagcatttcgtaactttttagaaaaatcaactgaaagagaaactcgccaagaatatgccctggctatgattcagtgcaaagttctgaaacagttggagaacttggaacagcagaagtacgatgatgaagatatcagcgaagatatcaaatttcttttggaaaaacttggagagagtgtccaggaccttagttcatttgatgaatacagttcagaacttaaatctggaaggttggaatggagtcctgtgcacaaatctgagaaattttggagagagaatgctgtgaggttaaatgagaagaattatgaactcttgaaaatcttgacaaaacttttggaagtgtcagatgatccccaagtcttagctgttgctgctcacgatgttggagaatatgtgcggcattatccacgaggcaaacggcaaagcaaatgaaatcaagattgccacaatagtgagaattatgataaacccagttaaaaatgagtagtataggccggttgcagtggctcacgcctgtaataccaccactttgggaggccgaggcaggcagatcacaaggtcaggagaccatcctggctaagatggtgaaaccccttctctact

SEQ ID NO: 18599 - protein, 429 aa, Homo sapiens
MTKMDIRGAVDAAVPTNIIAAKAAEVRANKVNWQSYLQGQMISAEDCEFIQRFEMKRSPEEKQEMLQTEGSQCAKTFINLMTHICKEQTVQYILTMVDDMLQENHQRVSIFFDYARCSKNTAWPYFLPMLNRQDPFTVHMAARIIAKLAAWGKELMEGSDLNYYFNWIKTQLSSQKLRGSGVAVETGTVSSSDSSQYVQCVAGCLQLMLRVNEYRFAWVEADGVNCIMGVLSNKCGFQLQYQMIFSIWLLAFSPQMCEHLRRYNIIPVLSDILQESVKEKVTRIILAAFRNFLEKSTERETRQEYALAMIQCKVLKQLENLEQQKYDDEDISEDIKFLLEKLGESVQDLSSFDEYSSELKSGRLEWSPVHKSEKFWRENAVRLNEKNYELLKILTKLLEVSDDPQVLAVAAHDVGEYVRHYPRGKRQSK

SEQ ID NO: 18600 - DNA, 2104 bp, Homo sapiens
cattaaccaaacaaagagaagcagagtggatcctgtgctaatattgggaaaaccaggcaacaggactcatttggggcctttattgtgaaaacatgccccagctttcccaagataaccaagagtgcctccagaaacatttctccaggccgtctatatggacacagtttctgcccctgttcagggctcagagatataatacagacattcaccaaatcacagaaaatgaaggagacctcagggctgttcctgatatcaagtccttcccgcctgcacagctcccagactcgcccgccgccccgaagctgttcggcctcctttctagcccgctttccagcctcgcaaggttcttctctcaccttctccggcgaccccctcccgaggctccccggaggcgcctggacttctcccccctgcttcccgccctgccggccgcccggctctcgagggggcacgaggagctgccgggccgcctctcgctcctgctcggggcggcgctggcactgcccggccgaccctcggggggtcgtccgctgaggcccccccatccggtagccaagcccagggaagaagacgccaccgctgggcagagctcgcctatgccgcagatgggatcagagcggatggagatgcggaagcggcagatgcccgccgcccaggacacaccaggcgccgccccaggccagcccggagcggggagtcgcgggtccaacgcatgctgcttctgctggtgctgctgttgtagctgctcgtgtctcactgttagaaaccaggaagatcagaggcccacaatagcttcccacgaactcagagcagatcttccaacctgggaagaaagccctgctcctactctggaagaagtcaacgcctgggctcagtcatttgacaaattaatggtcactccagcaggaaggaatgcattccgtgaattcctccgaacagaattcagtgaggaaaatatgctcttctggatggcctgtgaggaactgaaaaaggaagctaataaaaacattattgaagagaaagcaaggataatctatgaagactacatttctatactttctcctaaggaggtgagcttagactcccgggtgagagaagtgatcaacagaaacatggtggagccatcccaacacatattcgatgatgctcaacttcagatttacaccctgatgcacagagactcatatcctcgattcatgaactctgctgtctataaggacttgcttcagtccttatcggagaaatctattgaagcataggatttttcaaatatatttattattaataaaataataaaagaattcatgggctacaactagcacagggaatttagaggttgtagcatcttctgctggagtaatactcaggctattctaataacagatgattccttcaacagactgctatatattcaccatgtaaactgcagccacctttagtgatacttttgaaaaaaaaaaataaagggatatggctgttgtagaaagatagcgtatttgcatttacaataacagtagcatgttgtcagtggccaaggctacacagaaggctccctgctgcccggagcaggtacatccaccagagcaaagggaaccacttttattttgcatgagtttggtaactgattactctcccctcaaagaaaagacattcaggtgtttctcaacgacatcttctgtccagcaagctcggtttgaatacgtcacttaccagtgccattgcaggacccaaattcacagttcataaaagatgtgaccactacatgtaaaaatagcattctacttgatcttacagtatgtatgtatgtatgtatggagacatatgtgtgcgtgtggatgtctacatggttaatggaaagcactgtgctctgaagtggatcagtctcaagtgtctggtaacagcagcagtgcttagaaaattcttttgttgaaaagagttactgttattatcagaatttgccaacctaaagaatgaatttttaaattcataacttggtcatgttcacaacaaaactgtcaaataagcatatttccatttttattactgaaagaaatatgggcattttcattctttaaagaaataaagcacaagaattttatctcaa

SEQ ID NO: 18601 - protein, 388 aa, Homo sapiens; identical to SEQ ID NO: 2270

SEQ ID NO: 18602 - DNA, 1667 bp, Homo sapiens
atgccccagctttcccaagataaccaagagtgcctccagaaacatttctccaggccgtctatatggacacagtttctgcccctgttcagggctcagagatataatacagacattcaccaaatcacagaaaatgaaggagacctcagggctgttcctgatatcaagcagatgggatcagagcggatggagatgcggaagcggcagatgcccgccgcccaggacacaccaggcgccgccccaggccagcccggagcggggagtcgcgggtccaacgcatgctgcttctgctggtgctgctgttgtagctgctcgtgtctcactgttagaaaccaggaagatcagaggcccacaatagcttcccacgaactcagagcagatcttccaacctgggaagaaagccctgctcctactctggaagaagtcaacgcctgggctcagtcatttgacaaattaatggtcactccagcaggaaggaatgcattccgtgaattcctccgaacagaattcagtgaggaaaatatgctcttctggatggcctgtgaggaactgaaaaaggaagctaataaaaacattattgaagagaaagcaaggataatctatgaagactacatttctatactttctcctaaggaggtgagcttagactcccgggtgagagaagtgatcaacagaaacatggtggagccatcccaacacatattcgatgatgctcaacttcagatttacaccctgatgcacagagactcatatcctcgattcatgaactctgctgtctataaggacttgcttcagtccttatcggagaaatctattgaagcataggatttttcaaatatatttattattaataaaataataaaagaattcatgggctacaactagcacagggaatttagaggttgtagcatcttctgctggagtaatactcaggctattctaataacagatgattccttcaacagactgctatatattcaccatgtaaactgcagccacctttagtgatacttttgaaaaaaaaaaataaagggatatggctgttgtagaaagatagcgtatttgcatttacaataacagtagcatgttgtcagtggccaaggctacacagaaggctccctgctgcccggagcaggtacatccaccagagcaaagggaaccacttttattttgcatgagtttggtaactgattactctcccctcaaagaaaagacattcaggtgtttctcaacgacatcttctgtccagcaagctcggtttgaatacgtcacttaccagtgccattgcaggacccaaattcacagttcataaaagatgtgaccactacatgtaaaaatagcattctacttgatcttacagtatgtatgtatgtatgtatggagacatatgtgtgcgtgtggatgtctacatggttaatggaaagcactgtgctctgaagtggatcagtctcaagtgtctggtaacagcagcagtgcttagaaaattcttttgttgaaaagagttactgttattatcagaatttgccaacctaaagaatgaatttttaaattcataacttggtcatgttcacaacaaaactgtcaaataagcatatttccatttttattactgaaagaaatatgggcattttcattctttaaagaaataaagcacaagaattttatctcaa

SEQ ID NO: 18603 - protein, 273 aa, Homo sapiens
MPQLSQDNQECLQKHFSRPSIWTQFLPLFRAQRYNTDIHQITENEGDLRAVPDIKQMGSERMEMRKRQMPAAQDTPGAAPGQPGAGSRGSNACCFCWCCCCSCSCLTVRNQEDQRPTIASHELRADLPTWEESPAPTLEEVNAWAQSFDKLMVTPAGRNAFREFLRTEFSEENMLFWMACEELKKEANKNIIEEKARIIYEDYISILSPKEVSLDSRVREVINRNMVEPSQHIFDDAQLQIYTLMHRDSYPRFMNSAVYKDLLQSLSEKSIEA

SEQ ID NO: 18604 - DNA, 1434 bp, Homo sapiens
atgccccagctttcccaagataaccaagagtgcctccagaaacatttctccaggccgtctatatggacacagtttctgcccctgttcagggctcagagatataatacagacattcaccaaatcacagaaaatgaaggagacctcagggctgttcctgatatcaagccctgctcctactctggaagaagtcaacgcctgggctcagtcatttgacaaattaatggtcactccagcaggaaggaatgcattccgtgaattcctccgaacagaattcagtgaggaaaatatgctcttctggatggcctgtgaggaactgaaaaaggaagctaataaaaacattattgaagagaaagcaaggataatctatgaagactacatttctatactttctcctaaggaggtgagcttagactcccgggtgagagaagtgatcaacagaaacatggtggagccatcccaacacatattcgatgatgctcaacttcagatttacaccctgatgcacagagactcatatcctcgattcatgaactctgctgtctataaggacttgcttcagtccttatcggagaaatctattgaagcataggatttttcaaatatatttattattaataaaataataaaagaattcatgggctacaactagcacagggaatttagaggttgtagcatcttctgctggagtaatactcaggctattctaataacagatgattccttcaacagactgctatatattcaccatgtaaactgcagccacctttagtgatacttttgaaaaaaaaaaataaagggatatggctgttgtagaaagatagcgtatttgcatttacaataacagtagcatgttgtcagtggccaaggctacacagaaggctccctgctgcccggagcaggtacatccaccagagcaaagggaaccacttttattttgcatgagtttggtaactgattactctcccctcaaagaaaagacattcaggtgtttctcaacgacatcttctgtccagcaagctcggtttgaatacgtcacttaccagtgccattgcaggacccaaattcacagttcataaaagatgtgaccactacatgtaaaaatagcattctacttgatcttacagtatgtatgtatgtatgtatggagacatatgtgtgcgtgtggatgtctacatggttaatggaaagcactgtgctctgaagtggatcagtctcaagtgtctggtaacagcagcagtgcttagaaaattcttttgttgaaaagagttactgttattatcagaatttgccaacctaaagaatgaatttttaaattcataacttggtcatgttcacaacaaaactgtcaaataagcatatttccatttttattactgaaagaaatatgggcattttcattctttaaagaaataaagcacaagaattttatctcaa

SEQ ID NO: 18605 - protein, 152 aa, Homo sapiens
MKETSGLFLISSPAPTLEEVNAWAQSFDKLMVTPAGRNAFREFLRTEFSEENMLFWMACEELKKEANKNIIEEKARIIYEDYISILSPKEVSLDSRVREVINRNMVEPSQHIFDDAQLQIYTLMHRDSYPRFMNSAVYKDLLQSLSEKSIEA

SEQ ID NO: 18606 - DNA, 1518 bp, Homo sapiens
atgccccagctttcccaagataaccaagagtgcctccagaaacatttctccaggccgtctatatggacacagtttctgcccctgttcagggctcagagatataatacagacattcaccaaatcacagaaaatgaaggagacctcagggctgttcctgatatcaagtctcactgttagaaaccaggaagatcagaggcccacaatagcttcccacgaactcagagcagatcttccaacctgggaagaaagccctgctcctactctggaagaagtcaacgcctgggctcagtcatttgacaaattaatggtcactccagcaggaaggaatgcattccgtgaattcctccgaacagaattcagtgaggaaaatatgctcttctggatggcctgtgaggaactgaaaaaggaagctaataaaaacattattgaagagaaagcaaggataatctatgaagactacatttctatactttctcctaaggaggtgagcttagactcccgggtgagagaagtgatcaacagaaacatggtggagccatcccaacacatattcgatgatgctcaacttcagatttacaccctgatgcacagagactcatatcctcgattcatgaactctgctgtctataaggacttgcttcagtccttatcggagaaatctattgaagcataggatttttcaaatatatttattattaataaaataataaaagaattcatgggctacaactagcacagggaatttagaggttgtagcatcttctgctggagtaatactcaggctattctaataacagatgattccttcaacagactgctatatattcaccatgtaaactgcagccacctttagtgatacttttgaaaaaaaaaaataaagggatatggctgttgtagaaagatagcgtatttgcatttacaataacagtagcatgttgtcagtggccaaggctacacagaaggctccctgctgcccggagcaggtacatccaccagagcaaagggaaccacttttattttgcatgagtttggtaactgattactctcccctcaaagaaaagacattcaggtgtttctcaacgacatcttctgtccagcaagctcggtttgaatacgtcacttaccagtgccattgcaggacccaaattcacagttcataaaagatgtgaccactacatgtaaaaatagcattctacttgatcttacagtatgtatgtatgtatgtatggagacatatgtgtgcgtgtggatgtctacatggttaatggaaagcactgtgctctgaagtggatcagtctcaagtgtctggtaacagcagcagtgcttagaaaattcttttgttgaaaagagttactgttattatcagaatttgccaacctaaagaatgaatttttaaattcataacttggtcatgttcacaacaaaactgtcaaataagcatatttccatttttattactgaaagaaatatgggcattttcattctttaaagaaataaagcacaagaattttatctcaa

SEQ ID NO: 18607 - protein, 180 aa, Homo sapiens
MKETSGLFLISSLTVRNQEDQRPTIASHELRADLPTWEESPAPTLEEVNAWAQSFDKLMVTPAGRNAFREFLRTEFSEENMLFWMACEELKKEANKNIIEEKARIIYEDYISILSPKEVSLDSRVREVINRNMVEPSQHIFDDAQLQIYTLMHRDSYPRFMNSAVYKDLLQSLSEKSIEA

SEQ ID NO: 18608 - DNA, 1566 bp, Homo sapiens
agagcaaggggaggaagaggccgggagaagagggctagagcaaagaccgagagccggagaaaggcgaaaggcgcggtgagcaatcgccgacgtagagagggcagccctccgcgctgcaatattgagaaggcacccgcgggacgcatgcgcacggcggacggaggcgagccggccggggcttcctccccggccggcagggtggacggtgggctctctcactgttagaaaccaggaagatcagaggcccacaatagcttcccacgaactcagagcagatcttccaacctgggaagaaagccctgctcctactctggaagaagtcaacgcctgggctcagtcatttgacaaattaatggtcactccagcaggaaggaatgcattccgtgaattcctccgaacagaattcagtgaggaaaatatgctcttctggatggcctgtgaggaactgaaaaaggaagctaataaaaacattattgaagagaaagcaaggataatctatgaagactacatttctatactttctcctaaggaggtgagcttagactcccgggtgagagaagtgatcaacagaaacatggtggagccatcccaacacatattcgatgatgctcaacttcagatttacaccctgatgcacagagactcatatcctcgattcatgaactctgctgtctataaggacttgcttcagtccttatcggagaaatctattgaagcataggatttttcaaatatatttattattaataaaataataaaagaattcatgggctacaactagcacagggaatttagaggttgtagcatcttctgctggagtaatactcaggctattctaataacagatgattccttcaacagactgctatatattcaccatgtaaactgcagccacctttagtgatacttttgaaaaaaaaaaataaagggatatggctgttgtagaaagatagcgtatttgcatttacaataacagtagcatgttgtcagtggccaaggctacacagaaggctccctgctgcccggagcaggtacatccaccagagcaaagggaaccacttttattttgcatgagtttggtaactgattactctcccctcaaagaaaagacattcaggtgtttctcaacgacatcttctgtccagcaagctcggtttgaatacgtcacttaccagtgccattgcaggacccaaattcacagttcataaaagatgtgaccactacatgtaaaaatagcattctacttgatcttacagtatgtatgtatgtatgtatggagacatatgtgtgcgtgtggatgtctacatggttaatggaaagcactgtgctctgaagtggatcagtctcaagtgtctggtaacagcagcagtgcttagaaaattcttttgttgaaaagagttactgttattatcagaatttgccaacctaaagaatgaatttttaaattcataacttggtcatgttcacaacaaaactgtcaaataagcatatttccatttttattactgaaagaaatatgggcattttcattctttaaagaaataaagcacaagaattttatctcaa

SEQ ID NO: 18609 - protein, 122 aa, Homo sapiens
MVTPAGRNAFREFLRTEFSEENMLFWMACEELKKEANKNIIEEKARIIYEDYISILSPKEVSLDSRVREVINRNMVEPSQHIFDDAQLQIYTLMHRDSYPRFMNSAVYKDLLQSLSEKSIEA

SEQ ID NO: 18610 - DNA, 1705 bp, Homo sapiens
gaggaagaggccgggagaagagggctagagcaaagaccgagagccggagaaaggcgaaaggcgcggtgagcaatcgccgacgtagagagggcagccctccgcgctgcaatattgagaaggcacccgcgggacgcatgcgcacggcggacggaggcgagccggccggggcttcctccccggccggcagggtggacggtgggctccagatgggatcagagcggatggagatgcggaagcggcagatgcccgccgcccaggacacaccaggcgccgccccaggccagcccggagcggggagtcgcgggtccaacgcatgctgcttctgctggtgctgctgttgtagctgctcgtgtctcactgttagaaaccaggaagatcagaggcccacaatagcttcccacgaactcagagcagatcttccaacctgggaagaaagccctgctcctactctggaagaagtcaacgcctgggctcagtcatttgacaaattaatggtcactccagcaggaaggaatgcattccgtgaattcctccgaacagaattcagtgaggaaaatatgctcttctggatggcctgtgaggaactgaaaaaggaagctaataaaaacattattgaagagaaagcaaggataatctatgaagactacatttctatactttctcctaaggaggtgagcttagactcccgggtgagagaagtgatcaacagaaacatggtggagccatcccaacacatattcgatgatgctcaacttcagatttacaccctgatgcacagagactcatatcctcgattcatgaactctgctgtctataaggacttgcttcagtccttatcggagaaatctattgaagcataggatttttcaaatatatttattattaataaaataataaaagaattcatgggctacaactagcacagggaatttagaggttgtagcatcttctgctggagtaatactcaggctattctaataacagatgattccttcaacagactgctatatattcaccatgtaaactgcagccacctttagtgatacttttgaaaaaaaaaaataaagggatatggctgttgtagaaagatagcgtatttgcatttacaataacagtagcatgttgtcagtggccaaggctacacagaaggctccctgctgcccggagcaggtacatccaccagagcaaagggaaccacttttattttgcatgagtttggtaactgattactctcccctcaaagaaaagacattcaggtgtttctcaacgacatcttctgtccagcaagctcggtttgaatacgtcacttaccagtgccattgcaggacccaaattcacagttcataaaagatgtgaccactacatgtaaaaatagcattctacttgatcttacagtatgtatgtatgtatgtatggagacatatgtgtgcgtgtggatgtctacatggttaatggaaagcactgtgctctgaagtggatcagtctcaagtgtctggtaacagcagcagtgcttagaaaattcttttgttgaaaagagttactgttattatcagaatttgccaacctaaagaatgaatttttaaattcataacttggtcatgttcacaacaaaactgtcaaataagcatatttccatttttattactgaaagaaatatgggcattttcattctttaaagaaataaagcacaagaattttatctcaa

SEQ ID NO: 18611 - protein, 241 aa, Homo sapiens; identical to SEQ ID NO: 2268

SEQ ID NO: 18612 - DNA, 610 bp, Homo sapiens
gagggctagagcaaagaccgagagccggagaaaggcgaaaggcgcggtgagcaatcgccgacgtagagagggcagccctccgcgctgcaatattgagaaggcacccgcgggacgcatgcgcacggcggacggaggcgagccggccggggcttcctccccggccggcagggtggacggtgggctcggtctttgcatgcaccaccacatctggctaatcaagtgaagatgaggccaaactggatgaaggcgggcctgaaatccaacgactggtgaccttataaggagggagagcttcaaagacccaggcagtcatagagggaagaagggcaagtggcaaagaagacagagattgggtttctgttgccaccgaggctgccagaagaggcaaggaagaatcctcccctagagccttcagaggcagatgcctggccctgctgacggtttggttttgaacttttagcctccagaactgtgcaagaataaatttctgttgttttaagccatcgggtttgtggtaatttgttatggcagctctaggaaactaatccagatgttaaagtttattcttacatagaaattgaggtttctaataaaaggtgtgtggacgtgg

SEQ ID NO: 18613 - protein, 35 aa, Homo sapiens
MRTADGGEPAGASSPAGRVDGGLGLCMHHHIWLIK

SEQ ID NO: 18614 - DNA, 466 bp, Homo sapiens
gaaaggcgcggtgagcaatcgccgacgtagagagggcagccctccgcgctgcaatattgagaaggcacccgcgggacgcatgcgcacggcggacggaggcgagccggccggggcttcctccccggccggcagggtggacggtgggctcggtctttgcatgcaccaccacatctggctaatcaagtgaagatgaggccaaactggatgaaggcgggcctgaaatccaacgactggtgaccttataaggagggagagcttcaaagacccaggcagtcatagagggaagaagggcaagtggcaaagaagacagagattgggtttctgttgccaccgaggctgccagaagaggcaaggaagaatcctcccctagagccttcagaggcagatgcctggccctgctgacggtttggttttgaacttttagcctccagaactgtgcaagaataaatttctgttgttttaagcc

SEQ ID NO: 18615 - protein, 35 aa, Homo sapiens; identical to SEQ ID NO: 18613

SEQ ID NO: 18616 - DNA, 2240 bp, Homo sapiens
atattaaaatttctgctgttaggaactttatgttcccagctgtgatgtgttaacagcatttccttcagaagtcaggcagctggcccccacactaactacaatgctgtgcgatgctcctgtgtctgtcctcctggcaccacaatgcctgtgtgccatgtttgtcaccagcatgctacatgtgctatgtccactgccttttgtctctctattctctttattgggtattttttccttccttttctcaggtgtctcaggtttaagtcacagaatcatgactttatggaacagaaaggggaacgacttagccaacagcagcccagagcaggcagctgacttatgtcaggcgaacaagttagtgacagaacagaactcacaacctgcatttctgtactttttggtactcaatccactatgctgcctttaaggtaaattaaaataccagcatttaaaaactgttttatgacatccattcatagagatgtgtaaccatcactgcaattcattttagaatattttcatcactccaagaagagacccagcaccccttagccgtcaaccaccaagtcccttcctccagcagccccaggcagccactgagctactttctgtttccacagatttgcctgttccgaacattttatatagatgggttcatatgatacgtggccttttctagctggcttctctcactcagcatcctgtttgcacagttcagccatgtagtggtaggtaaccatggcatgtcagaaagagaagaaaaacttggtggtcattttgcctccagttcagaagacaaaaccaaggcctagggaggtggcttcaggctctagtcacaaagcccagcaggggaagagtgaggatccagctagacccctcaccactcaccgccctcagcagacctcctggtgcttccctgacctgcgtgcaaaggtgctctgcttggtgaactggcagatttacatgcctgccctctagtttttctgttctcagctttgcccagctatttttgtcaccgcttgcgtgtccttgaaggcattctgggttacttctagatttgtgaatggttgaggtgccagatgtctgagggtgggtaaatggggtccctgctatttcagtccctgctgaatatagacacaaaggtacaggaccaatttgtttacagtctttttttcccctaggttagaatgcagtggtgcaatcatagctcactgcagccttaaacccctgggctcaaacgatcctcccacctcagcctcctgaataggtggaactacaggtgtgtgccaccatgcctggctgatttttaaattttttttagagacggggtctcactatgttgcccaggctggtctcaaactcctggacttaagccatccacctgcctcagcctcccaaagtgctgagattacagttgtgagccactgtacccagccttgtttacaatcttaaaacacctataaggtctttctatattactcatcgtatttttacattaaatatcaatgtttatatagcaagaaatgtaaacaaaaaataaaatatcaataagtactaaatttaaagaaataaggcaccagagtagcacctagttttcagagacctttcacatacattctctcatttaatcctcttaacaaatctcaaggcagctaatgttatacacatgaggacgtggaggcttaggaaggtgaagtaatttggtccaggcctcacaagtggcaaaggtcaggatggcagggctcctctgactggacaccctatgctctcctcccgctattgcaccagactgctggacattcctggcccagttctctgttttaagcgagtgttctctagggaccagctgtgggccagaaggtcagcacagcactcagaggactcctccaagtaaacccaatattcccactcggccctctgaccccagtcacggcagggctgttcacgtcctgacctggctccatgggacactcctccacacccctcacagcatcccactgtactctctcgacctcggtctaccaacagcaacatgccctggccttcatacttgtctctttttttttttttttttttgagaccctgtctcaagataaataaataaataaacaaactatcatatcaacacagaaagttataaagcagcattcaaaatcatatatatactcttgtaatcatgtaaataatttttgtgaacaaagggaaggaaatgcaaaataaaatttaaaatattggcatgatgg

SEQ ID NO: 18617 - protein, 45 aa, Homo sapiens [sequence omitted]

SEQ ID NO: 18618 - DNA, 725 bp, Homo sapiens
taaaatatagtcatatggtagtagaagatcctaaactacgtagaaaaaatcgaaaaggtgttatgagatttgtccctaagaaaggcatcaggccctggccaggcacggtggctcattgcctgtaatcccagctccaaagtgctgggattacagacatgagccaccatgcccagcctaaaaataatattaataaattatcacactggttagtcaactcagctgtagattaaaatgtccagtcatctaatgcacttgacagttcgggacagaagcattaaagtggcttcacaggagatcctattcctcactccacgttggacattgttatgggttgaattgtgtccccccagaatatatgttgaagttctaaccatgatacctgtgaatatcaccttatttggaaacagggtctttgcatgcaccaccacatctggctaatcaagtgaagatgaggccaaactggatgaaggcgggcctgaaatccaacgactggtgaccttataaggagggagagcttcaaagacccaggcagtcatagagggaagaagggcaagtggcaaagaagacagagattgggtttctgttgccaccgaggctgccagaagaggcaaggaagaatcctcccctagagccttcagaggcagatgcctggccctgctgacggtttggttttgaacttttagcctccagaactgtgcaagaataaatttctgttgttttaagcc

SEQ ID NO: 18619 - protein, 68 aa, Homo sapiens
MSSHLMHLTVRDRSIKVASQEILFLTPRWTLLWVELCPPRIYVEVLTMIPVNITLFGNRVFACTTTSG

SEQ ID NO: 18620 - DNA, 2746 bp, Homo sapiens
agcaaaaccgggcgccttccacgaccctctagccggaagccacgcctgcccactagcccgacgcccgcctggcgggaacatgggctcgcccctcaccagcgatctgcagtcagttggtagcgcctgcacgtcgcgcgcggtgttcgattgtcgctgcctggggaggaggagccggagccgccgccgccgccgccgccgccgcgggcttcgttcgtaaggaagggggcctaggcccgggcctgcggtggtgggggttgctgcgcgccgggggtcgctcctgctgtgtcttccgctccagcttcgcccacttccccttgccagcggggtgggcgcggagaagacctgccggagccatggaggacgaagtggtccgctttgccaagaagatggacaagatggtgcagaagaagaacgcgtccacaagaatcggaatgtcagttaatgctattcgcaagcagagtacagatgaggaagttacatctttggcaaagtctctcatcaaatcctggaaaaaattattagatgggccatcaactgagaaagaccttgacgaaaagaagaaagaacctgcaattacatcgcagaacagccctgaggcaagagaagaaagtacttccagcggcaatgtaagcaacagaaaggatgagacaaatgctcgagatacttatgtttcatcctttcctcgggcaccaagcacttctgattctgtgcggttgaagtgtagggagatgcttgctgcagctcttcgaacaggggatgactacattgcaattggagctgatgaggaagaattaggatctcaaattgaagaagctatatatcaagaaataaggaatacagacatgaaatacaaaaatagagtacgaagtaggatatcaaatcttaaagatgcaaaaaatccaaatttaaggaaaaatgtcctctgtgggaatattcctcctgacttatttgctagaatgacagcagaggaaatggctagtgatgagctgaaagagatgcggaaaaacttgaccaaagaagccatcagagagcatcagatggccaagactggtgggacccagactgacttgttcacatgtggcaaatgtaaaaagaagaattgcacttacacacaggtacaaacccgtagtgctgatgaaccaatgacaacatttgttgtctgtaatgaatgtggaaatcgatggaagttctgttgagttggaagaattggcaaaatatctggaccattaagaaaacggattttgtaactagctttaaactaggccaagcaactagttttcctgcaaatcaaatttttaaagcaacttgggttagactttgtttttgacctaacatcccttccttaaatgccttctgtagtttcagatcagtagggagaccatataataattttatggtacctgtttcaaaacatattttttctgtttttataagtaagttgatattaattaaactcttggcaatatttcttctttcttaaaggaaaatataccttaactttttttcttttacactgtgaaacatacacagtagaaattctgttactctctgttattaatacataaatgaaaatacatttttttccatattggcatgtagctacaaatattaaaggaggagaaaaggtaatataattttaggtttaccaaatatggtgtgtattcaaataatacttgaccagcttatctaaaatgtacataattttgaggtagcttatgaatttgattttaattattatgttcacaagcttggaatattagatattattttgcatctgtaactaaccgtgatcatcatttcttgtaatttcttgtacatgtatattacttgttcttaatagatttttggaaacaagactttattgagatcagtttggttttcctgttaatttacctgtttgactttataatgtgttttagttttgcagaagaacactgttgtagtttagaaggcttttcataaatcccctcataggcaaagatgaaaacttcccactatttttttcccctcttaggaagacatactggaaagaaaatgtttagcatcttagtgtagtatagctattgtaaacagttcatgactagattttgattcggaaatctatactgaccaaggattaatcttaaggattgtataattcattaaagctgtggtctttccatgtggagactgatagaaaataattttgtcccaagtcttatttgctgactttttctgtcatgagtgagattgttgaacaaactgaatatatgggctatagcaagtagctttacagtacagatcttacaattaagttttgcttttgttaaagtgtgtaccattttttctgtttggagtaagacaaaaattgttttgacataggttccctagggtacacttgctctagcatactttaaaggccactgttgcaaagtctacattttatgctgaatctgcattctgtcaggcacccgtagaaagacctcagtacatgctttgcactctcctttgctccctttttccaatttcttattgcatatcattttgttgtaatacagaaagcagcatttttaaatgtccgtgttaagaattggcccactggtaccaactcacctctattttgtcagttcatagttgaagattttgttttatttcaaaaacaaagtacatttttgaaataatgtttcagaataaaataatctcacttttaagtgatccattttaaaatttgtaattcaataaagttttttttgttgttaaacatata

SEQ ID NO: 18621 - protein, 280 aa, Homo sapiens; identical to SEQ ID NO: 2274

SEQ ID NO: 18622 - DNA, 3185 bp, Homo sapiens
agcaaaaccgggcgccttccacgaccctctagccggaagccacgcctgcccactagcccgacgcccgcctggcgggaacatgggctcgcccctcaccagcgatctgcagtcagttggtagcgcctgcacgtcgcgcgcggtgttcgattgtcgctgcctggggaggaggagccggagccgccgccgccgccgccgccgccgcgggcttcgttcgtaaggaagggggcctaggcccgggcctgcggtggtgggggttgctgcgcgccgggggtcgctcctgctgtgtcttccgctccagcttcgcccacttccccttgccagcggggtgggcgcggagaagacctgccggagccatggaggacgaagtggtccgctttgccaagaagatggacaagatggtgcagaagaagaacgcggctggagcattggatttgctaaaggagcttaagaatattcctatgaccctggaattactgcagatttagtggctaccttgagatcatcttggcaaaaactcatgagtgatcacaaaggagacttttcttctggagcacaccaaatctgcttgtttcctgtgatgttaacagtgtctcttgatctcagtactcattcctttctgcttttccatcagtgtgcagctgacccctaaggctgcttaatgcactctccacctttccaagtccacaagaatcggaatgtcagttaatgctattcgcaagcagagtacagatgaggaagttacatctttggcaaagtctctcatcaaatcctggaaaaaattattagatgggccatcaactgagaaagaccttgacgaaaagaagaaagaacctgcaattacatcgcagaacagccctgaggcaagagaagaaagtacttccagcggcaatgtaagcaacagaaaggatgagacaaatgctcgagatacttatgtttcatcctttcctcgggcaccaagcacttctgattctgtgcggttgaagtgtagggagatgcttgctgcagctcttcgaacaggggatgactacattgcaattggagctgatgaggaagaattaggatctcaaattgaagaagctatatatcaagaaataaggaatacagacatgaaatacaaaaatagagtacgaagtaggatatcaaatcttaaagatgcaaaaaatccaaatttaaggaaaaatgtcctctgtgggaatattcctcctgacttatttgctagaatgacagcagaggaaatggctagtgatgagctgaaagagatgcggaaaaacttgaccaaagaagccatcagagagcatcagatggccaagactggtgggacccagactgacttgttcacatgtggcaaatgtaaaaagaagaattgcacttacacacagtgtcttgcactgtactcacccctgttcatttgatgagatgaggcgaagtgaatgatgtaggcattgtgactaagtgttaggctgctgttgaccttctgatgatccatcagaaggaggctcatctgcttcaggtggtcctgcctcatcgagccctgatgatgtggatgactaatgggtacaaacccgtagtgctgatgaaccaatgacaacatttgttgtctgtaatgaatgtggaaatcgatggaagttctgttgagttggaagaattggcaaaatatctggaccattaagaaaacggattttgtaactagctttaaactaggccaagcaactagttttcctgcaaatcaaatttttaaagcaacttgggttagactttgtttttgacctaacatcccttccttaaatgccttctgtagtttcagatcagtagggagaccatataataattttatggtacctgtttcaaaacatattttttctgtttttataagtaagttgatattaattaaactcttggcaatatttcttctttcttaaaggaaaatataccttaactttttttcttttacactgtgaaacatacacagtagaaattctgttactctctgttattaatacataaatgaaaatacatttttttccatattggcatgtagctacaaatattaaaggaggagaaaaggtaatataattttaggtttaccaaatatggtgtgtattcaaataatacttgaccagcttatctaaaatgtacataattttgaggtagcttatgaatttgattttaattattatgttcacaagcttggaatattagatattattttgcatctgtaactaaccgtgatcatcatttcttgtaatttcttgtacatgtatattacttgttcttaatagatttttggaaacaagactttattgagatcagtttggttttcctgttaatttacctgtttgactttataatgtgttttagttttgcagaagaacactgttgtagtttagaaggcttttcataaatcccctcataggcaaagatgaaaacttcccactatttttttcccctcttaggaagacatactggaaagaaaatgtttagcatcttagtgtagtatagctattgtaaacagttcatgactagattttgattcggaaatctatactgaccaaggattaatcttaaggattgtataattcattaaagctgtggtctttccatgtggagactgatagaaaataattttgtcccaagtcttatttgctgactttttctgtcatgagtgagattgttgaacaaactgaatatatgggctatagcaagtagctttacagtacagatcttacaattaagttttgcttttgttaaagtgtgtaccattttttctgtttggagtaagacaaaaattgttttgacataggttccctagggtacacttgctctagcatactttaaaggccactgttgcaaagtctacattttatgctgaatctgcattctgtcaggcacccgtagaaagacctcagtacatgctttgcactctcctttgctccctttttccaatttcttattgcatatcattttgttgtaatacagaaagcagcatttttaaatgtccgtgttaagaattggcccactggtaccaactcacctctattttgtcagttcatagttgaagattttgttttatttcaaaaacaaagtacatttttgaaataatgtttcagaataaaataatctcacttttaagtgatccattttaaaatttgtaattcaataaagttttttttgttgttaaacatata

SEQ ID NO: 18623 - protein, 238 aa, Homo sapiens
MSVNAIRKQSTDEEVTSLAKSLIKSWKKLLDGPSTEKDLDEKKKEPAITSQNSPEAREESTSSGNVSNRKDETNARDTYVSSFPRAPSTSDSVRLKCREMLAAALRTGDDYIAIGADEEELGSQIEEAIYQEIRNTDMKYKNRVRSRISNLKDAKNPNLRKNVLCGNIPPDLFARMTAEEMASDELKEMRKNLTKEAIREHQMAKTGGTQTDLFTCGKCKKKNCTYTQCLALYSPLFI

SEQ ID NO: 18624 - DNA, 2860 bp, Homo sapiens
agggggccgaaaacccgccccgtgagggggcgggaccggaggtgaacgcgcagcaaaaccgggcgccttccacgaccctctagccggaagccacgcctgcccactagcccgacgcccgcctggcgggaacatgggctcgcccctcaccagcgatctgcagtcagttggtagcgcctgcacgtcgcgcgcggtgttcgattgtcgctgcctggggaggaggagccggagccgccgccgccgccgccgccgccgcgggcttcgttcgtaaggaagggggcctaggcccgggcctgcggtggtgggggttgctgcgcgccgggggtcgctcctgctgtgtcttccgctccagcttcgcccacttccccttgccagcggggtgggcgcggagaagacctgccggagccatggaggacgaagtggtccgctttgccaagaagatggacaagatggtgcagaagaagaacgcggctggagcattggatttgctaaaggagcttaagaatattcctatgaccctggaattactgcagtccacaagaatcggaatgtcagttaatgctattcgcaagcagagtacagatgaggaagttacatctttggcaaagtctctcatcaaatcctggaaaaaattattagatgggccatcaactgagaaagaccttgacgaaaagaagaaagaacctgcaattacatcgcagaacagccctgaggcaagagaagaaagtacttccagcggcaatgtaagcaacagaaaggatgagacaaatgctcgagatacttatgtttcatcctttcctcgggcaccaagcacttctgattctgtgcggttgaagtgtagggagatgcttgctgcagctcttcgaacaggggatgactacattgcaattggagctgatgaggaagaattaggatctcaaattgaagaagctatatatcaagaaataaggaatacagacatgaaatacaaaaatagagtacgaagtaggatatcaaatcttaaagatgcaaaaaatccaaatttaaggaaaaatgtcctctgtgggaatattcctcctgacttatttgctagaatgacagcagaggaaatggctagtgatgagctgaaagagatgcggaaaaacttgaccaaagaagccatcagagagcatcagatggccaagactggtgggacccagactgacttgttcacatgtggcaaatgtaaaaagaagaattgcacttacacacaggtacaaacccgtagtgctgatgaaccaatgacaacatttgttgtctgtaatgaatgtggaaatcgatggaagttctgttgagttggaagaattggcaaaatatctggaccattaagaaaacggattttgtaactagctttaaactaggccaagcaactagttttcctgcaaatcaaatttttaaagcaacttgggttagactttgtttttgacctaacatcccttccttaaatgccttctgtagtttcagatcagtagggagaccatataataattttatggtacctgtttcaaaacatattttttctgtttttataagtaagttgatattaattaaactcttggcaatatttcttctttcttaaaggaaaatataccttaactttttttcttttacactgtgaaacatacacagtagaaattctgttactctctgttattaatacataaatgaaaatacatttttttccatattggcatgtagctacaaatattaaaggaggagaaaaggtaatataattttaggtttaccaaatatggtgtgtattcaaataatacttgaccagcttatctaaaatgtacataattttgaggtagcttatgaatttgattttaattattatgttcacaagcttggaatattagatattattttgcatctgtaactaaccgtgatcatcatttcttgtaatttcttgtacatgtatattacttgttcttaatagatttttggaaacaagactttattgagatcagtttggttttcctgttaatttacctgtttgactttataatgtgttttagttttgcagaagaacactgttgtagtttagaaggcttttcataaatcccctcataggcaaagatgaaaacttcccactatttttttcccctcttaggaagacatactggaaagaaaatgtttagcatcttagtgtagtatagctattgtaaacagttcatgactagattttgattcggaaatctatactgaccaaggattaatcttaaggattgtataattcattaaagctgtggtctttccatgtggagactgatagaaaataattttgtcccaagtcttatttgctgactttttctgtcatgagtgagattgttgaacaaactgaatatatgggctatagcaagtagctttacagtacagatcttacaattaagttttgcttttgttaaagtgtgtaccattttttctgtttggagtaagacaaaaattgttttgacataggttccctagggtacacttgctctagcatactttaaaggccactgttgcaaagtctacattttatgctgaatctgcattctgtcaggcacccgtagaaagacctcagtacatgctttgcactctcctttgctccctttttccaatttcttattgcatatcattttgttgtaatacagaaagcagcatttttaaatgtccgtgttaagaattggcccactggtaccaactcacctctattttgtcagttcatagttgaagattttgttttatttcaaaaacaaagtacatttttgaaataatgtttcagaataaaataatctcacttttaagtgatccattttaaaatttgtaattcaataaagttttttttgttgttaaacatata

SEQ ID NO: 18625 - protein, 301 aa, Homo sapiens; identical to SEQ ID NO: 2272

SEQ ID NO: 18626 - DNA, 395 bp, Homo sapiens
tttttttttttttttaagataaggtctcactccattgctcaggtgcatgagttatactactacaaaagttatactacttgactgcatgcgggtagggaggggggatagtgtgagcaccacaacccttgcattgttcaagagtcaactacactttaagaatgaatttaattctatttctcgataaagctgttattaaaaattgtatagtcattctaaattttgaattatgctaattaatctaactctgatatagatatcaaagttttgttgcagttgttattttaactgaggtacttggaaatgtaaatcaatatttcaggtatcccagctcctacgaaattctaacatctaatttcaatttctctccctgcaatttaattccactcaaccttgag

SEQ ID NO: 18627 - protein, 45 aa, Homo sapiens
MSYTTTKVILLDCMRVGRGDSVSTTTLALFKSQLHFKNEFNSISR

SEQ ID NO: 18628 - DNA, 364 bp, Homo sapiens
ggacacatggaaatgctgagtagaactatgatacaaatcagctcaccataaagtacaatctccagtggccagagagaactaaaaggaaactaaaaacccgcatgacacagttaactttggggcttaagatgagataaggagtgatggcgcttgccagtaatcccagctattccagaggtcgagctggaaggatcccttgagccgagtgcgaggctgcattgaactattaccacaccactgcactccagcctgggcaacagagtgagacctcatctctggacaagtgttatttgtgacagcacaatgtttgatacaacccaaatgttgaatgaaagtggaccagctaaataaaccatgaacattt

SEQ ID NO: 18629 - protein, 34 aa, Homo sapiens
SQLFQRSSWKDPLSRVRGCIELLPHHCTPAWATE

SEQ ID NO: 18630 - DNA, 2091 bp, Homo sapiens
ttgggctttcaccagattcacaggaggatgaatctgggattaaacaggcagcagaaaataggaggagctttatctttatatactgcccttaccacacagcagaaactggcaggtgtcactgcactcagttgctggcttccacttcgggcttcctttccacagggtcctatcggtggtgctaatagagatatttctattctccagtgccacggggattgtgaccctttggttcccctgatgtttggttctcttacggtggaaaaactaaaaacattggtgaatccagccaatgtgacctttaaaacctatgaaggtatgatgcacagttcgtgtcaacaggaaatgatggatgtcaagcaattcattgataaactcctacctccaattgattgacgtcactaagaggccttgtgtagaagtacaccagcatcattgtagtagagtgtaaaccttttcccatgcccagtcttcaaatttctaatgttttgcagtgttaaaatgttttgcaaatacatgccaataacacagatcaaataatatctcctcatgagaaatttatgatcttttaagtttctatacatgtattcttataagacgacccaggatctactatattagaatagatgaagcaggtagcttcttttttctcaaatgtaattcagcaaaataatacagtactgccaccagattttttattacatcatttgaaaattagcagtatgcttaatgaaaatttgttcaggtataaatgagcagttaagatataaacaatttatgcatgctgtgacttagtctatggatttattccaaaattgcttagtcaccatgcagtgtctgtatttttatatatgtgttcatatatacataatgattataatacataataagaatgaggtggtattacattattcctaataatagggataatgctgtttattgtcaagaaaaagtaaaatcgttctcttcaattaatggcccttttattttgggaccaggcttttattttccctgatattatttctatttaatactcttttctctcaagaaaaaaaaaaaagtttgttttttctttattgtccttcatagcaggccaagtattgcctctctgcaatagacagctactgtcaatacatgctgtaatttgacattctgggtcacagatataaggtatttaaaatctatttatgctttatagagaaaccagacattaaaacttcatgcactacttatttcgaattactgtaccttatccaaatttacacctagctattaggatcttcaacccaggtaacaggaataattctgtggtttcatttttctgtaaacaactgaaagaataattagatcatattctagtatgttctgaaatatctttaagactgatcttaaaaactaacttctaagatgatttcatcttctcatagtatagagtttactttgtacacgtttgaaaccaactactgtagaagatgaggaatctattgtaattttttgctttattttcatctgccagtggacttatttgaaattttcactttagtcaaattattttttgtattagtttttgatgcagacataaaaatagcaatcattttaaattgtcaaaatttccagattactggtaaaaattatttgaaaacaaacttatgggtaataaaggctagtcagaaccctataccataaagtgtagttaccatacagattaatatgtagcaaaaatgtatgcttgatatttctcaactgtgttaatttttctgctgtattccagctgaccaaaacaatattaagaatgcatctttataaatgggtgctaattgataatggaaataatttagtaatggactatacaggatgttaataatgaagccatatgtttatgtctggatttaaaaattttaaacaatcatttactatgtcatttttctttaccttgaagaacataaactgttatttcacttctacaaatcagcaagatattatttatggcaagaaatattccattgaaatattgtgctgtaacatgggaaagtgtaaatgtttttcatggtttctatcaatgtgaaataaaatttaattctgacttttctgtga

SEQ ID NO: 18631 - protein, 121 aa, Homo sapiens [sequence omitted]

SEQ ID NO: 18632 - DNA, 2181 bp, Homo sapiens
ggtgattttcctgcatggattgggagatactgggcacggatgggcagaagcctttgcaggcctgttaggcctgttacattaaatatgaacgtggctatgccttcatggtttgatattattgggctttcaccagattcacaggaggatgaatctgggattaaacaggcagcagaaaatataaaagctttgattgatcaagaagtgaagaatggcattccttctaacagaattattttgggagggttttctcagggtcctatcggtggtgctaatagagatatttctattctccagtgccacggggattgtgaccctttggttcccctgatgtttggttctcttacggtggaaaaactaaaaacattggtgaatccagccaatgtgacctttaaaacctatgaaggtatgatgcacagttcgtgtcaacaggaaatgatggatgtcaagcaattcattgataaactcctacctccaattgattgacgtcactaagaggccttgtgtagaagtacaccagcatcattgtagtagagtgtaaaccttttcccatgcccagtcttcaaatttctaatgttttgcagtgttaaaatgttttgcaaatacatgccaataacacagatcaaataatatctcctcatgagaaatttatgatcttttaagtttctatacatgtattcttataagacgacccaggatctactatattagaatagatgaagcaggtagcttcttttttctcaaatgtaattcagcaaaataatacagtactgccaccagattttttattacatcatttgaaaattagcagtatgcttaatgaaaatttgttcaggtataaatgagcagttaagatataaacaatttatgcatgctgtgacttagtctatggatttattccaaaattgcttagtcaccatgcagtgtctgtatttttatatatgtgttcatatatacataatgattataatacataataagaatgaggtggtattacattattcctaataatagggataatgctgtttattgtcaagaaaaagtaaaatcgttctcttcaattaatggcccttttattttgggaccaggcttttattttccctgatattatttctatttaatactcttttctctcaagaaaaaaaaaaaagtttgttttttctttattgtccttcatagcaggccaagtattgcctctctgcaatagacagctactgtcaatacatgctgtaatttgacattctgggtcacagatataaggtatttaaaatctatttatgctttatagagaaaccagacattaaaacttcatgcactacttatttcgaattactgtaccttatccaaatttacacctagctattaggatcttcaacccaggtaacaggaataattctgtggtttcatttttctgtaaacaactgaaagaataattagatcatattctagtatgttctgaaatatctttaagactgatcttaaaaactaacttctaagatgatttcatcttctcatagtatagagtttactttgtacacgtttgaaaccaactactgtagaagatgaggaatctattgtaattttttgctttattttcatctgccagtggacttatttgaaattttcactttagtcaaattattttttgtattagtttttgatgcagacataaaaatagcaatcattttaaattgtcaaaatttccagattactggtaaaaattatttgaaaacaaacttatgggtaataaaggctagtcagaaccctataccataaagtgtagttaccatacagattaatatgtagcaaaaatgtatgcttgatatttctcaactgtgttaatttttctgctgtattccagctgaccaaaacaatattaagaatgcatctttataaatgggtgctaattgataatggaaataatttagtaatggactatacaggatgttaataatgaagccatatgtttatgtctggatttaaaaattttaaacaatcatttactatgtcatttttctttaccttgaagaacataaactgttatttcacttctacaaatcagcaagatattatttatggcaagaaatattccattgaaatattgtgctgtaacatgggaaagtgtaaatgtttttcatggtttctatcaatgtgaaataaaatttaattctgacttttctgtga

SEQ ID NO: 18633 - protein, 147 aa, Homo sapiens
MGRSLCRPVRPVTLNMNVAMPSWFDIIGLSPDSQEDESGIKQAAENIKALIDQEVKNGIPSNRIILGGFSQGPIGGANRDISILQCHGDCDPLVPLMFGSLTVEKLKTLVNPANVTFKTYEGMMHSSCQQEMMDVKQFIDKLLPPID

SEQ ID NO: 18634 - DNA, 2411 bp, Homo sapiens
cgcacgcccttgggccgcggccgggcgcccgctcttccttccgcttgcgctgtgagctgaggcggtgtatgtgcggcaataacatgtcaaccccgctgcccgccatcgtgcccgccgcccggaaggccaccgctgcggtgattttcctgcatggattgggagatactgggcacggatgggcagaagcctttgcaggtatcagaagttcacatatcaaatatatctgcccgcatgcgtttgatattattgggctttcaccagattcacaggaggatgaatctgggattaaacaggcagcagaaaatataaaagctttgattgatcaagaagtgaagaatggcattccttctaacagaattattttgggagggttttctcagggaggagctttatctttatatactgcccttaccacacagcagaaactggcaggtgtcactgcactcagttgctggcttccacttcgggcttcctttccacagggtcctatcggtggtgctaatagagatatttctattctccagtgccacggggattgtgaccctttggttcccctgatgtttggttctcttacggtggaaaaactaaaaacattggtgaatccagccaatgtgacctttaaaacctatgaaggtatgatgcacagttcgtgtcaacaggaaatgatggatgtcaagcaattcattgataaactcctacctccaattgattgacgtcactaagaggccttgtgtagaagtacaccagcatcattgtagtagagtgtaaaccttttcccatgcccagtcttcaaatttctaatgttttgcagtgttaaaatgttttgcaaatacatgccaataacacagatcaaataatatctcctcatgagaaatttatgatcttttaagtttctatacatgtattcttataagacgacccaggatctactatattagaatagatgaagcaggtagcttcttttttctcaaatgtaattcagcaaaataatacagtactgccaccagattttttattacatcatttgaaaattagcagtatgcttaatgaaaatttgttcaggtataaatgagcagttaagatataaacaatttatgcatgctgtgacttagtctatggatttattccaaaattgcttagtcaccatgcagtgtctgtatttttatatatgtgttcatatatacataatgattataatacataataagaatgaggtggtattacattattcctaataatagggataatgctgtttattgtcaagaaaaagtaaaatcgttctcttcaattaatggcccttttattttgggaccaggcttttattttccctgatattatttctatttaatactcttttctctcaagaaaaaaaaaaaagtttgttttttctttattgtccttcatagcaggccaagtattgcctctctgcaatagacagctactgtcaatacatgctgtaatttgacattctgggtcacagatataaggtatttaaaatctatttatgctttatagagaaaccagacattaaaacttcatgcactacttatttcgaattactgtaccttatccaaatttacacctagctattaggatcttcaacccaggtaacaggaataattctgtggtttcatttttctgtaaacaactgaaagaataattagatcatattctagtatgttctgaaatatctttaagactgatcttaaaaactaacttctaagatgatttcatcttctcatagtatagagtttactttgtacacgtttgaaaccaactactgtagaagatgaggaatctattgtaattttttgctttattttcatctgccagtggacttatttgaaattttcactttagtcaaattattttttgtattagtttttgatgcagacataaaaatagcaatcattttaaattgtcaaaatttccagattactggtaaaaattatttgaaaacaaacttatgggtaataaaggctagtcagaaccctataccataaagtgtagttaccatacagattaatatgtagcaaaaatgtatgcttgatatttctcaactgtgttaatttttctgctgtattccagctgaccaaaacaatattaagaatgcatctttataaatgggtgctaattgataatggaaataatttagtaatggactatacaggatgttaataatgaagccatatgtttatgtctggatttaaaaattttaaacaatcatttactatgtcatttttctttaccttgaagaacataaactgttatttcacttctacaaatcagcaagatattatttatggcaagaaatattccattgaaatattgtgctgtaacatgggaaagtgtaaatgtttttcatggtttctatcaatgtgaaataaaatttaattctgacttttctgtga

SEQ ID NO: 18635 - protein, 214 aa, Homo sapiens
MCGNNMSTPLPAIVPAARKATAAVIFLHGLGDTGHGWAEAFAGIRSSHIKYICPHAFDIIGLSPDSQEDESGIKQAAENIKALIDQEVKNGIPSNRIILGGFSQGGALSLYTALTTQQKLAGVTALSCWLPLRASFPQGPIGGANRDISILQCHGDCDPLVPLMFGSLTVEKLKTLVNPANVTFKTYEGMMHSSCQQEMMDVKQFIDKLLPPID

SEQ ID NO: 18636 - DNA, 2838 bp, Homo sapiens
cgcgcctgagcgtgcgcccggtggggccggccgggactcgccgctcgcacgcccttgggccgcggccgggcgcccgctcttccttccgcttgcgctgtgagctgaggcggtgtatgtgcggcaataacatgtcaaccccgctgcccgccatcgtgcccgccgcccggaaggccaccgctgcggtgagtggcgtaggcgtgggctcggaggggtccactgggccggccaccggtggttgcccctcgcgcggggtgggcgttgcgggcgcgtggcggcctgcggacgaggacgctcctcccggcccgggtggggtgcgaatggtccgcgcggccgggtccgcggggggcgggggcagccggggggtcacagccggcgcgagggccagtccccagctcctccctgcattgcggaggaagtgtggccccgggacccccgcgggccggcctagggcacggcgtcagcctctgcagcgtgtttctgcctggtgtgtgggtgagggaaacctaagtccgccaggaaatcgccttattgtcacctcgcactcttatcctcaatgaaagaagtttgaagattgagtgtcctacaaggtgattttcctgcatggattgggagatactgggcacggatgggcagaagcctttgcaggtatcagaagttcacatatcaaatatatctgcccgcatgcgcctgttaggcctgttacattaaatatgaacgtggctatgccttcatgtaaaagctttgattgatcaagaagtgaagaatggcattccttctaacagaattattttgggagggttttctcagggaggagctttatctttatatactgcccttaccacacagcagaaactggcaggtgtcactgcactcagttgctggcttccacttcgggcttcctttccacagggtcctatcggtggtgctaatagagatatttctattctccagtgccacggggattgtgaccctttggttcccctgatgtttggttctcttacggtggaaaaactaaaaacattggtgaatccagccaatgtgacctttaaaacctatgaaggtatgatgcacagttcgtgtcaacaggaaatgatggatgtcaagcaattcattgataaactcctacctccaattgattgacgtcactaagaggccttgtgtagaagtacaccagcatcattgtagtagagtgtaaaccttttcccatgcccagtcttcaaatttctaatgttttgcagtgttaaaatgttttgcaaatacatgccaataacacagatcaaataatatctcctcatgagaaatttatgatcttttaagtttctatacatgtattcttataagacgacccaggatctactatattagaatagatgaagcaggtagcttcttttttctcaaatgtaattcagcaaaataatacagtactgccaccagattttttattacatcatttgaaaattagcagtatgcttaatgaaaatttgttcaggtataaatgagcagttaagatataaacaatttatgcatgctgtgacttagtctatggatttattccaaaattgcttagtcaccatgcagtgtctgtatttttatatatgtgttcatatatacataatgattataatacataataagaatgaggtggtattacattattcctaataatagggataatgctgtttattgtcaagaaaaagtaaaatcgttctcttcaattaatggcccttttattttgggaccaggcttttattttccctgatattatttctatttaatactcttttctctcaagaaaaaaaaaaaagtttgttttttctttattgtccttcatagcaggccaagtattgcctctctgcaatagacagctactgtcaatacatgctgtaatttgacattctgggtcacagatataaggtatttaaaatctatttatgctttatagagaaaccagacattaaaacttcatgcactacttatttcgaattactgtaccttatccaaatttacacctagctattaggatcttcaacccaggtaacaggaataattctgtggtttcatttttctgtaaacaactgaaagaataattagatcatattctagtatgttctgaaatatctttaagactgatcttaaaaactaacttctaagatgatttcatcttctcatagtatagagtttactttgtacacgtttgaaaccaactactgtagaagatgaggaatctattgtaattttttgctttattttcatctgccagtggacttatttgaaattttcactttagtcaaattattttttgtattagtttttgatgcagacataaaaatagcaatcattttaaattgtcaaaatttccagattactggtaaaaattatttgaaaacaaacttatgggtaataaaggctagtcagaaccctataccataaagtgtagttaccatacagattaatatgtagcaaaaatgtatgcttgatatttctcaactgtgttaatttttctgctgtattccagctgaccaaaacaatattaagaatgcatctttataaatgggtgctaattgataatggaaataatttagtaatggactatacaggatgttaataatgaagccatatgtttatgtctggatttaaaaattttaaacaatcatttactatgtcatttttctttaccttgaagaacataaactgttatttcacttctacaaatcagcaagatattatttatggcaagaaatattccattgaaatattgtgctgtaacatgggaaagtgtaaatgtttttcatggtttctatcaatgtgaaataaaatttaattctgacttttctgtga

SEQ ID NO: 18637 - protein, 73 aa, Homo sapiens
MAFLLTELFWEGFLREELYLYILPLPHSRNWQVSLHSVAGFHFGLPFHRVLSVVLIEIFLFSSATGIVTLWFP

SEQ ID NO: 18638 - DNA, 2682 bp, Homo sapiens
cgcgcctgagcgtgcgcccggtggggccggccgggactcgccgctcgcacgcccttgggccgcggccgggcgcccgctcttccttccgcttgcgctgtgagctgaggcggtgtatgtgcggcaataacatgtcaaccccgctgcccgccatcgtgcccgccgcccggaaggccaccgctgcggtgagtggcgtaggcgtgggctcggaggggtccactgggccggccaccggtggttgcccctcgcgcggggtgggcgttgcgggcgcgtggcggcctgcggacgaggacgctcctcccggcccgggtggggtgcgaatggtccgcgcggccgggtccgcggggggcgggggcagccggggggtcacagccggcgcgagggccagtccccagctcctccctgcattgcggaggaagtgtggccccgggacccccgcgggccggcctagggcacggcgtcagcctctgcagcgtgtttctgcctggtgtgtgggtgagggaaacctaagtccgccaggaaatcgccttattgtcacctcgcactcttatcctcaatgaaagaagtttgaagattgagtgtcctacaaggtgattttcctgcatggattgggagatactggtaaaagctttgattgatcaagaagtgaagaatggcattccttctaacagaattattttgggagggttttctcagggaggagctttatctttatatactgcccttaccacacagcagaaactggcaggtgtcactgcactcagttgctggcttccacttcgggcttcctttccacagtgccacggggattgtgaccctttggttcccctgatgtttggttctcttacggtggaaaaactaaaaacattggtgaatccagccaatgtgacctttaaaacctatgaaggtatgatgcacagttcgtgtcaacaggaaatgatggatgtcaagcaattcattgataaactcctacctccaattgattgacgtcactaagaggccttgtgtagaagtacaccagcatcattgtagtagagtgtaaaccttttcccatgcccagtcttcaaatttctaatgttttgcagtgttaaaatgttttgcaaatacatgccaataacacagatcaaataatatctcctcatgagaaatttatgatcttttaagtttctatacatgtattcttataagacgacccaggatctactatattagaatagatgaagcaggtagcttcttttttctcaaatgtaattcagcaaaataatacagtactgccaccagattttttattacatcatttgaaaattagcagtatgcttaatgaaaatttgttcaggtataaatgagcagttaagatataaacaatttatgcatgctgtgacttagtctatggatttattccaaaattgcttagtcaccatgcagtgtctgtatttttatatatgtgttcatatatacataatgattataatacataataagaatgaggtggtattacattattcctaataatagggataatgctgtttattgtcaagaaaaagtaaaatcgttctcttcaattaatggcccttttattttgggaccaggcttttattttccctgatattatttctatttaatactcttttctctcaagaaaaaaaaaaaagtttgttttttctttattgtccttcatagcaggccaagtattgcctctctgcaatagacagctactgtcaatacatgctgtaatttgacattctgggtcacagatataaggtatttaaaatctatttatgctttatagagaaaccagacattaaaacttcatgcactacttatttcgaattactgtaccttatccaaatttacacctagctattaggatcttcaacccaggtaacaggaataattctgtggtttcatttttctgtaaacaactgaaagaataattagatcatattctagtatgttctgaaatatctttaagactgatcttaaaaactaacttctaagatgatttcatcttctcatagtatagagtttactttgtacacgtttgaaaccaactactgtagaagatgaggaatctattgtaattttttgctttattttcatctgccagtggacttatttgaaattttcactttagtcaaattattttttgtattagtttttgatgcagacataaaaatagcaatcattttaaattgtcaaaatttccagattactggtaaaaattatttgaaaacaaacttatgggtaataaaggctagtcagaaccctataccataaagtgtagttaccatacagattaatatgtagcaaaaatgtatgcttgatatttctcaactgtgttaatttttctgctgtattccagctgaccaaaacaatattaagaatgcatctttataaatgggtgctaattgataatggaaataatttagtaatggactatacaggatgttaataatgaagccatatgtttatgtctggatttaaaaattttaaacaatcatttactatgtcatttttctttaccttgaagaacataaactgttatttcacttctacaaatcagcaagatattatttatggcaagaaatattccattgaaatattgtgctgtaacatgggaaagtgtaaatgtttttcatggtttctatcaatgtgaaataaaatttaattctgacttttctgtga

SEQ ID NO: 18639 - protein, 127 aa, Homo sapiens
MDWEILVKALIDQEVKNGIPSNRIILGGFSQGGALSLYTALTTQQKLAGVTALSCWLPLRASFPQCHGDCDPLVPLMFGSLTVEKLKTLVNPANVTFKTYEGMMHSSCQQEMMDVKQFIDKLLPPID

SEQ ID NO: 18640 - DNA, 2585 bp, Homo sapiens
cggcgggcgaggggcagggcagggcggaccctggacgcgcgggcgcgcgcggaaggtagcgcggggccgcgttggcgcgcacgcgcctgagcgtgcgcccggtggggccggccgggactcgccgctcgcacgcccttgggccgcggccgggcgcccgctcttccttccgcttgcgctgtgagctgaggcggtgtatgtgcggcaataacatgtcaaccccgctgcccgccatcgtgcccgccgcccggaaggccaccgctgcggtgattttcctgcatggattgggagatactgggcacggatgggcagaagcctttgcaggtatcagaagttcacatatcaaatatatctgcccgcatgcgcctgttaggcctgttacattaaatatgaacgtggctatgccttcatggtttgatattattgggctttcaccagattcacaggaggatgaatctgggattaaacaggcagcagaaaatataaaagctttgattgatcaagaagtgaagaatggcattccttctaacagaattattttgggagggttttctcagggaggagctttatctttatatactgcccttaccacacagcagaaactggcaggtgtcactgcactcagttgctggcttccacttcgggcttcctttccacagggtcctatcggtggtgctaatagagatatttctattctccagtgccacggggattgtgaccctttggttcccctgatgtttggttctcttacggtggaaaaactaaaaacattggtgaatccagccaatgtgacctttaaaacctatgaaggtatgatgcacagttcgtgtcaacaggaaatgatggatgtcaagcaattcattgataaactcctacctccaattgattgacgtcactaagaggccttgtgtagaagtacaccagcatcattgtagtagagtgtaaaccttttcccatgcccagtcttcaaatttctaatgttttgcagtgttaaaatgttttgcaaatacatgccaataacacagatcaaataatatctcctcatgagaaatttatgatcttttaagtttctatacatgtattcttataagacgacccaggatctactatattagaatagatgaagcaggtagcttcttttttctcaaatgtaattcagcaaaataatacagtactgccaccagattttttattacatcatttgaaaattagcagtatgcttaatgaaaatttgttcaggtataaatgagcagttaagatataaacaatttatgcatgctgtgacttagtctatggatttattccaaaattgcttagtcaccatgcagtgtctgtatttttatatatgtgttcatatatacataatgattataatacataataagaatgaggtggtattacattattcctaataatagggataatgctgtttattgtcaagaaaaagtaaaatcgttctcttcaattaatggcccttttattttgggaccaggcttttattttccctgatattatttctatttaatactcttttctctcaagaaaaaaaaaaaagtttgttttttctttattgtccttcatagcaggccaagtattgcctctctgcaatagacagctactgtcaatacatgctgtaatttgacattctgggtcacagatataaggtatttaaaatctatttatgctttatagagaaaccagacattaaaacttcatgcactacttatttcgaattactgtaccttatccaaatttacacctagctattaggatcttcaacccaggtaacaggaataattctgtggtttcatttttctgtaaacaactgaaagaataattagatcatattctagtatgttctgaaatatctttaagactgatcttaaaaactaacttctaagatgatttcatcttctcatagtatagagtttactttgtacacgtttgaaaccaactactgtagaagatgaggaatctattgtaattttttgctttattttcatctgccagtggacttatttgaaattttcactttagtcaaattattttttgtattagtttttgatgcagacataaaaatagcaatcattttaaattgtcaaaatttccagattactggtaaaaattatttgaaaacaaacttatgggtaataaaggctagtcagaaccctataccataaagtgtagttaccatacagattaatatgtagcaaaaatgtatgcttgatatttctcaactgtgttaatttttctgctgtattccagctgaccaaaacaatattaagaatgcatctttataaatgggtgctaattgataatggaaataatttagtaatggactatacaggatgttaataatgaagccatatgtttatgtctggatttaaaaattttaaacaatcatttactatgtcatttttctttaccttgaagaacataaactgttatttcacttctacaaatcagcaagatattatttatggcaagaaatattccattgaaatattgtgctgtaacatgggaaagtgtaaatgtttttcatggtttctatcaatgtgaaataaaatttaattctgacttttctgtga

SEQ ID NO: 18641 - protein, 230 aa, Homo sapiens; identical to SEQ ID NO: 2276

SEQ ID NO: 18642 - DNA, 1539 bp, Homo sapiens
cggcgggcgaggggcagggcagggcggaccctggacgcgcgggcgcgcgcggaaggtagcgcggggccgcgttggcgcgcacgcgcctgagcgtgcgcccggtggggccggccgggactcgccgctcgcacgcccttgggccgcggccgggcgcccgctcttccttccgcttgcgctgtgagctgaggcggtgtatgtgcggcaataacatgtcaaccccgctgcccgccatcgtgcccgccgcccggaaggccaccgctgcggtgattttcctgcatggattgggagatactgggcacggatgggcagaagcctttgcaggtatcagaagttcacatatcaaatatatctgcccgcatgcgcctgttaggcctgttacattaaatatgaacgtggctatgccttcatggtttgatattattgggctttcaccagattcacaggaggatgaatctgggattaaacaggcagcagaaaatataaaagctttgattgatcaagaagtgaagaatggcattccttctaacagaattattttgggagggttttctcagggaggagctttatctttatatactgcccttaccacacagcagaaactggcaggtgtcactgcactcagttgctggcttccacttcgggcttcctttccacagggtcctatcggtggtgctaatagagatatttctattctccagtgccacggggattgtgaccctttggttcccctgatgtttggttctcttacggtggaaaaactaaaaacattggtgaatccagccaatgtgacctttaaaacctatgaaggtatgatgcacagttcgtgtcaacaggaaatgatggatgtcaagcaattcattgataaactcctacctccaattgattgacgtcactaagaggccttgtgtagaagtacaccagcatcattgtagtagagtgtaaaccttttcccatgcccagtcttcaaatttctaatgttttgcagtgttaaaatgttttgcaaatacatgccaataacacagatcaaataatatctcctcatgagaaatttatgatcttttaagtttctatacatgtattcttataagacgacccaggatctactatattagaatagatgaagcaggtagcttcttttttctcaaatgtaattcagcaaaataatacagtactgccaccagattttttattacatcatttgaaaattagcagtatgcttaatgaaaatttgttcaggtataaatgagcagttaagatataaacaatttatgcatgctgtgacttagtctatggatttattccaaaattgcttagtcaccatgcagtgtctgtatttttatatatgtgttcatatatacataatgattataatacataataagaatgaggtggtattacattattcctaataatagggataatgctgtttattgtcaagaaaaagtaaaatcgttctcttcaattaatggcccttttattttgggaccaggcttttattttccctgatattatttctatttaatactcttttctctcaag

SEQ ID NO: 18643 - protein, 230 aa, Homo sapiens; identical to SEQ ID NO: 2276

SEQ ID NO: 18644 - DNA, 738 bp, Homo sapiens
ggggccggccgggactcgccgctcgcacgcccttgggccgcggccgggcgcccgctcttccttccgcttgcgctgtgagctgaggcggtgtatgtgcggcaataacatgtcaaccccgctgcccgccatcgtgcccgccgcccggaaggccaccgctgcggtgattttcctgcatggattgggagatactgggtaggtaccattattattaatagtaacagtaatgaaactgggtcatgcaacttttgtttacgcgttcaaaggtttaatgtttaagggcgctaaaatggtattttaagattgccagttaatgtatcttacagtgcggtgattttatgttttgaaaaccctcagaattttccccttatcatcgtgagtttattgattttttaactctggtttctggaacatattaaaatttcaaattcctcattagttgctttgggtattggataccagagatccgtggaatgttagtagggacggtgtgcaattgagagctttccagagcagttaaaatttcagagcagattgaagagaagaactagttgattttgataagagaactagtggcaacataaggcatgcagcattctgaatagagggattagatgttcactctaatgagttgaaaggcaggggaggcaactcaaagatttatttggaggcttatcaaacaatttgttgtactaactacttatttttattttattttttgtttgtttgcttttttctttt

SEQ ID NO: 18645 - protein, 34 aa, Homo sapiens
MCGNNMSTPLPAIVPAARKATAAVIFLHGLGDTG

SEQ ID NO: 18646 - DNA, 1139 bp, Homo sapiens
cccgagaccacgtggcctccgagcagctcagggcgcccttgaaagttcttggatctgcgggttatggccggtcccttgcagggcggtggggcccgggccctggacctactccggggcctgccgcgtgtgagcctggccaacttaaagccgaatcccggctccaagaaaccggagagaagaccaagaggtcggagaagaggtagaaaatgtggcagaggccataaaggagaaaggcaaagaggaacccggccccgcttgggctttgagggaggccagactccattttacatccgaatcccaaaatacgggtttaacgaaggacatagtttcagacgccagtataagcctttgagtctcaatagactgcagtatcttattgatttgggtcgtgttgatcctagtcaacctattgacttaacccagcttgtcaatgggagaggtgtgaccatccagccacttaaaagggattatggtgtccagctggttgaggagggtgctgacacctttacggcaaaagttaatattgaagtacagttggcttcagaactagctattgctgccattgaaaaaaatggtggtgttgttactacagccttctatgatccaagaagtctggacattgtatgcaaacctgttccattctttcttcgtggacaacccattccaaaaagaatgcttccaccagaagaactggtaccatattacactgatgcaaagaaccgtgggtacctggcggatcctgccaaatttcctgaagcacgacttgaactcgccaggaagtatggttatatcttacctgatatcactaaagatgaactcttcaaaatgctctgtactaggaaggatccaaggcagattttctttggtcttgctccaggatgggtggtgaatatggccgataagaaaatcctaaaacctacagatgaaaatctccttaagtattatacctcatgaattcccgtccaaggaagcagagttgttaaagagtactggaataggggctgaaggatctatattcccttattgcattttccttatgtataattttccagatggtgatgttacttttcagtgtactcatatgtctcattttcatctaaaattaaatggcaggaaacaaggactgcatagagaaactg

SEQ ID NO: 18647 - protein, 296 aa, Homo sapiens [sequence omitted]

SEQ ID NO: 18648 - DNA, 501 bp, Homo sapiens; identical to SEQ ID NO: 2279

SEQ ID NO: 18649 - protein, 166 aa, Homo sapiens; identical to SEQ ID NO: 2280

SEQ ID NO: 18650 - DNA, 406 bp, Homo sapiens
gcctatctgtttgcaagtctgcactgtttgagaacctcttgaaagccccacagagcttgttggtgtcaccctggttctgggcacactccaaaaactgtttgatctcatggaaacaaggctgctgctgctgtgctggccaggttccctgatgctgctgatggagtctcactttgtcaccaagctggagtgtggtggcatgatcttggctcactgcaacctcccaggttcaagctattctcctgcctcagcctcccgagtagctgggactacaggcgcacgccaccacacccagctaatttttgtatttttagtagagacagggtttcaccatgttcgccagggtggtctctatttcttgacctcgtgatttgcccaccttggccttccaaagtgctgggattacagg

SEQ ID NO: 18651 - protein, 86 aa, Homo sapiens
METRLLLLCWPGSLMLLMESHFVTKLECGGMILAHCNLPGSSYSPASASRVAGTTGARHHTQLIFVFLVETGFHHVRQGGLYFLTS

SEQ ID NO: 18652 - DNA, 1956 bp, Homo sapiens
ggttgcttcggaggaatccgccgtgcaaatctgtccgcccccttggccactgatcccccgaagagcttctgtcgccgctctaggaatagagacattgaagtttgggacaagatatttatctaacttctggttatgaagttcatggaatggaaaaaataccagaagatggaccagcacttataattttttatcatggagctattcctatagatttttactatttcatggctaaaatatttatacacaaaggcagaacttgccgagtagtagctgatcactttgtctttaaaattccagggtttagtttattactggatgtgttttgtgctctacatggaccaagagaaaaatgtgttgaaattctgaggagtggccacttgttagctatctcaccaggtggagttcgagaagccctaattagtgatgaaacttataacatcgtatggggtcatcgcagaggctttgctcaggttgcaattgatgcaaaagtgacgaagaatgctgttcaagctttgattgataagcaccaaagaataccaggaaacattatgagtgctttgttagaacgttttcattgataacaaagggtcaactagaagatgatttagtacatttatattaaatgtttgtatctaaggtactgtcttctgaattttgtaggtcctataattagtattttttaaaaaaatcatgttaataagcatctttcacagaattcgtttctttaaaatagtcaattttgtttttgcaattgtgtcaaatactaacaaattacacacctagtaattcagaaaaagatgtcttatttgtaaattcctaacaatttatgctaaacatatagattcttaagtttattaataacagcagtttaggttaaacaaacattcctggataatgcgttaaatttctgtatctgtcgccctgagctgattttgaaagatggtataagctaggggttagtatagttgtttaagttagaaaaaacatgctgttgtctgcccctcattcccttcatgaccttgggcaagtcacgtaatgtttttgtgcctcaacaattcactttttaaaaacatgatcgtatgatgaatgatattattttgttatttatatttactgtgattgataactgttgaaccaaaataataaaataattaatttaaacaatgtcaaaatcctttagcagttatgtatatattttctccattgtgtgtttaaattatgtcatgtccagttgccaagcacaatgaaaaagatgtattattttttaaattgaataaaaaattaggaaaaataaaatttctaattattatttttagtatgatatttttaacaagagtctataggcaaacaatatagggtgtgctgtgcattgtcagccctatactgtggtcttaataatgccagcttaaaaatcactgttgtgctctgcatttcgtgtgttagaagctgattctaggctgaggaaagcaagagttctctacttttgctcaatattgaggcttacccagtttgactctacagccagtgaagtggtttattgcttcaataaaaatatacttgaatgatgaatttatttatgttttgttttgtttttatttagagatggggttttgccatgttggccaggctggtcttgaactcctgacctcaggtgatccacctgcctcagcctcccaacttgctgggattacaggtgtgagccaccatgcccagcctgaatgatgaatttatgtgaacacaaagccctctgaaaaattaatgattttcaatttgttgtcttcttgaaaactgaatttaagtattatttaaacagaaaagtgtcagaaatcaaatgcagtatctccctctcccttttttaaatgttgaattagtagggtttttgtatagctttttgtattgtgtgtatttatgatatgtgaaatgtacataaaattaaacaatgtgaaaataaacctg

SEQ ID NO: 18653 - protein, 143 aa, Homo sapiens
MEKIPEDGPALIIFYHGAIPIDFYYFMAKIFIHKGRTCRVVADHFVFKIPGFSLLLDVFCALHGPREKCVEILRSGHLLAISPGGVREALISDETYNIVWGHRRGFAQVAIDAKVTKNAVQALIDKHQRIPGNIMSALLERFH

SEQ ID NO: 18654 - DNA, 2378 bp, Homo sapiens
gcagccgccgcttggcttctttcacacgggttgcttcggaggaatccgccgtgcaaatctgtccgcccccttggccactgatcccccgaagagcttctgtcgccgctctaggaatagagacattgaagtttgggacaagatatttatctaacttctgtgtcaaaattagcgacctgctatggcaatgaagaaagaaactgaatttgtcattttcacctgaagaaaaatgatagacaaaaatcaaacctgtggtgtaggacaggattctgtgccctatatgatttgtctgattcacatactcgaagaatggtttggtgtggagcagttggaggactatttgaattttgcaaactatctcttgtgggtttttacaccactaatacttttaatacttccttactttactatctttcttctctaccttactattattttcttacacatttataagagaaagaatgtattgaaagaagcctactctcataatttatgggatggtgcaaggaaaacagtggcaactctgtgggatggacatgcagccgtttggcatggttatgaagttcatggaatggaaaaaataccagaagatggaccagcacttataattttttatcatggagctattcctatagatttttactatttcatggctaaaatatttatacacaaaggcagaacttgccgagtagtagctgatcactttgtctttaaaattccagggtttagtttattactggatgtgttttgtgctctacatggaccaagagaaaaatgtgttgaaattctgaggagtggccacttgttagctatctcaccaggtggagttcgagaagccctaattagtgatgaaacttataacatcgtatggggtcatcgcagaggctttgctcaggttgcaattgatgcaaaagtgacgaagaatgctgttcaagctttgattgataagcaccaaagaataccaggaaacattatgagtgctttgttagaacgttttcattgataacaaagggtcaactagaagatgatttagtacatttatattaaatgtttgtatctaaggtactgtcttctgaattttgtaggtcctataattagtattttttaaaaaaatcatgttaataagcatctttcacagaattcgtttctttaaaatagtcaattttgtttttgcaattgtgtcaaatactaacaaattacacacctagtaattcagaaaaagatgtcttatttgtaaattcctaacaatttatgctaaacatatagattcttaagtttattaataacagcagtttaggttaaacaaacattcctggataatgcgttaaatttctgtatctgtcgccctgagctgattttgaaagatggtataagctaggggttagtatagttgtttaagttagaaaaaacatgctgttgtctgcccctcattcccttcatgaccttgggcaagtcacgtaatgtttttgtgcctcaacaattcactttttaaaaacatgatcgtatgatgaatgatattattttgttatttatatttactgtgattgataactgttgaaccaaaataataaaataattaatttaaacaatgtcaaaatcctttagcagttatgtatatattttctccattgtgtgtttaaattatgtcatgtccagttgccaagcacaatgaaaaagatgtattattttttaaattgaataaaaaattaggaaaaataaaatttctaattattatttttagtatgatatttttaacaagagtctataggcaaacaatatagggtgtgctgtgcattgtcagccctatactgtggtcttaataatgccagcttaaaaatcactgttgtgctctgcatttcgtgtgttagaagctgattctaggctgaggaaagcaagagttctctacttttgctcaatattgaggcttacccagtttgactctacagccagtgaagtggtttattgcttcaataaaaatatacttgaatgatgaatttatttatgttttgttttgtttttatttagagatggggttttgccatgttggccaggctggtcttgaactcctgacctcaggtgatccacctgcctcagcctcccaacttgctgggattacaggtgtgagccaccatgcccagcctgaatgatgaatttatgtgaacacaaagccctctgaaaaattaatgattttcaatttgttgtcttcttgaaaactgaatttaagtattatttaaacagaaaagtgtcagaaatcaaatgcagtatctccctctcccttttttaaatgttgaattagtagggtttttgtatagctttttgtattgtgtgtatttatgatatgtgaaatgtacataaaattaaacaatgtgaaaataaacctg

SEQ ID NO: 18655 - protein, 257 aa, Homo sapiens; identical to SEQ ID NO: 2282

SEQ ID NO: 18656 - DNA, 1322 bp, Homo sapiens
tggcttctttcacacgggttgcttcggaggaatccgccgtgcaaatctgtccgcccccttggccactgatcccccgaagagcttctgtcgccgctctaggaatagagacattgaagtttgggacaagatatttatctaacttctgtgtcaaaattagcgacctgctatggcaatgaagaaagaaactgaatttgtcattttcacctgaagaaaaatgatagacaaaaatcaaacctgtggtgtaggacaggattctgtgccctatatgatttgtctgattcacatactcgaagaatggtttggtgtggagcagttggaggactatttgaattttgcaaactatctcttgtgggtttttacaccactaatacttttaatacttccttactttactatctttcttctctaccttactattattttcttacacatttataagagaaagaatgtattgaaagaagcctactctcataatttatgggatggtgcaaggaaaacagtggcaactctgtgggatggacatgcagccgtttggcatggtaagcaaggatactttcacctttgtgttgccattcatgtgtgctgcattggaactgtgttaccattccattttattgattgagaagatactgaaaaatataatagaagtgatatttactattccctgttacctgtttgcatgcattgtgcatatgtatgtgtctttcttaaaatgagttttcccatagacgttggtttccattaaacaaagaaccacgcagcactgtagactataagttgaaataagaaaatttatatttaaaacatctaaaagagtaagagactaaataaagctgtagaaaactgctttaaaaatgcttcaattatttagcatttacttctgttcaaaataagtttgactctaccagtgtggatttaaaaaaatgaaatattaaataatattacattaaatataatttgcataccaaaatttatgcattttctgttgattcattcctgaggttggtgtgtctttctgaataaataagatagcaatagatttctctccaggatagtcattcttttctttattactcgagaaattttgatgttgtatacttaatgattggtggttcttctttgtttggccatcatgaaaattgccttctggtggcctatttttaagtggttagtgtttcactctaccaacttttacttcattattccaacaatatctagtttgttggtctcttttgtttttagactacacaaaaatactgaagattcaataggcaggtaacaaacattggctttctgtattatgttgttgagcatcacagtgg

SEQ ID NO: 18657 - protein, 135 aa, Homo sapiens
MIDKNQTCGVGQDSVPYMICLIHILEEWFGVEQLEDYLNFANYLLWVFTPLILLILPYFTIFLLYLTIIFLHIYKRKNVLKEAYSHNLWDGARKTVATLWDGHAAVWHGKQGYFHLCVAIHVCCIGTVLPFHFID

SEQ ID NO: 18658 - DNA, 1374 bp, Homo sapiens
agccgccgcttggcttctttcacacgggttgcttcggaggaatccgccgtgcaaatctgtccgcccccttggccactgatcccccgaagagcttctgtcgccgctctagggtaaaggagagctgcccctgcccctgcccccgcctatccgagaatagagacattgaagtttgggacaagatatttatctaacttctgtgtcaaaattagcgacctgctatggcaatgaagaaagaaactgaatttgtcattttcacctgaagaaaaatgatagacaaaaatcaaacctgtggtgtaggacaggattctgtgccctatatgatttgtctgattcacatactcgaagaatggtttggtgtggagcagttggaggactatttgaattttgcaaactatctcttgtgggtttttacaccactaatacttttaatacttccttactttactatctttcttctctaccttactattattttcttacacatttataagagaaagaatgtattgaaagaagcctactctcataatttatgggatggtgcaaggaaaacagtggcaactctgtgggatggacatgcagccgtttggcatggtaagcaaggatactttcacctttgtgttgccattcatgtgtgctgcattggaactgtgttaccattccattttattgattgagaagatactgaaaaatataatagaagtgatatttactattccctgttacctgtttgcatgcattgtgcatatgtatgtgtctttcttaaaatgagttttcccatagacgttggtttccattaaacaaagaaccacgcagcactgtagactataagttgaaataagaaaatttatatttaaaacatctaaaagagtaagagactaaataaagctgtagaaaactgctttaaaaatgcttcaattatttagcatttacttctgttcaaaataagtttgactctaccagtgtggatttaaaaaaatgaaatattaaataatattacattaaatataatttgcataccaaaatttatgcattttctgttgattcattcctgaggttggtgtgtctttctgaataaataagatagcaatagatttctctccaggatagtcattcttttctttattactcgagaaattttgatgttgtatacttaatgattggtggttcttctttgtttggccatcatgaaaattgccttctggtggcctatttttaagtggttagtgtttcactctaccaacttttacttcattattccaacaatatctagtttgttggtctcttttgtttttagactacacaaaaatactgaagattcaataggcaggtaacaaacattggctttctgtattatgttgttgagcatcacagtgg

SEQ ID NO: 18659 - protein, 135 aa, Homo sapiens; identical to SEQ ID NO: 18657

SEQ ID NO: 18660 - DNA, 973 bp, Homo sapiens
tggcttctttcacacgggttgcttcggaggaatccgccgtgcaaatctgtccgcccccttggccactgatcccccgaagagcttctgtcgccgctctaggaatagagacattgaagtttgggacaagatatttatctaacttctgtgtcaaaattagcgacctgctatggcaatgaagaaagaaactgaatttgtcattttcacctgaagaaaaatgatagacaaaaatcaaacctgtggtgtaggacaggattctgtgccctatatgatttgtctgattcacatactcgaagaatggtttggtgtggagcagttggaggactatttgaattttgcaaactatctcttgtgggtttttacaccactaatacttttaatacttccttactttactatctttcttctctaccttactattattttcttacacatttataagagaaagaatgtattgaaagaagcctactctcataatttatgggatggtgcaaggaaaacagtggcaactctgtgggatggacatgcagccgtttggcatggtaagcaaggatactttcacctttgtgttgccattcatgtgtgctgcattggaactgtgttaccattccattttattgattgagaagatactgaaaaatataatagaagtgatatttactattccctgttacctgtttgcatgcattgtgcatatgtatgtgtctttcttaaaatgagttttcccatagacgttggtttccattaaacaaagaaccacgcagcactgtagactataagttgaaataagaaaatttatatttaaaacatctaaaagagtaagagactaaataaagctgtagaaaactgctttaaaaatgcttcaattatttagcatttacttctgttcaaaataagtttgactctaccagtgtggatttaaaaaaatgaaatattaaataatattacattaaatataatttgcataccaaaattt

SEQ ID NO: 18661 - protein, 135 aa, Homo sapiens; identical to SEQ ID NO: 18657

SEQ ID NO: 18662 - DNA, 1025 bp, Homo sapiens
agccgccgcttggcttctttcacacgggttgcttcggaggaatccgccgtgcaaatctgtccgcccccttggccactgatcccccgaagagcttctgtcgccgctctagggtaaaggagagctgcccctgcccctgcccccgcctatccgagaatagagacattgaagtttgggacaagatatttatctaacttctgtgtcaaaattagcgacctgctatggcaatgaagaaagaaactgaatttgtcattttcacctgaagaaaaatgatagacaaaaatcaaacctgtggtgtaggacaggattctgtgccctatatgatttgtctgattcacatactcgaagaatggtttggtgtggagcagttggaggactatttgaattttgcaaactatctcttgtgggtttttacaccactaatacttttaatacttccttactttactatctttcttctctaccttactattattttcttacacatttataagagaaagaatgtattgaaagaagcctactctcataatttatgggatggtgcaaggaaaacagtggcaactctgtgggatggacatgcagccgtttggcatggtaagcaaggatactttcacctttgtgttgccattcatgtgtgctgcattggaactgtgttaccattccattttattgattgagaagatactgaaaaatataatagaagtgatatttactattccctgttacctgtttgcatgcattgtgcatatgtatgtgtctttcttaaaatgagttttcccatagacgttggtttccattaaacaaagaaccacgcagcactgtagactataagttgaaataagaaaatttatatttaaaacatctaaaagagtaagagactaaataaagctgtagaaaactgctttaaaaatgcttcaattatttagcatttacttctgttcaaaataagtttgactctaccagtgtggatttaaaaaaatgaaatattaaataatattacattaaatataatttgcataccaaaattt

SEQ ID NO: 18663 - protein, 135 aa, Homo sapiens; identical to SEQ ID NO: 18657

SEQ ID NO: 18664 - DNA, 3819 bp, Homo sapiens
tgcccgcgaagagactggggattccgaggcggctcctgggagaccggacgcgcgcggcctccgccgctcccagtcccgccagacccgatgccgggctggagaagcgcgggggccgacgcacctcggataggcgggggcaggggcaggggcagctctcctttaccctagagcggcgacagaagctcttcgggggatcagtggccaagggggcggacagatttgcacggcggattcctccgaagcaacccgtgtgaaagaagccaagcggcggctgcagcccgggccgcgatgggggtgacaccgcccgtggtcccgccccttcccgtggcccctcggagccacttccggcggcagcgtccgggctagttcccggcgcgagcggccgcgggccagtttctatctcctcatccagggcttgcgggcgaggcctgttttaagtctccagtaaccgagcggaggcccggcaggcgcgacccgggctgcgtacgtcagagctgcctccgaagtggtaaaatgtgctgcgagaagtggagccgcgtggcggaaatgtttctcttcattgaggagcgggaggattgtaagatactgtgcctttgctccagggcatttgtggaggatcgaaaattgtacaatttgggattaaaaggctattacatcagagacagtggcaacaattcaggagaccaggcgacagaagaagaggaaggtggttattcctgtggtactgcagaatcacatgacagcaaaggcataggcctggatgaaagtgaacttgattctgaggctgaactcatgagaagtatgggattgccacttcaatttggtaggataactgcacataaggattttgaggtatctatgaatactagaaataaagttaaaataaaaaagaaaaaacatcaaaagaaatacttagatgaaattgtgcaagaatcttggagaaaagaatatgaagaagacgacattttggcttcagatgatccatcttcaattgaacagtatgagaacaccagaacatatgaacttcaaagcaaaaaagatactgagacagaaaatcctccagttgaaaacacattatctccaaagctagaaattacagagaaatgggaaaagtattggaatgaatatggaggaggactattgtggcaaagttggcaagaaaaacatccgggtcaagcactatcttctgaaccttggaactttcctgatacaaaggaagaatgggagcaacattatagtcaactttattggtattatttggaacaatttcagtattgggaagctcagggttggacttttgatgcctcgcaaagctgtgatacagatacttacacatctaaaacagaagctgatgacaagaacgatgaaaaatgcatgaaagttgacttagtatcttttccatcttcacctattatggttgataatgatagctctggtacaagtgataaggatcatagtgaaatacttgatggaattagtaacataaaactgaattcagaggaagtaacacagagccaattagattcctgtacaagtcatgatggtcatcaacagctaagtgaagttagtagcaaaagagagtgccctgcttccggccaaagtgaaccacgtaatggaggaaccaatgaggaaagcaactcatcggggaatacaaacacagacccaccagctgaggattcacagaagtcttcaggagcaaacacaagcaaagacagaccacatgccagtggtactgatggagatgaaagtgaggaagacccacctgagcataagccaagcaaactgaagaggagccatgaactggacattgatgaaaacccagcttcagactttgatgacagtggttcccttctaggattcaagtatggctcaggacaaaaatatggtggaatcccaaatttcagtcatcggcaggtcaggtatttagagaagaatgtgaagcttaagtctaagtacctagacatgcgcagacaaataaagatgaaaaacaaacacatcttctttaccaaagagtcagaaaaaccatttttcaagaaaagcaaaattctgagtaaggtagaaaaattcctcacatgggttaataaaccaatggatgaagaagcatcacaggaatcatcttctcatgacaatgtgcacgacgcttccacaagtagtgattcagaggaacaagacatgtctgttaaaaaaggtgatgacctactggagactaataatccagaacctgaaaagtgtcagagcgtatcttcagctggtgaacttgaaacagaaaactatgaaagagacagcttgctagcaactgttccagatgagcaggattgtgttactcaagaagtgccagactcccgccaggcagaaactgaagctgaagtgaaaaagaagaagaacaagaagaagaacaaaaaggtgaatggtctgcctcctgaaatagctgctgttcctgagctggcaaaatactgggcccagaggtacaggctcttctcccgttttgatgatgggattaagttggacagagagggctggttttcagttacacccgagaagattgctgaacacattgctggccgtgttagtcagtccttcaagtgtgacgttgtagtagacgcattctgtggagttggaggaaataccattcagtttgccttaacaggaatgagagtgattgccattgatatcgatcctgttaagattgcccttgctcgcaataatgcagaagtttatgggatagcagataagatagagttcatctgtggagatttcttgctgctggcttcttttttaaaggctgatgttgtgttcctcagcccaccttggggagggccagactatgccactgcagagacctttgacattagaacaatgatgtctcctgatggctttgaaattttcagactttctaagaagatcactaataatattgtttattttcttccaagaaatgctgatattgaccaggtggcatccttagctgggcctggagggcaagtggaaatagaacagaacttccttaacaacaaattgaagacaatcactgcatattttggtgacctaattcgaagaccagcctctgaaacctaactatgcagcagtgcgaggacaaaagatcatggagtggtcaaaatattcagatgagacatttggcatgtcttcctttattcactgatattttctacccatggtcttatatcaccgtatgaaatggaaacttacaggacttaaatatcagtgaaatattttgagatctttgaataattcctttagaggaattatacaaaattaatatatatgagtcctttgtaatttatttttttttgagacaggatctcacttttaccgcccaggctggagtgcagtgccatgatcacagctcactgcaggttcagccttctgagttcaagcaatccttctgtctcagtctcctcagtagctggggctttaggtgggcactgccacaccgtactaatttttgtattttttgtagagacgaggtcccaccatgttgcccaggctggtgtcaaactcctgggctcagtcagtccccccatctcaccctccccaagtgctggaattacaggcgtgagctactgtgcccagccttacggacatccttttgaattatctttttcactcatagaatatgaatacatttatttagactttttctagaactttcctgttttcatgtctttgcttcatctggaattggcttaacacccttttataaagtttgtgtttgtaaaatttccattgtgacatcaatacgcaatatattttgtaatataggagtttctatttttttattaaaatggcaatgaaagcaag

SEQ ID NO: 18665 - protein, 853 aa, Homo sapiens
MCCEKWSRVAEMFLFIEEREDCKILCLCSRAFVEDRKLYNLGLKGYYIRDSGNNSGDQATEEEEGGYSCGTAESHDSKGIGLDESELDSEAELMRSMGLPLQFGRITAHKDFEVSMNTRNKVKIKKKKHQKKYLDEIVQESWRKEYEEDDILASDDPSSIEQYENTRTYELQSKKDTETENPPVENTLSPKLEITEKWEKYWNEYGGGLLWQSWQEKHPGQALSSEPWNFPDTKEEWEQHYSQLYWYYLEQFQYWEAQGWTFDASQSCDTDTYTSKTEADDKNDEKCMKVDLVSFPSSPIMVDNDSSGTSDKDHSEILDGISNIKLNSEEVTQSQLDSCTSHDGHQQLSEVSSKRECPASGQSEPRNGGTNEESNSSGNTNTDPPAEDSQKSSGANTSKDRPHASGTDGDESEEDPPEHKPSKLKRSHELDIDENPASDFDDSGSLLGFKYGSGQKYGGIPNFSHRQVRYLEKNVKLKSKYLDMRRQIKMKNKHIFFTKESEKPFFKKSKILSKVEKFLTWVNKPMDEEASQESSSHDNVHDASTSSDSEEQDMSVKKGDDLLETNNPEPEKCQSVSSAGELETENYERDSLLATVPDEQDCVTQEVPDSRQAETEAEVKKKKNKKKNKKVNGLPPEIAAVPELAKYWAQRYRLFSRFDDGIKLDREGWFSVTPEKIAEHIAGRVSQSFKCDVVVDAFCGVGGNTIQFALTGMRVIAIDIDPVKIALARNNAEVYGIADKIEFICGDFLLLASFLKADVVFLSPPWGGPDYATAETFDIRTMMSPDGFEIFRLSKKITNNIVYFLPRNADIDQVASLAGPGGQVEIEQNFLNNKLKTITAYFGDLIRRPASET

SEQ ID NO: 18666 - DNA, 3881 bp, Homo sapiens
tgcccgcgaagagactggggattccgaggcggctcctgggagaccggacgcgcgcggcctccgccgctcccagtcccgccagacccgatgccgggctggagaagcgcgggggccgacgcacctcggataggcgggggcaggggcaggggcagctctcctttaccctagagcggcgacagaagctcttcgggggatcagtggccaagggggcggacagatttgcacggcggattcctccgaagcaacccgtgtgaaagaagccaagcggcggctgcagcccgggccgcgatgggggtgacaccgcccgtggtcccgccccttcccgtggcccctcggagccacttccggcggcagcgtccgggctagttcccggcgcgagcggccgcgggccagtttctatctcctcatccagggcttgcgggcgaggcctgttttaagtctccagtaaccgagcggaggcccggcaggcgcgacccgggctgcgtacgtcagagctgcctccgaagtggtaaaatgtgctgcgagaagtggagccgcgtggcggaaatgtttctcttcattgaggagcgggaggattgtaagatactgtgcctttgctccagggcatttgtggaggatcgaaaattgtacaatttgggattaaaaggctattacatcagagacagtggcaacaattcaggagaccaggcgacagaagaagaggaaggtggttattcctgtggtactgcagaatcacatgacagcaaaggcataggcctggatgaaagtgaacttgattctgaggctgaactcatgagaagtatgggattgccacttcaatttggtaggataactgcacataaggattttgaggtatctatgaatactagaaataaagttaaaataaaaaagaaaaaacatcaaaagaaatacttagatgaaattgtgcaagaatcttggagaaaagaatatgaagaagacgacattttggcttcagatgatccatcttcaattgaacagtatgagaacaccagaacatatgaacttcaaagcaaaaaagatactgagacagaaaatcctccagttgaaaacacattatctccaaagctagaaattacagagaaatgggaaaagtattggaatgaatatggaggaggactattgtggcaaagttggcaagaaaaacatccgggtcaagcactatcttctgaaccttggaactttcctgatacaaaggaagaatgggagcaacattatagtcaactttattggtattatttggaacaatttcagtattgggaagctcagggttggacttttgatgcctcgcaaagctgtgatacagatacttacacatctaaaacagaagctgatgacaagaacgatgaaaaatgcatgaaagttgacttagtatcttttccatcttcacctattatggttgataatgatagctctggtacaagtgataaggatcatagtgaaatacttgatggaattagtaacataaaactgaattcagaggaagtaacacagagccaattagattcctgtacaagtcatgatggtcatcaacagctaagtgaagttagtagcaaaagagagtgccctgcttccggccaaagtgaaccacgtaatggaggaaccaatgaggaaagcaactcatcggggaatacaaacacagacccaccagctgaggattcacagaagtcttcaggagcaaacacaagcaaagacagaccacatgccagtggtactgatggagatgaaagtgaggaagacccacctgagcataagccaagcaaactgaagaggagccatgaactggacattgatgaaaacccagcttcagactttgatgacagtggttcccttctaggattcaagtatggctcaggacaaaaatatggtggaatcccaaatttcagtcatcggcaggtcaggtatttagagaagaatgtgaagcttaagtctaagtacctagacatgcgcagacaaataaagatgaaaaacaaacacatcttctttaccaaagagtcagaaaaaccatttttcaagaaaagcaaaattctgagtaaggtagaaaaattcctcacatgggttaataaaccaatggatgaagaagcatcacaggaatcatcttctcatgacaatgtgcacgacgcttccacaagtagtgattcagaggaacaagacatgtctgttaaaaaaggtgatgacctactggagactaataatccagaacctgaaaagtgtcagagcgtatcttcagctggtgaacttgaaacagaaaactatgaaagagacagcttgctagcaactgttccagatgagcaggattgtgttactcaagaagtgccagactcccgccaggcagaaactgaagctgaagtgaaaaagaagaagaacaagaagaagaacaaaaaggtgaatggtctgcctcctgaaatagctgctgttcctgagctggcaaaatactgggcccagaggtacaggctcttctcccgttttgatgatgggattaagttggacagagagggctggttttcagttacacccgagaagattgctgaacacattgctggccgtgttagtcagtccttcaagtgtgacgttgtagtagacgcattctgtggagttggaggaaataccattcagtttgccttaacaggaatgagagtgattgccattgatatcgatcctgttaagattgcccttgctcgcaataatgcagaagtttatgggatagcagataagatagagttcatctgtggagatttcttgctgctggcttcttttttaaaggctgatgttgtgttcctcagcccaccttggggagggccagactatgccactgcagagacctttgacattagaacaatgatgtctcctgatggctttgaaattttcagactttctaagaagatcactaataatattgtttattttcttccaagaaatgctgatattgaccaggtggcatccttagctgggcctggagggcaagtggaaatagaacagaacttccttaacaacaaattgaagacaatcactgcatattttggtgacctaattcgaagaccagcctctgaaacctaactatgcagcagtgcgaggacaaaagatcatggagtggtcaaaatattcagatgagacatttggcatgtcttcctttattcactgatattttctacccatggtcttatatcaccgtatgaaatggaaacttacaggacttaaatatcagtgaaatattttgagatctttgaataattcctttagaggaattatacaaaattaatatatatgagtcctttgtaatttatttttttttgagacaggatctcacttttaccgcccaggctggagtgcagtgccatgatcacagctcactgcaggttcagccttctgagttcaagcaatccttctgtctcagtctcctcagtagctggggctttaggtgggcactgccacaccgtactaatttttgtattttttgtagagacgaggtcccaccatgttgcccaggctggtgtcaaactcctgggctcagtcagtccccccatctcaccctccccaagtgctggaattacaggcgtgagctactgtgcccagccttacggacatccttttgaattatctttttcactcatagaatatgaatacatttatttagactttttctagaactttcctgttttcatgtctttgcttcatctggaattggcttaacacccttttataaagtttgtgtttgtaaaatttccattgtgacatcaatacgcaatatattttgtaatataggagtttctatttttttattaaaatggcaatgaaagcaagagggatatgtgttgcttaattattcatctaaaaagtttgttcagtcatttttacaagtaggc

SEQ ID NO: 18667 - protein, 853 aa, Homo sapiens; identical to SEQ ID NO: 18665

SEQ ID NO: 18668 - DNA, 3486 bp, Homo sapiens
tgggagaccggacgcgcgcggcctccgccgctcccagtcccgccagacccgatgccgggctggagaagcgcgggggccgacgcacctcggataggcgggggcaggggcaggggcagctctcctttaccctagagcggcgacagaagctcttcgggggatcagtggccaagggggcggacagatttgcacggcggattcctccgaagcaacccgtgtgaaagaagccaagcggcggctgcagcccgggccgcgatgggggtgacaccgcccgtggtcccgccccttcccgtggcccctcggagccacttccggcggcagcgtccgggctagttcccggcgcgagcggccgcgggccagtttctatctcctcatccagggcttgcgggcgaggcctgttttaagtctccagtaaccgagcggaggcccggcaggcgcgacccgggctgcgtacgtcagagctgcctccgaagtggtaaaatgtgctgcgagaagtggagccgcgtggcggaaatgtttctcttcattgaggagcgggaggattgtaagatactgtgcctttgctccagggcatttgtggagagaccaggcgacagaagaagaggaaggtggttattcctgtggtactgcagaatcacatgacagcaaaggcataggcctggatgaaagtgaacttgattctgaggctgaactcatgagaagtatgggattgccacttcaatttggtaggataactgcacataaggattttgaggtatctatgaatactagaaataaagttaaaataaaaaagaaaaaacatcaaaagaaatacttagatgaaattgtgcaagaatcttggagaaaagaatatgaagaagacgacattttggcttcagatgatccatcttcaattgaacagtatgagaacaccagaacatatgaacttcaaagcaaaaaagatactgagacagaaaatcctccagttgaaaacacattatctccaaagctagaaattacagagaaatgggaaaagtattggaatgaatatggaggaggactattgtggcaaagttggcaagaaaaacatccgggtcaagcactatcttctgaaccttggaactttcctgatacaaaggaagaatgggagcaacattatagtcaactttattggtattatttggaacaatttcagtattgggaagctcagggttggacttttgatgcctcgcaaagctgtgatacagatacttacacatctaaaacagaagctgatgacaagaacgatgaaaaatgcatgaaagttgacttagtatcttttccatcttcacctattatggttgataatgatagctctggtacaagtgataaggatcatagtgaaatacttgatggaattagtaacataaaactgaattcagaggaagtaacacagagccaattagattcctgtacaagtcatgatggtcatcaacagctaagtgaagttagtagcaaaagagagtgccctgcttccggccaaagtgaaccacgtaatggaggaaccaatgaggaaagcaactcatcggggaatacaaacacagacccaccagctgaggattcacagaagtcttcaggagcaaacacaagcaaagacagaccacatgccagtggtactgatggagatgaaagtgaggaagacccacctgagcataagccaagcaaactgaagaggagccatgaactggacattgatgaaaacccagcttcagactttgatgacagtggttcccttctaggattcaagtatggctcaggacaaaaatatggtggaatcccaaatttcagtcatcggcaggtcaggtatttagagaagaatgtgaagcttaagtctaagtacctagacatgcgcagacaaataaagatgaaaaacaaacacatcttctttaccaaagagtcagaaaaaccatttttcaagaaaagcaaaattctgagtaaggtagaaaaattcctcacatgggttaataaaccaatggatgaagaagcatcacaggaatcatcttctcatgacaatgtgcacgacgcttccacaagtagtgattcagaggaacaagacatgtctgttaaaaaaggtgatgacctactggagactaataatccagaacctgaaaagtgtcagagcgtatcttcagctggtgaacttgaaacagaaaactatgaaagagacagcttgctagcaactgttccagatgagcaggattgtgttactcaagaagtgccagactcccgccaggcagaaactgaagctgaagtgaaaaagaagaagaacaagaagaagaacaaaaaggtgaatggtctgcctcctgaaatagctgctgttcctgagctggcaaaatactgggcccagaggtacaggctcttctcccgttttgatgatgggattaagttggacagagagggctggttttcagttacacccgagaagattgctgaacacattgctggccgtgttagtcagtccttcaagtgtgacgttgtagtagacgcattctgtggagttggaggaaataccattcagtttgccttaacaggaatgagagactttctaagaagatcactaataatattgtttattttcttccaagaaatgctgatattgaccaggtggcatccttagctgggcctggagggcaagtggaaatagaacagaacttccttaacaacaaattgaagacaatcactgcatattttggtgacctaattcgaagaccagcctctgaaacctaactatgcagcagtgcgaggacaaaagatcatggagtggtcaaaatattcagatgagacatttggcatgtcttcctttattcactgatattttctacccatggtcttatatcaccgtatgaaatggaaacttacaggacttaaatatcagtgaaatattttgagatctttgaataattcctttagaggaattatacaaaattaatatatatgagtcctttgtaatttatttttttttgagacaggatctcacttttaccgcccaggctggagtgcagtgccatgatcacagctcactgcaggttcagccttctgagttcaagcaatccttctgtctcagtctcctcagtagctggggctttaggtgggcactgccacaccgtactaatttttgtattttttgtagagacgaggtcccaccatgttgcccaggctggtgtcaaactcctgggctcagtcagtccccccatctcaccctccccaagtgctggaattacaggcgtgagctactgtgcccagccttacggacatccttttgaattatctttttcactcatagaatatgaatacatttatttagactttttctagaactttcctgttttcatgtctttgcttcatctggaattggcttaacacccttttataaagtttgtgtttgtaaaatttccattgtgacatcaatacgcaatatattttgtaatataggagtttctatttttttattaaaatggcaatgaaagcaag

SEQ ID NO: 18669 - protein, 646 aa, Homo sapiens
MRSMGLPLQFGRITAHKDFEVSMNTRNKVKIKKKKHQKKYLDEIVQESWRKEYEEDDILASDDPSSIEQYENTRTYELQSKKDTETENPPVENTLSPKLEITEKWEKYWNEYGGGLLWQSWQEKHPGQALSSEPWNFPDTKEEWEQHYSQLYWYYLEQFQYWEAQGWTFDASQSCDTDTYTSKTEADDKNDEKCMKVDLVSFPSSPIMVDNDSSGTSDKDHSEILDGISNIKLNSEEVTQSQLDSCTSHDGHQQLSEVSSKRECPASGQSEPRNGGTNEESNSSGNTNTDPPAEDSQKSSGANTSKDRPHASGTDGDESEEDPPEHKPSKLKRSHELDIDENPASDFDDSGSLLGFKYGSGQKYGGIPNFSHRQVRYLEKNVKLKSKYLDMRRQIKMKNKHIFFTKESEKPFFKKSKILSKVEKFLTWVNKPMDEEASQESSSHDNVHDASTSSDSEEQDMSVKKGDDLLETNNPEPEKCQSVSSAGELETENYERDSLLATVPDEQDCVTQEVPDSRQAETEAEVKKKKNKKKNKKVNGLPPEIAAVPELAKYWAQRYRLFSRFDDGIKLDREGWFSVTPEKIAEHIAGRVSQSFKCDVVVDAFCGVGGNTIQFALTGMRDFLRRSLIILFIFFQEMLILTRWHP

SEQ ID NO: 18670 - DNA, 3488 bp, Homo sapiens
aaggaacttactttgtaatgattattaagaactcagcgagaccccgagcatcacctcggcatatcgcatcctttctctagagaacccctaatgttggaagggatcagagcgcacctcctccgctcctgggagcacccccttcctaataataccttggggatgggtcggaaggaaaggaaaggagacgcgagaggtgtagtcgatgtgcctgcgaagcccaggctcctctggagatccttccgtccgtccctacaggagaaggctggcccgggctgctccactccccggagctgcagactgagtcgccaggtttctgtgccttcaaagccctgcgcgacggccacaccaaacacccaaaccttgggcagggaccaaacggtcacttccccgccctccgggctcaatatgcaaatccgagcaccaggaagtagctgggacctctcggccgagcccagagacagccagttcctctcccgccgcgccgggccgcgctgccgctcgctccccggccgtggcgcctccgggccagacgcgctgcagcctccagcccgcggcaagcggggcggccgcgccacccccggccccgcgccagcagcccctcgccgcgcgtccagcgttcccggccagcagcctccccatacgcaggtcctgctgggccgccccgtcgcgccccccactctgaactcaagtcaccgtggagctccgccgccccgaaactttcaccgcgagcgggaaatatgggatgtataaaatcaaaagggaaagacagcttgagtgacgatggagtagatttgaagactcaaccagttccagaatctcagcttttacctggacagaggtttcaaactaaagatccagaggaacaaggagacattgtggtagccttgtacccctatgatggcatccacccggacgacttgtctttcaagaaaggagagaagatgaaagtcctggaggagcatggagaatggtggaaagcaaagtcccttttaacaaaaaaagaaggcttcatccccagcaactatgtggccaaactcaacaccttagaaacagaagagtggtttttcaaggatataaccaggaaggacgcagaaaggcagcttttggcaccaggaaatagcgctggagctttccttattagagaaagtgaaacattaaaaggaagcttctctctgtctgtcagagactttgaccctgtgcatggtgatgttattaagcactacaaaattagaagtctggataatgggggctattacatctctccacgaatcacttttccctgtatcagcgacatgattaaacattaccaaaagcaggcagatggcttgtgcagaagattggagaaggcttgtattagtcccaagccacagaagccatgggataaagatgcctgggagatcccccgggagtccatcaagttggtgaaaaggcttggcgctgggcagtttggggaagtctggatgggttactataacaacagtaccaaggtggctgtgaaaaccctgaagccaggaactatgtctgtgcaagccttcctggaagaagccaacctcatgaagaccctgcagcatgacaagctcgtgaggctctacgctgtggtcaccagggaggagcccatttacatcatcaccgagtacatggccaagggcagtttgctggatttcctgaagagcgatgaaggtggcaaagtgctgcttccaaagctcattgacttttctgctcagattgcagagggaatggcatacatcgagcggaagaactacattcaccgggacctgcgagcagctaatgttctggtctccgagtcactcatgtgcaaaattgcagattttggccttgctagagtaattgaagataatgagtacacagcaagggaaggtgctaagttccctattaagtggacggctccagaagcaatcaactttggatgtttcactattaagtctgatgtgtggtcctttggaatcctcctatacgaaattgtcacctatgggaaaattccctacccagggagaactaatgccgacgtgatgaccgccctgtcccagggctacaggatgccccgtgtggagaactgcccagatgagctctatgacattatgaaaatgtgctggaaagaaaaggcagaagagagaccaacgtttgactacttacagagcgtcctggatgatttctacacagccacggaagggcaataccagcagcagccttagagcacagggagacccgtccatttggcaggggtggctgcctcatttagagaggaaaagtaaccatcactggttgcacttatgatttcatgtgcggggatcatctgccgtgcctggatcctgaaatagaggctaaattactcaggaagaacaccctctaaatgggaaagtattctgtactcttagatggattctccactcagttgcaacttggacttgtcctcagcagctggtaatcttgctctgcttgacaacatctgagtgcagccgtttgagaagaaaacatctattctctccaaaaatgcacccaactagctctatgtttacaaatggacataggactcaaagtttcagagaccattgcaatgaatccccaataattgcagaactaaactcatttataaagctaaaataaccggatatatacatagcatgacatttctttgtgctttggcttacttgtttaaaaaaaaaaaaaaactaatccaacctgttagattttgcaggtgaagtcagcagcttaaaaatgtctttcccagatttcaatgatttttttccccctacctcccaaaatctgagactgttaaaacatttttcttctatgaacactgctcagacctgctagacatgccataggagtggcgtgcacatctctctctcttccagcaggaggagcccgtgagcacgcacagctgccctgtctgctcacccgaaggcaccgggctcacctggacctcccaggaaagggagaagagcctcagaaactgctctgtgtttagaaggaatatttttaagagtccagctttttcatttccacaatttcctatatccagatttgttttgacaatgtagtttggaagaactaagattctaatctctgaagaaccttatagggccttctaaaacataagagtttcctttgttgcttcaaatatttgaacattatgttaaagatcaagtattaattttagttgtactctagaaagctaaagtgccacattcggggctatttttatgattcagcaatcttttctaaattgtgtagcatgtgtatgagactatttatacccaaggatatgaaggaacataagtgactacaaggctctaataagccacggtggcaggaggttcaagcggttctgttcactaaatttttctcctgtaagctttgaatggaaacttctgtatcacatgatgtgtttcacttatgctgttgtgtatatacctaatatttctatttttgattttattttaatacacctcgtccaataacatctc

SEQ ID NO: 18671 - protein, 491 aa, Homo sapiens
MGCIKSKGKDSLSDDGVDLKTQPVPESQLLPGQRFQTKDPEEQGDIVVALYPYDGIHPDDLSFKKGEKMKVLEEHGEWWKAKSLLTKKEGFIPSNYVAKLNTLETEEWFFKDITRKDAERQLLAPGNSAGAFLIRESETLKGSFSLSVRDFDPVHGDVIKHYKIRSLDNGGYYISPRITFPCISDMIKHYQKQADGLCRRLEKACISPKPQKPWDKDAWEIPRESIKLVKRLGAGQFGEVWMGYYNNSTKVAVKTLKPGTMSVQAFLEEANLMKTLQHDKLVRLYAVVTREEPIYIITEYMAKGSLLDFLKSDEGGKVLLPKLIDFSAQIAEGMAYIERKNYIHRDLRAANVLVSESLMCKIADFGLARVIEDNEYTAREGAKFPIKWTAPEAINFGCFTIKSDVWSFGILLYEIVTYGKIPYPGRTNADVMTALSQGYRMPRVENCPDELYDIMKMCWKEKAEERPTFDYLQSVLDDFYTATEGQYQQQP

SEQ ID NO: 18672 - DNA, 3551 bp, Homo sapiens
aaggaacttactttgtaatgattattaagaactcagcgagaccccgagcatcacctcggcatatcgcatcctttctctagagaacccctaatgttggaagggatcagagcgcacctcctccgctcctgggagcacccccttcctaataataccttggggatgggtcggaaggaaaggaaaggagacgcgagaggtgtagtcgatgtgcctgcgaagcccaggctcctctggagatccttccgtccgtccctacaggagaaggctggcccgggctgctccactccccggagctgcagactgagtcgccaggtttctgtgccttcaaagccctgcgcgacggccacaccaaacacccaaaccttgggcagggaccaaacggtcacttccccgccctccgggctcaatatgcaaatccgagcaccaggaagtagctgggacctctcggccgagcccagagacagccagttcctctcccgccgcgccgggccgcgctgccgctcgctccccggccgtggcgcctccgggccagacgcgctgcagcctccagcccgcggcaagcggggcggccgcgccacccccggccccgcgccagcagcccctcgccgcgcgtccagcgttcccggccagcagcctccccatacgcaggtcctgctgggccgccccgtcgcgccccccactctgaactcaagtcaccgtggagctccgccgccccgaaactttcaccgcgagcgggaaatatgggatgtataaaatcaaaagggaaagacagcttgagtgacgatggagtagatttgaagactcaaccagtacgtaatactgaaagaactatttatgtgagagatccaacgtccaataaacagcaaaggccagttccagaatctcagcttttacctggacagaggtttcaaactaaagatccagaggaacaaggagacattgtggtagccttgtacccctatgatggcatccacccggacgacttgtctttcaagaaaggagagaagatgaaagtcctggaggagcatggagaatggtggaaagcaaagtcccttttaacaaaaaaagaaggcttcatccccagcaactatgtggccaaactcaacaccttagaaacagaagagtggtttttcaaggatataaccaggaaggacgcagaaaggcagcttttggcaccaggaaatagcgctggagctttccttattagagaaagtgaaacattaaaaggaagcttctctctgtctgtcagagactttgaccctgtgcatggtgatgttattaagcactacaaaattagaagtctggataatgggggctattacatctctccacgaatcacttttccctgtatcagcgacatgattaaacattaccaaaagcaggcagatggcttgtgcagaagattggagaaggcttgtattagtcccaagccacagaagccatgggataaagatgcctgggagatcccccgggagtccatcaagttggtgaaaaggcttggcgctgggcagtttggggaagtctggatgggttactataacaacagtaccaaggtggctgtgaaaaccctgaagccaggaactatgtctgtgcaagccttcctggaagaagccaacctcatgaagaccctgcagcatgacaagctcgtgaggctctacgctgtggtcaccagggaggagcccatttacatcatcaccgagtacatggccaagggcagtttgctggatttcctgaagagcgatgaaggtggcaaagtgctgcttccaaagctcattgacttttctgctcagattgcagagggaatggcatacatcgagcggaagaactacattcaccgggacctgcgagcagctaatgttctggtctccgagtcactcatgtgcaaaattgcagattttggccttgctagagtaattgaagataatgagtacacagcaagggaaggtgctaagttccctattaagtggacggctccagaagcaatcaactttggatgtttcactattaagtctgatgtgtggtcctttggaatcctcctatacgaaattgtcacctatgggaaaattccctacccagggagaactaatgccgacgtgatgaccgccctgtcccagggctacaggatgccccgtgtggagaactgcccagatgagctctatgacattatgaaaatgtgctggaaagaaaaggcagaagagagaccaacgtttgactacttacagagcgtcctggatgatttctacacagccacggaagggcaataccagcagcagccttagagcacagggagacccgtccatttggcaggggtggctgcctcatttagagaggaaaagtaaccatcactggttgcacttatgatttcatgtgcggggatcatctgccgtgcctggatcctgaaatagaggctaaattactcaggaagaacaccctctaaatgggaaagtattctgtactcttagatggattctccactcagttgcaacttggacttgtcctcagcagctggtaatcttgctctgcttgacaacatctgagtgcagccgtttgagaagaaaacatctattctctccaaaaatgcacccaactagctctatgtttacaaatggacataggactcaaagtttcagagaccattgcaatgaatccccaataattgcagaactaaactcatttataaagctaaaataaccggatatatacatagcatgacatttctttgtgctttggcttacttgtttaaaaaaaaaaaaaaactaatccaacctgttagattttgcaggtgaagtcagcagcttaaaaatgtctttcccagatttcaatgatttttttccccctacctcccaaaatctgagactgttaaaacatttttcttctatgaacactgctcagacctgctagacatgccataggagtggcgtgcacatctctctctcttccagcaggaggagcccgtgagcacgcacagctgccctgtctgctcacccgaaggcaccgggctcacctggacctcccaggaaagggagaagagcctcagaaactgctctgtgtttagaaggaatatttttaagagtccagctttttcatttccacaatttcctatatccagatttgttttgacaatgtagtttggaagaactaagattctaatctctgaagaaccttatagggccttctaaaacataagagtttcctttgttgcttcaaatatttgaacattatgttaaagatcaagtattaattttagttgtactctagaaagctaaagtgccacattcggggctatttttatgattcagcaatcttttctaaattgtgtagcatgtgtatgagactatttatacccaaggatatgaaggaacataagtgactacaaggctctaataagccacggtggcaggaggttcaagcggttctgttcactaaatttttctcctgtaagctttgaatggaaacttctgtatcacatgatgtgtttcacttatgctgttgtgtatatacctaatatttctatttttgattttattttaatacacctcgtccaataacatctc

SEQ ID NO: 18673 - protein, 512 aa, Homo sapiens; identical to SEQ ID NO: 2286

SEQ ID NO: 18674 - DNA, 4301 bp, Homo sapiens
aaggaacttactttgtaatgattattaagaactcagcgagaccccgagcatcacctcggcatatcgcatcctttctctagagaacccctaatgttggaagggatcagagcgcacctcctccgctcctgggagcacccccttcctaataataccttggggatgggtcggaaggaaaggaaaggagacgcgagaggtgtagtcgatgtgcctgcgaagcccaggctcctctggagatccttccgtccgtccctacaggagaaggctggcccgggctgctccactccccggagctgcagactgagtcgccaggtttctgtgccttcaaagccctgcgcgacggccacaccaaacacccaaaccttgggcagggaccaaacggtcacttccccgccctccgggctcaatatgcaaatccgagcaccaggaagtagctgggacctctcggccgagcccagagacagccagttcctctcccgccgcgccgggccgcgctgccgctcgctccccggccgtggcgcctccgggccagacgcgctgcagcctccagcccgcggcaagcggggcggccgcgccacccccggccccgcgccagcagcccctcgccgcgcgtccagcgttcccggccagcagcctccccatacgcaggtcctgctgggccgccccgtcgcgccccccactctgaactcaagtcaccgtggagctccgccgccccgaaactttcaccgcgagcgggaaatatgggatgtataaaatcaaaagggaaagacagcttgagtgacgatggagtagatttgaagactcaaccagttccagaatctcagcttttacctggacagaggtttcaaactaaagatccagaggaacaaggagacattgtggtagccttgtacccctatgatggcatccacccggacgacttgtctttcaagaaaggagagaagatgaaagtcctggaggagcatggagaatggtggaaagcaaagtcccttttaacaaaaaaagaaggcttcatccccagcaactatgtggccaaactcaacaccttagaaacagaagagtggtttttcaaggatataaccaggaaggacgcagaaaggcagcttttggcaccaggaaatagcgctggagctttccttattagagaaagtgaaacattaaaaggaagcttctctctgtctgtcagagactttgaccctgtgcatggtgatgttattaagcactacaaaattagaagtctggataatgggggctattacatctctccacgaatcacttttccctgtatcagcgacatgattaaacattaccaaaagcaggcagatggcttgtgcagaagattggagaaggcttgtattagtcccaagccacagaagccatgggataaagatgcctgggagatcccccgggagtccatcaagttggtgaaaaggcttggcgctgggcagtttggggaagtctggatgggttactataacaacagtaccaaggtggctgtgaaaaccctgaagccaggaactatgtctgtgcaagccttcctggaagaagccaacctcatgaagaccctgcagcatgacaagctcgtgaggctctacgctgtggtcaccagggaggagcccatttacatcatcaccgagtacatggccaagggcagtttgctggatttcctgaagagcgatgaaggtggcaaagtgctgcttccaaagctcattgacttttctgctcagattgcagagggaatggcatacatcgagcggaagaactacattcaccgggacctgcgagcagctaatgttctggtctccgagtcactcatgtgcaaaattgcagattttggccttgctagagtaattgaagataatgagtacacagcaagggaaggtgctaagttccctattaagtggacggctccagaagcaatcaactttggatgtttcactattaagtctgatgtgtggtcctttggaatcctcctatacgaaattgtcacctatgggaaaattccctacccagggagaactaatgccgacgtgatgaccgccctgtcccagggctacaggatgccccgtgtggagaactgcccagatgagctctatgacattatgaaaatgtgctggaaagaaaaggcagaagagagaccaacgtttgactacttacagagcgtcctggatgatttctacacagccacggaagggcaataccagcagcagccttagagcacagggagacccgtccatttggcaggggtggctgcctcatttagagaggaaaagtaaccatcactggttgcacttatgatttcatgtgcggggatcatctgccgtgcctggatcctgaaatagaggctaaattactcaggaagaacaccctctaaatgggaaagtattctgtactcttagatggattctccactcagttgcaacttggacttgtcctcagcagctggtaatcttgctctgcttgacaacatctgagtgcagccgtttgagaagaaaacatctattctctccaaaaatgcacccaactagctctatgtttacaaatggacataggactcaaagtttcagagaccattgcaatgaatccccaataattgcagaactaaactcatttataaagctaaaataaccggatatatacatagcatgacatttctttgtgctttggcttacttgtttaaaaaaaaaaaaaaactaatccaacctgttagattttgcaggtgaagtcagcagcttaaaaatgtctttcccagatttcaatgatttttttccccctacctcccaaaatctgagactgttaaaacatttttcttctatgaacactgctcagacctgctagacatgccataggagtggcgtgcacatctctctctcttccagcaggaggagcccgtgagcacgcacagctgccctgtctgctcacccgaaggcaccgggctcacctggacctcccaggaaagggagaagagcctcagaaactgctctgtgtttagaaggaatatttttaagagtccagctttttcatttccacaatttcctatatccagatttgttttgacaatgtagtttggaagaactaagattctaatctctgaagaaccttatagggccttctaaaacataagagtttcctttgttgcttcaaatatttgaacattatgttaaagatcaagtattaattttagttgtactctagaaagctaaagtgccacattcggggctatttttatgattcagcaatcttttctaaattgtgtagcatgtgtatgagactatttatacccaaggatatgaaggaacataagtgactacaaggctctaataagccacggtggcaggaggttcaagcggttctgttcactaaatttttctcctgtaagctttgaatggaaacttctgtatcacatgatgtgtttcacttatgctgttgtgtatatacctaatatttctatttttgattttattttaatacacctcgtccaataacatctcaagctttttatttgcatttacattttcagctgtggtcagtgtaaaaattggtcatcagctgggggcggggtggttagaagtgattcaacagagctacatgctttaaacttgcccaagttctacctccttcctttgaacatttcagattggagaaccaaggagttgattgcctgaacacctgaacatccgtttatgggggccagatagaatttgttttcaaataggcttaacaggcatcattaaaatttcattctgtgtgttttgtttaggcttgaggtgcttagaagatgggataaaatattctacttttttctaaattttaactttgtttcctatgtgatttttttaaatgtcctttctaaaatattctaaaattattgattcacaagtgccatgttcagaactatagaatattactgttacataatgtctgcacagctggtcccttgattcagtggtaaggtttttgtgtacacccccctgcttgcattttatttcagaaccacaagtattacccaatatgttacatggagaggaactataaagaatccctaaggcaaaaagaagtctctagaaaatgactagaggttttttttttagcataacaaatttatttaaagaaaattattaaatttatcttcgccttgttttgcttctcccagttcctcctcttcttgccattttccacttgtctttccctcccaatcaagcctgtgatccttacctccatgtgggcccttcaccagcttgggcctcatctctggtgtccagcatgtgtggaagtcacacgttcccttgatgaacagcacacac

SEQ ID NO: 18675 - protein, 491 aa, Homo sapiens; identical to SEQ ID NO: 18671

SEQ ID NO: 18676 - DNA, 4364 bp, Homo sapiens
aaggaacttactttgtaatgattattaagaactcagcgagaccccgagcatcacctcggcatatcgcatcctttctctagagaacccctaatgttggaagggatcagagcgcacctcctccgctcctgggagcacccccttcctaataataccttggggatgggtcggaaggaaaggaaaggagacgcgagaggtgtagtcgatgtgcctgcgaagcccaggctcctctggagatccttccgtccgtccctacaggagaaggctggcccgggctgctccactccccggagctgcagactgagtcgccaggtttctgtgccttcaaagccctgcgcgacggccacaccaaacacccaaaccttgggcagggaccaaacggtcacttccccgccctccgggctcaatatgcaaatccgagcaccaggaagtagctgggacctctcggccgagcccagagacagccagttcctctcccgccgcgccgggccgcgctgccgctcgctccccggccgtggcgcctccgggccagacgcgctgcagcctccagcccgcggcaagcggggcggccgcgccacccccggccccgcgccagcagcccctcgccgcgcgtccagcgttcccggccagcagcctccccatacgcaggtcctgctgggccgccccgtcgcgccccccactctgaactcaagtcaccgtggagctccgccgccccgaaactttcaccgcgagcgggaaatatgggatgtataaaatcaaaagggaaagacagcttgagtgacgatggagtagatttgaagactcaaccagtacgtaatactgaaagaactatttatgtgagagatccaacgtccaataaacagcaaaggccagttccagaatctcagcttttacctggacagaggtttcaaactaaagatccagaggaacaaggagacattgtggtagccttgtacccctatgatggcatccacccggacgacttgtctttcaagaaaggagagaagatgaaagtcctggaggagcatggagaatggtggaaagcaaagtcccttttaacaaaaaaagaaggcttcatccccagcaactatgtggccaaactcaacaccttagaaacagaagagtggtttttcaaggatataaccaggaaggacgcagaaaggcagcttttggcaccaggaaatagcgctggagctttccttattagagaaagtgaaacattaaaaggaagcttctctctgtctgtcagagactttgaccctgtgcatggtgatgttattaagcactacaaaattagaagtctggataatgggggctattacatctctccacgaatcacttttccctgtatcagcgacatgattaaacattaccaaaagcaggcagatggcttgtgcagaagattggagaaggcttgtattagtcccaagccacagaagccatgggataaagatgcctgggagatcccccgggagtccatcaagttggtgaaaaggcttggcgctgggcagtttggggaagtctggatgggttactataacaacagtaccaaggtggctgtgaaaaccctgaagccaggaactatgtctgtgcaagccttcctggaagaagccaacctcatgaagaccctgcagcatgacaagctcgtgaggctctacgctgtggtcaccagggaggagcccatttacatcatcaccgagtacatggccaagggcagtttgctggatttcctgaagagcgatgaaggtggcaaagtgctgcttccaaagctcattgacttttctgctcagattgcagagggaatggcatacatcgagcggaagaactacattcaccgggacctgcgagcagctaatgttctggtctccgagtcactcatgtgcaaaattgcagattttggccttgctagagtaattgaagataatgagtacacagcaagggaaggtgctaagttccctattaagtggacggctccagaagcaatcaactttggatgtttcactattaagtctgatgtgtggtcctttggaatcctcctatacgaaattgtcacctatgggaaaattccctacccagggagaactaatgccgacgtgatgaccgccctgtcccagggctacaggatgccccgtgtggagaactgcccagatgagctctatgacattatgaaaatgtgctggaaagaaaaggcagaagagagaccaacgtttgactacttacagagcgtcctggatgatttctacacagccacggaagggcaataccagcagcagccttagagcacagggagacccgtccatttggcaggggtggctgcctcatttagagaggaaaagtaaccatcactggttgcacttatgatttcatgtgcggggatcatctgccgtgcctggatcctgaaatagaggctaaattactcaggaagaacaccctctaaatgggaaagtattctgtactcttagatggattctccactcagttgcaacttggacttgtcctcagcagctggtaatcttgctctgcttgacaacatctgagtgcagccgtttgagaagaaaacatctattctctccaaaaatgcacccaactagctctatgtttacaaatggacataggactcaaagtttcagagaccattgcaatgaatccccaataattgcagaactaaactcatttataaagctaaaataaccggatatatacatagcatgacatttctttgtgctttggcttacttgtttaaaaaaaaaaaaaaactaatccaacctgttagattttgcaggtgaagtcagcagcttaaaaatgtctttcccagatttcaatgatttttttccccctacctcccaaaatctgagactgttaaaacatttttcttctatgaacactgctcagacctgctagacatgccataggagtggcgtgcacatctctctctcttccagcaggaggagcccgtgagcacgcacagctgccctgtctgctcacccgaaggcaccgggctcacctggacctcccaggaaagggagaagagcctcagaaactgctctgtgtttagaaggaatatttttaagagtccagctttttcatttccacaatttcctatatccagatttgttttgacaatgtagtttggaagaactaagattctaatctctgaagaaccttatagggccttctaaaacataagagtttcctttgttgcttcaaatatttgaacattatgttaaagatcaagtattaattttagttgtactctagaaagctaaagtgccacattcggggctatttttatgattcagcaatcttttctaaattgtgtagcatgtgtatgagactatttatacccaaggatatgaaggaacataagtgactacaaggctctaataagccacggtggcaggaggttcaagcggttctgttcactaaatttttctcctgtaagctttgaatggaaacttctgtatcacatgatgtgtttcacttatgctgttgtgtatatacctaatatttctatttttgattttattttaatacacctcgtccaataacatctcaagctttttatttgcatttacattttcagctgtggtcagtgtaaaaattggtcatcagctgggggcggggtggttagaagtgattcaacagagctacatgctttaaacttgcccaagttctacctccttcctttgaacatttcagattggagaaccaaggagttgattgcctgaacacctgaacatccgtttatgggggccagatagaatttgttttcaaataggcttaacaggcatcattaaaatttcattctgtgtgttttgtttaggcttgaggtgcttagaagatgggataaaatattctacttttttctaaattttaactttgtttcctatgtgatttttttaaatgtcctttctaaaatattctaaaattattgattcacaagtgccatgttcagaactatagaatattactgttacataatgtctgcacagctggtcccttgattcagtggtaaggtttttgtgtacacccccctgcttgcattttatttcagaaccacaagtattacccaatatgttacatggagaggaactataaagaatccctaaggcaaaaagaagtctctagaaaatgactagaggttttttttttagcataacaaatttatttaaagaaaattattaaatttatcttcgccttgttttgcttctcccagttcctcctcttcttgccattttccacttgtctttccctcccaatcaagcctgtgatccttacctccatgtgggcccttcaccagcttgggcctcatctctggtgtccagcatgtgtggaagtcacacgttcccttgatgaacagcacacac

SEQ ID NO: 18677 - protein, 512 aa, Homo sapiens; identical to SEQ ID NO: 2286

SEQ ID NO: 18678 - DNA, 1080 bp, Homo sapiens
atagccccgaatgtggcactttagctttctagagtacaactaaaattaatacttgatctttaacataatgttcaaatatttgaagcaacaaaggaaactcttatgttttagaaggccctataaggttcttcagagattagaatcttagttcttccaaactacattgtcaaaacaaatctggatataggaaattgtggaaatgaaaaagctggactcttaaaaatattccttctaaacacagagcagtttctgaggctcttctccctttcctgggaggtccaggtgagcccggtgccttcgggtgagcagacagggcagctgtgcgtgctcacgggctcctcctgctggaagagagagagatgtgcacgccactcctatggcatgtctagcaggtctgagcagtgttcatagaagaaaaatgttttaacagtctcagattttgggaggtagggggaaaaaaatcattgaaatctgggaaagacatttttaagctgctgacttcacctgcaaaatctaacaggttggattagtttttttttttttttaaacaagtaagccaaagcacaaagaaatgtcatgctatgtatatatccggttattttagctttataaatgagtttagttctgcaattattggggattcattgcaatggtctctgaaactttgagtcctatgtccatttgtaaacatagagctagttgggtgcatttttggagagaatagatgttttcttctcaaacggctgcactcagatgttgtcaagcagagcaagattaccagctgctgaggacaagtccaagttgcaactgagtggagaatccatctaagagtacagaatactttcccatttagagggtgttcttcctgagtaatttagcctctatttcaggatccaggcacggcagatgatccccgcacatgaaatcataagtgcaaccagtgatggttacttttcctctctaaatgaggcagccacccctgccaaatggacgggtctccctgtgctctaaggtgctggccgggaacgctggacgcgcggcgaggggctgctggcgcggggccgggggtggcgcggccgc

SEQ ID NO: 18679 - protein, 37 aa, Homo sapiens [sequence omitted]

SEQ ID NO: 18680 - DNA, 665 bp, Homo sapiens
atccatgaagtcatgcttcacttatgcatcattcagaaaacacttcttggatactcactactcatgaatatgcatgcatatgacttgcagtcaaagccatgagttctcaatagcaaaactgttccagatatactcagagagttaaaatgtttaaaaaacttttttttaaagaaaattttccttttatttttgttgttttgttttgtttttttttagaagcaagatctcactatgttgcccaggctagagtgcactggccattcacaggcacgattatcactcacacactatggtcctgagatcctgggctgaagtgatcctcctgcctcagcttctcgagtagctgggactagaggcatgtgccactgcacctggcttagagtataaatttttgtgtcacacaagatatgaagaacatgcacaggcactggacccatctgtgggttcatctttctgtgggacccactaagggacccatctttctgtgaaaaagtcacaagtgaagtcctggccaggaattcaagaccaggctgggcatcatagtgagacctcatctctacaattttttttttaaaggaattggcttctagtcaatgctttgtcaaataccagtcttgggacattagatgaagctccttcatctaatgtttttctaatacataaaa

SEQ ID NO: 18681 - protein, 50 aa, Homo sapiens
MFKKLFFKENFPFIFVVLFCFFLEARSHYVAQARVHWPFTGTIITHTLWS

SEQ ID NO: 18682 - DNA, 1517 bp, Homo sapiens
cggtggctcatgcctgtaatcccagctactcgggaggctgaggcaggagaattgcttgagcccgggaggtggagtttgcagtgagccgagattgcaccactgctctccagccttgtaacagagcgagactccatctcaaaaaagaaaaaaaagaagataaacataaaaggtttccattgctatgatttcaattctagggtggagctcagggtttggcaaggttccctacattattagactgcgcattttaccctttttcaaaagcaggtaaggttgtagtgtagagtgtggctagtgattctcaaccctggctgctcattagaatcaatggggagcatttaaacctccccatgcccaagctgttccctaaccaatgaaatgggaatggtgggggcctaagcatcagtattttttagagttccccaggtgattctgcttgtgtaccaaggatgagaatcattttactagattcagctatgtgggaatctttcggctattttagaaaacatggtgaaaccacatctctactaaaaatacaaaaaattagccaggcgtggtggcaggcacctgtgattccagctactccggaggctgagcaggagaattacttcaacccgggaggtggagattgcagtgagccgatagtgccattgcactccagcctgggcaacaagagtgaaactccgtctcaaaaaaaaagaaagaaagaaagaaagaaagaaagacaaaagaaaacatggtggtcagtgaattaaggtggcccagttaatatccagtcagttcccacctgaatgtcagatgtcctggagtgctgagatgtgtccagaattgctagctacccagctagaaaagctaccgcaaggtcatctcgggaaaagggaaccacaaatgtcccagttaagaggatggatagtttcccagggttggagtcctttcttttcctagtcacccccaaacacttaagaggcctatgggatgggcaggggagcagggagagcctcactcctctcccatctgttgggagagcctcactcaccaaaacagcgttgccttgtctgtgtcatatgcatcatgtgagtgcatgaagtcccttgctccagggacttcccattaggcctggagtgtctcccatgcaaagagcccgctcctctgttcctgggacacacctctggcagtcccagaggttgcccattcatcttgacttctggaaagaagcctatagtgagaaaggagcatgtagtcagaaaccaccaagtgcagcatagttctacataactcacagcattcagtagttttgtgttgttgcttttctttctttttccatacagtagttcatctgatatgtgcagttacgcagcacctgttaagtcagagggctgggatggtgaggtcgccctgtaaactctgggcaaattactccatttctgagccatcttttgccatctgttagaatttctgatcaggatttaatcggggttggttgtgaaagagtatatgaacatgctttgataaagaag

SEQ ID NO: 18683 - protein, 101 aa, Homo sapiens
MRIILLDSAMWESFGYFRKHGETTSLLKIQKISQAWWQAPVIPATPEAEQENYFNPGGGDCSEPIVPLHSSLGNKSETPSQKKRKKERKKERQKKTWWSVN

SEQ ID NO: 18684 - DNA, 1463 bp, Homo sapiens
cttctcatcatggcggaccctagagataaggcgcttagggactaccgcaagaaggtgcttgagcacaaggagatcgatggccgtcttaaggaattgtgggtgaagtgtttaaacagttaactgaagaaaaattcattgttaaagctaccaatggaccaagatatgttgtgggttgtcgtcgacagcttgacaaaagtaagctgaagccaggaacaagagttgctttggatatgactacactaactatcatgagatatttgccaagagaggtggatccactgatttataacatgtctcatgaggaccctgagaatgtttcttattctgagattggagggctatcagaacagatccgggaattaagagaggtgatagaattacctcttacaaacccagagttatttcagcgtgtaggaataatacctccaaaaggctgtttgttatatggaccaccaggtacgggaaaaacactcttggcacgagccattgctagccagctggactgcaatttcttaaaggttgtatctagttctattgtagacaagtacattggtgaaagtgctcatttgatcagagaaatgtttaattatgctagagatcatcaaccatgcatcatttttatggatgaaatagatgctattggtggtcgtcggttttctgagggtacttcagctgacagagagattcagagaacgttaacggagttactgaatcaaatggatggatttgatactctgcatagagttaaaatgatcatggctacaaacagaccagatacactggatcctgctttgctgtgtccaggaagattagatagaaaaatacatattgatttgccaaatgaacaaacaagattagacatactgaaaatccatgcaggtcccattacaaagcatggtgaaatagattatgaagcaattgtgaagctttcagatggctttaatggagcagacctgagaaatgtttgtactgaagcaggtatgttcgcaattcgtgctgatcatgattttgtagtacaggaagacttcatgaaagcagtcagaaaagtggctgattctaagaagctggaggctaaattggactacaaacctgtgtaatttactgtaagatttttgatggctgcatgacagatgttgacttagtgtaaaaataaagttaaagaaaataatgtatgtattggcaatgatgtcattaaaagtatatgaataaaataacatcataaaaattagtagttcaacttttaagatacagaagaaatttgtatgtttgttaaagttgcatttattgcagcaagttacaaagggagagtgttgaagcttttcatatttgctgtgtgagcattttgtaaaatattgaaagtggtttgagatagtggtataagaaagcatttcttatgacttattttgtatcatttgttttcctcatctaaaaagttgaataaaatctgtttgattaaaaaaaaa

SEQ ID NO: 18685 - protein, 36 aa, Homo sapiens
MADPRDKALRDYRKKVLEHKEIDGRLKELWVKCLNS

SEQ ID NO: 18686 - DNA, 1171 bp, Homo sapiens
cttctcatcatggcggaccctagagataaggcgcttagggactaccgcaagaaggtgcttgagcacaaggagatcgatggccgtcttaaggaattgtgggtgaagtgtttaaacagttaactgaagaaaaattcattgttaaagctaccaatggaccaagatatgttgtgggttgtcgtcgacagcttgacaaaagtaagctgaagccaggaacaagagttgctttggatatgactacactaactatcatgagatatttgccaagagaggtggatccactgatttataacatgtctcatgaggaccctgagaatgtttcttattctgagattggagggctatcagaacagatccgggaattaagagaggtgatagaattacctcttacaaacccagagttatttcagcgtgtaggaataatacctccaaaaggctgtttgttatatggaccaccaggtacgggaaaaacactcttggcacgagccattgctagccagctggactgcaatttcttaaaggttgtatctagttctattgtagacaagtacattggtgaaagtgctcatttgatcagagaaatgtttaattatgctagagatcatcaaccatgcatcatttttatggatgaaatagatgctattggtggtcgtcggttttctgagggtacttcagctgacagagagattcagagaacgttaacggagttactgaatcaaatggatggatttgatactctgcatagagttaaaatgatcatggctacaaacagaccagatacactggatcctgctttgctgtgtccaggaagattagatagaaaaatacatattgatttgccaaatgaacaaacaagattagacatactgaaaatccatgcaggtcccattacaaagcatggtgaaatagattatgaagcaattgtgaagctttcagatggctttaatggagcagacctgagaaatgtttgtactgaagcaggtatgttcgcaattcgtgctgatcatgattttgtagtacaggaagacttcatgaaagcagtcagaaaagtggctgattctaagaagctggaggctaaattggactacaaacctgtgtaatttactgtaagatttttgatggctgcatgacagatgttgacttagtgtaaaaataaagttaaagaaaataatgt

SEQ ID NO: 18687 - protein, 36 aa, Homo sapiens; identical to SEQ ID NO: 18685

SEQ ID NO: 18688 - DNA, 1636 bp, Homo sapiens
tctgacattagcccctgtgcagatgactttccatgctattggaagctccattgaagccagccatgatcaggcagccttaagtgccttgaaacaattttctgaacaaggactggatccaatcgatggagcaatgaatatcgaaaaaggttctcttgaaaaacaagccaagcatctgagagagaaagcggacaataaccaggcacccccgggctccatcgctcaggactgcaagaaatcaaactcggccgtctagcagctcccagaacccgcggctgccaccgcatccttataaacctgtcagcacgcatgagggtgtctgtgttcagggaaatgaatgactaataccattatttgagtcttatgtgaagacaacactattctaacacgagagataatatacatggtactgtttattcaactggggaaaaataaaactttgagcatttcccttggaactcgagatcagatcataactcatttgcctagaggcagcagaaatctgatcctgctactggagcttaaaataacaagtaaagaaaagtgttagaaacaaagctaaaattttaacatgattaataatagagaagttgggtttggttctgttgttatgattgttttgtcgtggtgcttgtgttcagttatattctctctctctctcatttcaaatactgcttgacaattcgaaaatgaaccaatgatgtgctgtggaatgtgatggttgtcttcatatagagtcacatggtttctctttttatgcagatatttataatcttcatcctatatcagtaggaataactataaggtgcactacaaaaagatgtatgcaaacaaacatgttttaaatcaggtcagatatctgatgaaaaatacgaactaatgttaagagcaagtagtttcaacatactccaggaactgagaaacaaaacaaagcaattgtgggttttgagctccatatactcttagcaagtaagggggcgtcttgcccctatatatcatcttcccggattccactccctgttgtgggaatcgcgcccacccccatccgtgtgttgtagccactcacggtttgcatcaagagtgttttttgtaactgcctctggacttgggacagtgagtaggatcaaaaataaataatgtacatgacggggaagggaaaaacctgttggagttgcttccagccagccacgctccgggccagcatgttggaatccagcgtggagcagatgcagtaaaaatgtggttggtttctgtgtgaagcgctgttgttgttcttttgttctctcactctcatcttttaaatatcacctccgtgaaacccatccgaaaggccaccacccggcctagtcactgcccagcagtgggattagagaatggataggctgtacctgagaaactgcagagccgcctcctgggtgactcgggccgggttcctggccaacgtcatcgcattgttcaggctttctccttattgatttgcaaacattgtgcaatgagaaaacactacatggtctaactgctcgacccaacatgacaataggaatataattatgtaagatttcacaagcaaaaccaccacaaatcatgatctggctgactcacacgcgactggagaataaacaaacagcaacataaggaa

SEQ ID NO: 18689 - protein, 76 aa, Homo sapiens [sequence omitted]

SEQ ID NO: 18690 - DNA, 3268 bp, Homo sapiens
gggggcggggagcccgaggggtggaagccggcggcggccgagcggggtcagttctctgtagtgtttgccaatgttggagccgtctgcaaagtgtccccggcaagaagaggctgcctaccacaaggactttagcttactttttaaagattgaagaaaaaaaagaagacagaaaaagaagaactcaaagatacacaaagtaatttgaaccaaggctcagaagtttttggagccgtgagggatacagcagtttggtcaatattgtcttaacatgcttcaaataaatcagatgttctcagtgcagctgagtcttggtgagcagacatgggaatccgaaggcagcagtataaagaaggctcagcaggctgttgccaataaagctttgactgaatctacgcttcccaaaccagttcagaagccacccaaaagtaatgttaacaataacccaggcagtataactccaactgtggaactgaatgggcttgctatgaaaaggggagagcctgccatctacaggccattagatccaaagccattcccaaattatagagctaattacaactttcggggcatgtacaatcagaggtatcattgcccagtgcctaagatcttttatgttcagctcactgtaggaaataatgaattttttggggaaggaaagactcgacaagctgctagacacaatgctgcaatgaaagccctccaagcactgcagaatgaacctattccagaaagatctcctcagaatggtgaatcaggaaaggatgtggatgatgacaaagatgcaaataagtctgagatcagcttagtgtttgaaattgctctgaagcgaaatatgcctgtcagttttgaggttattaaagaaagtggaccaccacatatgaaaagctttgttactcgagtgtcagtaggagagttctctgcagaaggagaaggaaatagcaaaaaactctccaagaagcgcgctgcgaccaccgtcttacaggagcttaaaaaacttccacctcttcctgtggtggaaaagccaaaactattttttaaaaaacgccctaaaacaatagtaaaggccggaccagaatatggccaagggatgaaccctattagccgcctggcgcaaattcaacaggccaaaaaggaaaaggagccggattatgttttgctttcagaaagaggaatgcctcgacgtcgagaatttgtgatgcaggtgaaggtaggcaatgaagttgctacaggaacaggacctaataaaaagatagccaaaaaaaatgctgcagaagcaatgctgttacaacttggttataaagcatccactaatcttcaggatcaacttgagaagacaggggaaaacaaaggatggagtggtccaaagcctgggtttcctgaaccaacaaataatactccaaaaggaattcttcatttgtctcctgatgtttatcaagagatggaagccagccgccacaaagtaatctctggcactactctaggctatttgtcacccaaagatatgaaccaaccttcaagctctttcttcagtatatctcccacatcgaatagttcagctacaattgccagggaactccttatgaatggaacatcttctacagctgaagccataggtttaaaaggaagttctcctactcccccttgttctccagtacaaccttcaaaacaactggaatatttagcaaggattcaaggctttcaggcagccttaagtgccttgaaacaattttctgaacaaggactggatccaatcgatggagcaatgaatatcgaaaaaggttctcttgaaaaacaagccaagcatctgagagagaaagcggacaataaccaggcacccccgggctccatcgctcaggactgcaagaaatcaaactcggccgtctagcagctcccagaacccgcggctgccaccgcatccttataaacctgtcagcacgcatgagggtgtctgtgttcagggaaatgaatgactaataccattatttgagtcttatgtgaagacaacactattctaacacgagagataatatacatggtactgtttattcaactggggaaaaataaaactttgagcatttcccttggaactcgagatcagatcataactcatttgcctagaggcagcagaaatctgatcctgctactggagcttaaaataacaagtaaagaaaagtgttagaaacaaagctaaaattttaacatgattaataatagagaagttgggtttggttctgttgttatgattgttttgtcgtggtgcttgtgttcagttatattctctctctctctcatttcaaatactgcttgacaattcgaaaatgaaccaatgatgtgctgtggaatgtgatggttgtcttcatatagagtcacatggtttctctttttatgcagatatttataatcttcatcctatatcagtaggaataactataaggtgcactacaaaaagatgtatgcaaacaaacatgttttaaatcaggtcagatatctgatgaaaaatacgaactaatgttaagagcaagtagtttcaacatactccaggaactgagaaacaaaacaaagcaattgtgggttttgagctccatatactcttagcaagtaagggggcgtcttgcccctatatatcatcttcccggattccactccctgttgtgggaatcgcgcccacccccatccgtgtgttgtagccactcacggtttgcatcaagagtgttttttgtaactgcctctggacttgggacagtgagtaggatcaaaaataaataatgtacatgacggggaagggaaaaacctgttggagttgcttccagccagccacgctccgggccagcatgttggaatccagcgtggagcagatgcagtaaaaatgtggttggtttctgtgtgaagcgctgttgttgttcttttgttctctcactctcatcttttaaatatcacctccgtgaaacccatccgaaaggccaccacccggcctagtcactgcccagcagtgggattagagaatggataggctgtacctgagaaactgcagagccgcctcctgggtgactcgggccgggttcctggccaacgtcatcgcattgttcaggctttctccttattgatttgcaaacattgtgcaatgagaaaacactacatggtctaactgctcgacccaacatgacaataggaatataattatgtaagatttcacaagcaaaaccaccacaaatcatgatctggctgactcacacgcgactggagaataaacaaacagcaacataaggaa

SEQ ID NO: 18691 - protein, 538 aa, Homo sapiens
MLQINQMFSVQLSLGEQTWESEGSSIKKAQQAVANKALTESTLPKPVQKPPKSNVNNNPGSITPTVELNGLAMKRGEPAIYRPLDPKPFPNYRANYNFRGMYNQRYHCPVPKIFYVQLTVGNNEFFGEGKTRQAARHNAAMKALQALQNEPIPERSPQNGESGKDVDDDKDANKSEISLVFEIALKRNMPVSFEVIKESGPPHMKSFVTRVSVGEFSAEGEGNSKKLSKKRAATTVLQELKKLPPLPVVEKPKLFFKKRPKTIVKAGPEYGQGMNPISRLAQIQQAKKEKEPDYVLLSERGMPRRREFVMQVKVGNEVATGTGPNKKIAKKNAAEAMLLQLGYKASTNLQDQLEKTGENKGWSGPKPGFPEPTNNTPKGILHLSPDVYQEMEASRHKVISGTTLGYLSPKDMNQPSSSFFSISPTSNSSATIARELLMNGTSSTAEAIGLKGSSPTPPCSPVQPSKQLEYLARIQGFQAALSALKQFSEQGLDPIDGAMNIEKGSLEKQAKHLREKADNNQAPPGSIAQDCKKSNSAV

SEQ ID NO: 18692 - DNA, 3442 bp, Homo sapiens
gcggcgggagcgccggggaggcgggcggaggcgggcggaggcggggggcggggagcccgaggggtggaagccggcggcggccgagcggggtcagttctctgtagtgtttgccaatgttggagccgtctgcaaagtgtccccggcaagaagaggctgcctaccacaaggactttagcttactttttaaagattgaagaaaaaaaagaagacagaaaaagaagaactcaaagatacacaaagtaatttgaaccaaggctcagaagtttttggagccgtgagggatacagcagtttggtcaatattgtcttaacatgcttcaaataaatcagcttctctccaagataaaatggcaaacccaaaagagaaaactgcaatgtgtctggtaaatgagttagcccgtttcaatagagtccaaccccagtataaacttctgaatgaaagagggcctgctcattcaaagatgttctcagtgcagctgagtcttggtgagcagacatgggaatccgaaggcagcagtataaagaaggctcagcaggctgttgccaataaagctttgactgaatctacgcttcccaaaccagttcagaagccacccaaaagtaatgttaacaataacccaggcagtataactccaactgtggaactgaatgggcttgctatgaaaaggggagagcctgccatctacaggccattagatccaaagccattcccaaattatagagctaattacaactttcggggcatgtacaatcagaggtatcattgcccagtgcctaagatcttttatgttcagctcactgtaggaaataatgaattttttggggaaggaaagactcgacaagctgctagacacaatgctgcaatgaaagccctccaagcactgcagaatgaacctattccagaaagatctcctcagaatggtgaatcaggaaaggatgtggatgatgacaaagatgcaaataagtctgagatcagcttagtgtttgaaattgctctgaagcgaaatatgcctgtcagttttgaggttattaaagaaagtggaccaccacatatgaaaagctttgttactcgagtgtcagtaggagagttctctgcagaaggagaaggaaatagcaaaaaactctccaagaagcgcgctgcgaccaccgtcttacaggagcttaaaaaacttccacctcttcctgtggtggaaaagccaaaactattttttaaaaaacgccctaaaacaatagtaaaggccggaccagaatatggccaagggatgaaccctattagccgcctggcgcaaattcaacaggccaaaaaggaaaaggagccggattatgttttgctttcagaaagaggaatgcctcgacgtcgagaatttgtgatgcaggtgaaggtaggcaatgaagttgctacaggaacaggacctaataaaaagatagccaaaaaaaatgctgcagaagcaatgctgttacaacttggttataaagcatccactaatcttcaggatcaacttgagaagacaggggaaaacaaaggatggagtggtccaaagcctgggtttcctgaaccaacaaataatactccaaaaggaattcttcatttgtctcctgatgtttatcaagagatggaagccagccgccacaaagtaatctctggcactactctaggctatttgtcacccaaagatatgaaccaaccttcaagctctttcttcagtatatctcccacatcgaatagttcagctacaattgccagggaactccttatgaatggaacatcttctacagctgaagccataggtttaaaaggaagttctcctactcccccttgttctccagtacaaccttcaaaacaactggaatatttagcaaggattcaaggctttcaggcagccttaagtgccttgaaacaattttctgaacaaggactggatccaatcgatggagcaatgaatatcgaaaaaggttctcttgaaaaacaagccaagcatctgagagagaaagcggacaataaccaggcacccccgggctccatcgctcaggactgcaagaaatcaaactcggccgtctagcagctcccagaacccgcggctgccaccgcatccttataaacctgtcagcacgcatgagggtgtctgtgttcagggaaatgaatgactaataccattatttgagtcttatgtgaagacaacactattctaacacgagagataatatacatggtactgtttattcaactggggaaaaataaaactttgagcatttcccttggaactcgagatcagatcataactcatttgcctagaggcagcagaaatctgatcctgctactggagcttaaaataacaagtaaagaaaagtgttagaaacaaagctaaaattttaacatgattaataatagagaagttgggtttggttctgttgttatgattgttttgtcgtggtgcttgtgttcagttatattctctctctctctcatttcaaatactgcttgacaattcgaaaatgaaccaatgatgtgctgtggaatgtgatggttgtcttcatatagagtcacatggtttctctttttatgcagatatttataatcttcatcctatatcagtaggaataactataaggtgcactacaaaaagatgtatgcaaacaaacatgttttaaatcaggtcagatatctgatgaaaaatacgaactaatgttaagagcaagtagtttcaacatactccaggaactgagaaacaaaacaaagcaattgtgggttttgagctccatatactcttagcaagtaagggggcgtcttgcccctatatatcatcttcccggattccactccctgttgtgggaatcgcgcccacccccatccgtgtgttgtagccactcacggtttgcatcaagagtgttttttgtaactgcctctggacttgggacagtgagtaggatcaaaaataaataatgtacatgacggggaagggaaaaacctgttggagttgcttccagccagccacgctccgggccagcatgttggaatccagcgtggagcagatgcagtaaaaatgtggttggtttctgtgtgaagcgctgttgttgttcttttgttctctcactctcatcttttaaatatcacctccgtgaaacccatccgaaaggccaccacccggcctagtcactgcccagcagtgggattagagaatggataggctgtacctgagaaactgcagagccgcctcctgggtgactcgggccgggttcctggccaacgtcatcgcattgttcaggctttctccttattgatttgcaaacattgtgcaatgagaaaacactacatggtctaactgctcgacccaacatgacaataggaatataattatgtaagatttcacaagcaaaaccaccacaaatcatgatctggctgactcacacgcgactggagaataaacaaacagcaacataaggaa

SEQ ID NO: 18693 - protein, 570 aa, Homo sapiens
MANPKEKTAMCLVNELARFNRVQPQYKLLNERGPAHSKMFSVQLSLGEQTWESEGSSIKKAQQAVANKALTESTLPKPVQKPPKSNVNNNPGSITPTVELNGLAMKRGEPAIYRPLDPKPFPNYRANYNFRGMYNQRYHCPVPKIFYVQLTVGNNEFFGEGKTRQAARHNAAMKALQALQNEPIPERSPQNGESGKDVDDDKDANKSEISLVFEIALKRNMPVSFEVIKESGPPHMKSFVTRVSVGEFSAEGEGNSKKLSKKRAATTVLQELKKLPPLPVVEKPKLFFKKRPKTIVKAGPEYGQGMNPISRLAQIQQAKKEKEPDYVLLSERGMPRRREFVMQVKVGNEVATGTGPNKKIAKKNAAEAMLLQLGYKASTNLQDQLEKTGENKGWSGPKPGFPEPTNNTPKGILHLSPDVYQEMEASRHKVISGTTLGYLSPKDMNQPSSSFFSISPTSNSSATIARELLMNGTSSTAEAIGLKGSSPTPPCSPVQPSKQLEYLARIQGFQAALSALKQFSEQGLDPIDGAMNIEKGSLEKQAKHLREKADNNQAPPGSIAQDCKKSNSAV

SEQ ID NO: 18694 - DNA, 1254 bp, Homo sapiens
tctgacattagcccctgtgcagatgactttccatgctattggaagctccattgaagccagccatgatcaggcagccttaagtgccttgaaacaattttctgaacaaggactggatccaatcgatggagcaatgaatatcgaaaaaggttctcttgaaaaacaagccaagcatctgagagagaaagcggacaataaccaggcacccccgggctccatcgctcaggactgcaagaaatcaaactcggccgtctagcagctcccagaacccgcggctgccaccgcatccttataaacctgtcagcacgcatgagggtgtctgtgttcagggaaatgaatgactaataccattatttgagtcttatgtgaagacaacactattctaacacgagagataatatacatggtactgtttattcaactggggaaaaataaaactttgagcatttcccttggaactcgagatcagatcataactcatttgcctagaggcagcagaaatctgatcctgctactggagcttaaaataacaagtaaagaaaagtgttagaaacaaagctaaaattttaacatgattaataatagagaagttgggtttggttctgttgttatgattgttttgtcgtggtgcttgtgttcagttatattctctctctctctcatttcaaatactgcttgacaattcgaaaatgaaccaatgatgtgctgtggaatgtgatggttgtcttcatatagagtcacatggtttctctttttatgcagatatttataatcttcatcctatatcagtaggaataactataaggtgcactacaaaaagatgtatgcaaacaaacatgttttaaatcaggtcagatatctgatgaaaaatacgaactaatgttaagagcaagtagtttcaacatactccaggaactgagaaacaaaacaaagcaattgtgggttttgagctccatatactcttagcaagtaagggggcgtcttgcccctatatatcatcttcccggattccactccctgttgtgggaatcgcgcccacccccatccgtgtgttgtagccactcacggtttgcatcaagagtgttttttgtaactgcctctggacttgggacagtgagtaggatcaaaaataaataatgtacatgacggggaagggaaaaacctgttggagttgcttccagccagccacgctccgggccagcatgttggaatccagcgtggagcagatgcagtaaaaatgtggttggtttctgtgtg

SEQ ID NO: 18695 - protein, 76 aa, Homo sapiens [sequence omitted]

SEQ ID NO: 18696 - DNA, 2886 bp, Homo sapiens
gggggcggggagcccgaggggtggaagccggcggcggccgagcggggtcagttctctgtagtgtttgccaatgttggagccgtctgcaaagtgtccccggcaagaagaggctgcctaccacaaggactttagcttactttttaaagattgaagaaaaaaaagaagacagaaaaagaagaactcaaagatacacaaagtaatttgaaccaaggctcagaagtttttggagccgtgagggatacagcagtttggtcaatattgtcttaacatgcttcaaataaatcagatgttctcagtgcagctgagtcttggtgagcagacatgggaatccgaaggcagcagtataaagaaggctcagcaggctgttgccaataaagctttgactgaatctacgcttcccaaaccagttcagaagccacccaaaagtaatgttaacaataacccaggcagtataactccaactgtggaactgaatgggcttgctatgaaaaggggagagcctgccatctacaggccattagatccaaagccattcccaaattatagagctaattacaactttcggggcatgtacaatcagaggtatcattgcccagtgcctaagatcttttatgttcagctcactgtaggaaataatgaattttttggggaaggaaagactcgacaagctgctagacacaatgctgcaatgaaagccctccaagcactgcagaatgaacctattccagaaagatctcctcagaatggtgaatcaggaaaggatgtggatgatgacaaagatgcaaataagtctgagatcagcttagtgtttgaaattgctctgaagcgaaatatgcctgtcagttttgaggttattaaagaaagtggaccaccacatatgaaaagctttgttactcgagtgtcagtaggagagttctctgcagaaggagaaggaaatagcaaaaaactctccaagaagcgcgctgcgaccaccgtcttacaggagcttaaaaaacttccacctcttcctgtggtggaaaagccaaaactattttttaaaaaacgccctaaaacaatagtaaaggccggaccagaatatggccaagggatgaaccctattagccgcctggcgcaaattcaacaggccaaaaaggaaaaggagccggattatgttttgctttcagaaagaggaatgcctcgacgtcgagaatttgtgatgcaggtgaaggtaggcaatgaagttgctacaggaacaggacctaataaaaagatagccaaaaaaaatgctgcagaagcaatgctgttacaacttggttataaagcatccactaatcttcaggatcaacttgagaagacaggggaaaacaaaggatggagtggtccaaagcctgggtttcctgaaccaacaaataatactccaaaaggaattcttcatttgtctcctgatgtttatcaagagatggaagccagccgccacaaagtaatctctggcactactctaggctatttgtcacccaaagatatgaaccaaccttcaagctctttcttcagtatatctcccacatcgaatagttcagctacaattgccagggaactccttatgaatggaacatcttctacagctgaagccataggtttaaaaggaagttctcctactcccccttgttctccagtacaaccttcaaaacaactggaatatttagcaaggattcaaggctttcaggcagccttaagtgccttgaaacaattttctgaacaaggactggatccaatcgatggagcaatgaatatcgaaaaaggttctcttgaaaaacaagccaagcatctgagagagaaagcggacaataaccaggcacccccgggctccatcgctcaggactgcaagaaatcaaactcggccgtctagcagctcccagaacccgcggctgccaccgcatccttataaacctgtcagcacgcatgagggtgtctgtgttcagggaaatgaatgactaataccattatttgagtcttatgtgaagacaacactattctaacacgagagataatatacatggtactgtttattcaactggggaaaaataaaactttgagcatttcccttggaactcgagatcagatcataactcatttgcctagaggcagcagaaatctgatcctgctactggagcttaaaataacaagtaaagaaaagtgttagaaacaaagctaaaattttaacatgattaataatagagaagttgggtttggttctgttgttatgattgttttgtcgtggtgcttgtgttcagttatattctctctctctctcatttcaaatactgcttgacaattcgaaaatgaaccaatgatgtgctgtggaatgtgatggttgtcttcatatagagtcacatggtttctctttttatgcagatatttataatcttcatcctatatcagtaggaataactataaggtgcactacaaaaagatgtatgcaaacaaacatgttttaaatcaggtcagatatctgatgaaaaatacgaactaatgttaagagcaagtagtttcaacatactccaggaactgagaaacaaaacaaagcaattgtgggttttgagctccatatactcttagcaagtaagggggcgtcttgcccctatatatcatcttcccggattccactccctgttgtgggaatcgcgcccacccccatccgtgtgttgtagccactcacggtttgcatcaagagtgttttttgtaactgcctctggacttgggacagtgagtaggatcaaaaataaataatgtacatgacggggaagggaaaaacctgttggagttgcttccagccagccacgctccgggccagcatgttggaatccagcgtggagcagatgcagtaaaaatgtggttggtttctgtgtg

SEQ ID NO: 18697 - protein, 538 aa, Homo sapiens; identical to SEQ ID NO: 18691

SEQ ID NO: 18698 - DNA, 3060 bp, Homo sapiens
gcggcgggagcgccggggaggcgggcggaggcgggcggaggcggggggcggggagcccgaggggtggaagccggcggcggccgagcggggtcagttctctgtagtgtttgccaatgttggagccgtctgcaaagtgtccccggcaagaagaggctgcctaccacaaggactttagcttactttttaaagattgaagaaaaaaaagaagacagaaaaagaagaactcaaagatacacaaagtaatttgaaccaaggctcagaagtttttggagccgtgagggatacagcagtttggtcaatattgtcttaacatgcttcaaataaatcagcttctctccaagataaaatggcaaacccaaaagagaaaactgcaatgtgtctggtaaatgagttagcccgtttcaatagagtccaaccccagtataaacttctgaatgaaagagggcctgctcattcaaagatgttctcagtgcagctgagtcttggtgagcagacatgggaatccgaaggcagcagtataaagaaggctcagcaggctgttgccaataaagctttgactgaatctacgcttcccaaaccagttcagaagccacccaaaagtaatgttaacaataacccaggcagtataactccaactgtggaactgaatgggcttgctatgaaaaggggagagcctgccatctacaggccattagatccaaagccattcccaaattatagagctaattacaactttcggggcatgtacaatcagaggtatcattgcccagtgcctaagatcttttatgttcagctcactgtaggaaataatgaattttttggggaaggaaagactcgacaagctgctagacacaatgctgcaatgaaagccctccaagcactgcagaatgaacctattccagaaagatctcctcagaatggtgaatcaggaaaggatgtggatgatgacaaagatgcaaataagtctgagatcagcttagtgtttgaaattgctctgaagcgaaatatgcctgtcagttttgaggttattaaagaaagtggaccaccacatatgaaaagctttgttactcgagtgtcagtaggagagttctctgcagaaggagaaggaaatagcaaaaaactctccaagaagcgcgctgcgaccaccgtcttacaggagcttaaaaaacttccacctcttcctgtggtggaaaagccaaaactattttttaaaaaacgccctaaaacaatagtaaaggccggaccagaatatggccaagggatgaaccctattagccgcctggcgcaaattcaacaggccaaaaaggaaaaggagccggattatgttttgctttcagaaagaggaatgcctcgacgtcgagaatttgtgatgcaggtgaaggtaggcaatgaagttgctacaggaacaggacctaataaaaagatagccaaaaaaaatgctgcagaagcaatgctgttacaacttggttataaagcatccactaatcttcaggatcaacttgagaagacaggggaaaacaaaggatggagtggtccaaagcctgggtttcctgaaccaacaaataatactccaaaaggaattcttcatttgtctcctgatgtttatcaagagatggaagccagccgccacaaagtaatctctggcactactctaggctatttgtcacccaaagatatgaaccaaccttcaagctctttcttcagtatatctcccacatcgaatagttcagctacaattgccagggaactccttatgaatggaacatcttctacagctgaagccataggtttaaaaggaagttctcctactcccccttgttctccagtacaaccttcaaaacaactggaatatttagcaaggattcaaggctttcaggcagccttaagtgccttgaaacaattttctgaacaaggactggatccaatcgatggagcaatgaatatcgaaaaaggttctcttgaaaaacaagccaagcatctgagagagaaagcggacaataaccaggcacccccgggctccatcgctcaggactgcaagaaatcaaactcggccgtctagcagctcccagaacccgcggctgccaccgcatccttataaacctgtcagcacgcatgagggtgtctgtgttcagggaaatgaatgactaataccattatttgagtcttatgtgaagacaacactattctaacacgagagataatatacatggtactgtttattcaactggggaaaaataaaactttgagcatttcccttggaactcgagatcagatcataactcatttgcctagaggcagcagaaatctgatcctgctactggagcttaaaataacaagtaaagaaaagtgttagaaacaaagctaaaattttaacatgattaataatagagaagttgggtttggttctgttgttatgattgttttgtcgtggtgcttgtgttcagttatattctctctctctctcatttcaaatactgcttgacaattcgaaaatgaaccaatgatgtgctgtggaatgtgatggttgtcttcatatagagtcacatggtttctctttttatgcagatatttataatcttcatcctatatcagtaggaataactataaggtgcactacaaaaagatgtatgcaaacaaacatgttttaaatcaggtcagatatctgatgaaaaatacgaactaatgttaagagcaagtagtttcaacatactccaggaactgagaaacaaaacaaagcaattgtgggttttgagctccatatactcttagcaagtaagggggcgtcttgcccctatatatcatcttcccggattccactccctgttgtgggaatcgcgcccacccccatccgtgtgttgtagccactcacggtttgcatcaagagtgttttttgtaactgcctctggacttgggacagtgagtaggatcaaaaataaataatgtacatgacggggaagggaaaaacctgttggagttgcttccagccagccacgctccgggccagcatgttggaatccagcgtggagcagatgcagtaaaaatgtggttggtttctgtgtg

SEQ ID NO: 18699 - protein, 570 aa, Homo sapiens; identical to SEQ ID NO: 18693

SEQ ID NO: 18700 - DNA, 2149 bp, Homo sapiens
taggacccccaaagataccaaagttcatggacgctcaagtcccttatataaaatgttgtagtatttacatataacctacacacatcctcccttatactttaaatcatgtctagatgccttataatacctaatataatgtaaatgctatataaataatggttataccatattgcttttttgtggttttttttcaattcttttttaatatttttgatatttggatgcatagcccatggatatggagggcccaactgtgtgttttcccttatttttaatttgtcattgaaacataacttactgtgttgcctctgagaccaaatgttcatgtaggctattaaacaaatgtataaaaccataataaattacttagactacaatgagcaaaacacatttgtgggtttggtcagcagatactgctctgatttgccattaaaatcttaaaaattcttaaaaagctctcttgaatttgacctctactaccttccaaggaccttggaaagacttaagtatgtgttagaactctcttgaaggcttggtcttcctttagtgacattaacactcaggtttgttattccagtgggcagccccagttcatgcaaactgacctgttgtgtctggtgtccttagactttgatatgcaggccaaagtccaagggatatgcaaacataacacacacctgtacttccataaaaaccagcagaattgtagatcagctcattttactgaaattttaaaccctgtaaaaaaaaaatactatgtttgaagaaagaaatcctggtgcatataaaaactacaatgagtaacagtaatacaggtaagaatcaagcaggccttgagcaaaacagtccattattactgcgtaaactatgttgctatgatacttattttgagcctttatgcaccagcacatacatagtaagacacacaagatagttcaacaaaatctaagtaatatacaaacactgtaagagcttttccaaccaaagaaactttaatgtagatctgaaatgagccatcatgatacagaaaaagatgattatcatttcgtgtcctttccaagtagaactatctgataaccttttctgtttgtatcagaagagatttcaactcaacatgaaaattctactacttggaattatttgaaaaatcaagtatttgaaggaaaaaattatttttcatctaaagatgcattacatttccttttgctagaaacgattgacaatgatgtaatttttcctgacatataattaattatggtactcttcaggtggatggcagctgtatacctacactcattccaagtcatgttgaagtgagtccagcatttccctttctccagcatccagctatatctaaggagatttttttttccccacaaatgacagtggctgaaatttcatatgtattgttctcttctcacccaaggcaactcttaagaaagaacagtatgtggaatgttgcatgtaaaagatttttgcatactcaaaaaattgctctgacataacaggggcatgcatttaggggatatatggataaactagggaggaaactgacagttattgatggactcacatatcccatagtgaagtaggcattacatatattatttcagaatacctggtatgtttttgcctacaaatcttttatttgattttgaagaaagctattgtataatgtttgaagaccagtccctgtaagtaggactaatgtgtggtggtggcccatagtcttctggatattggtttgtttttgtcatagatttcattaataaatttatttctgccctcaactatatatacaactgagtaagccatttaagaattctgactccttggctgggcatggtggctcatgcctgtaatcccagtactttgggaggccaaggcagccagatcacttgaggtcaggagtttgagaccaacctggccaacatggtgaaactctgtctctaccaaaaaaaaaaaaaaaaaaaaaaagaaaaccaaacaaaaattagcatcctggctaacacggtgaaaccccgtctctactaaaaatacaaaaaattagccaggcatggtggcgggcgcctggagtcccagctactagggaggctgaggcaacagaatggtgtgaacccaagaggcggagcttgcagtgagccaagat

SEQ ID NO: 18701 - protein, 33 aa, Homo sapiens
MVKLCLYQKKKKKKKENQTKISILANTVKPRLY

SEQ ID NO: 18702 - DNA, 4105 bp, Homo sapiens
gggggcggggagcccgaggggtggaagccggcggcggccgagcggggtcagttctctgtagtgtttgccaatgttggagccgtctgcaaagtgtccccggcaagaagaggctgcctaccacaaggactttagcttactttttaaagattgaagaaaaaaaagaagacagaaaaagaagaactcaaagatacacaaagtaatttgaaccaaggctcagaagtttttggagccgtgagggatacagcagtttggtcaatattgtcttaacatgcttcaaataaatcagatgttctcagtgcagctgagtcttggtgagcagacatgggaatccgaaggcagcagtataaagaaggctcagcaggctgttgccaataaagctttgactgaatctacgcttcccaaaccagttcagaagccacccaaaagtaatgttaacaataacccaggcagtataactccaactgtggaactgaatgggcttgctatgaaaaggggagagcctgccatctacaggccattagatccaaagccattcccaaattatagagctaattacaactttcggggcatgtacaatcagaggtatcattgcccagtgcctaagatcttttatgttcagctcactgtaggaaataatgaattttttggggaaggaaagactcgacaagctgctagacacaatgctgcaatgaaagccctccaagcactgcagaatgaacctattccagaaagatctcctcagaatggtgaatcaggaaaggatgtggatgatgacaaagatgcaaataagtctgagatcagcttagtgtttgaaattgctctgaagcgaaatatgcctgtcagttttgaggttattaaagaaagtggaccaccacatatgaaaagctttgttactcgagtgtcagtaggagagttctctgcagaaggagaaggaaatagcaaaaaactctccaagaagcgcgctgcgaccaccgtcttacaggagcttaaaaaacttccacctcttcctgtggtggaaaagccaaaactattttttaaaaaacgccctaaaacaatagtaaaggccggaccagaatatggccaagggatgaaccctattagccgcctggcgcaaattcaacaggccaaaaaggaaaaggagccggattatgttttgctttcagaaagaggaatgcctcgacgtcgagaatttgtgatgcaggtgaaggtaggcaatgaagttgctacaggaacaggacctaataaaaagatagccaaaaaaaatgctgcagaagcaatgctgttacaacttggttataaagcatccactaatcttcaggatcaacttgagaagacaggggaaaacaaaggatggagtggtccaaagcctgggtttcctgaaccaacaaataatactccaaaaggaattcttcatttgtctcctgatgtttatcaagagatggaagccagccgccacaaagtaatctctggcactactctaggctatttgtcacccaaagatatgaaccaaccttcaagctctttcttcagtatatctcccacatcgaatagttcagctacaattgccagggaactccttatgaatggaacatcttctacagctgaagccataggtttaaaaggaagttctcctactcccccttgttctccagtacaaccttcaaaacaactggaatatttagcaaggattcaaggctttcaggtatgaattaaaagcaaaaacaaaaaacaaaacaattcattagcctcagattcttcatctgtatacatcacaaggctcattcttgcctgctagtatggcctacatgccacttacgttttaagttatttaggaacacaaaggacagacaaaaaagccatatgcacatgcctcattttctcttatttttgatctatctagtaattcttttgctgcctgtctcttctccattttccttcttcttttttaagcatttttcatattcttcactgtcttctatttggtcttgattaggtgcatctatctcttcgctctgtcttccacaaacaaaaattctgccttcagacatttggtgttagtatttcacactcagttctccctttttttacataaggattgagtttctttttatgatgattttacctttatagcaattttgaattttgcattctattgctagtattgattcaggtacaccattaagatacaacattctagaagtctattaccttaggagttaattaaacatgatatttgaagaataatgaaatgctttatagttgtttgaggcataacaatgtgtatttgttttactggatcatgttttgaactgactagggagggtagcacctgcctcagatagtaccaacaattctgtttcactgggtagtctaaaactagcttatagtttaacttaacttgttgtgtatgtgaatttagggatggaaactttttttcccctatttattctttgtttccttctgggaaaaaaccccacaaaaatcagcactcctttatggatacattggagcttttgaaagaattgtaaactctaggaaggggaaatatctgtgtcttgatttcttagttgccttgaaaatcatgtactgaactgtaaccgctaacttgactggatgaactagtttgcttgtgtgtagagagtgtattgcttcctcagatttcactgttttcatctccttttccatcttagtctttattccttaagaccaaaaactgtaatatcctttagaaatgctctagaagatctgtattgtgtagaatgatcatgtatttataaatattttacaagtttagattataaaatgaaaaagaaggtcatgtgttttggggggtattttgcatgttcggatttttttttcacttcaccgaacccttctgattctttcaaactattgccaggtagttgttagtgtttctaattggactcttaatatgaacttcaagaagctgttaccagttatcggctctgtcatctgaaattttaaccacttaatttaaagttacaattttagaatttgtttttgttgttttaccttaagaaacacaataaatcactgtttaaaaaagatctcaatttatataaagtactggaaaaaagctaagtaatttttagttctatctataatctccgtaggatgaattagaaataaattgtgatgaaaagaaattaactgcttatttatgaatctaatcatttagaaatgtctgagagtaacactgcattcttatagaaacaaagcacaaattgcattcaagctctgaattgattttttgcttggagctgttgttacagtagctgtaattttgctaccagaatgtcttaattttttaaatttgtttttatttctaagctcttggcaatgacaataattataattttaacatatcttcactgtagtcaacatgtagagtctgcttccctcattattgcattgctaaggcctttttaaaaagcttatgcttacataatatactcttttttatggacacgttatatgtttccaaatctgtgtattgtgatttttacatactaatgaatataaacaggtgattttaaaatattactgtgcttctttggttgaatgagctggtattgatgtaaaatactctgtcattgatggaccactacctgcagctaagcagtgagcagaatctccgggaaatgacttagtctggccacatgcatagcccatcttcataatgtcgcagcagaaggttctttgtggttaaaagttttaaagcctatttctttataggtaaccctctcaggtatatttacctggtagaaaaacatgtagattgtttctattacttaaatgttttaattggactgtagtttagaaattacaggaccagcttgttacagattatacactattctgttacttttatttctgaaacttaaaaacaataaattctttttctgtgtttctaggttagaacttttttattttattgcacactgaacagatactgttgcttattgaatattgtgtaaacccttctttggctttccttgcccattgcaatttgatttaagcctactagagccattgtatgtgacagctatattgtattacaaagtaaaaatatatgagtgtattg

SEQ ID NO: 18703 - protein, 479 aa, Homo sapiens
MLQINQMFSVQLSLGEQTWESEGSSIKKAQQAVANKALTESTLPKPVQKPPKSNVNNNPGSITPTVELNGLAMKRGEPAIYRPLDPKPFPNYRANYNFRGMYNQRYHCPVPKIFYVQLTVGNNEFFGEGKTRQAARHNAAMKALQALQNEPIPERSPQNGESGKDVDDDKDANKSEISLVFEIALKRNMPVSFEVIKESGPPHMKSFVTRVSVGEFSAEGEGNSKKLSKKRAATTVLQELKKLPPLPVVEKPKLFFKKRPKTIVKAGPEYGQGMNPISRLAQIQQAKKEKEPDYVLLSERGMPRRREFVMQVKVGNEVATGTGPNKKIAKKNAAEAMLLQLGYKASTNLQDQLEKTGENKGWSGPKPGFPEPTNNTPKGILHLSPDVYQEMEASRHKVISGTTLGYLSPKDMNQPSSSFFSISPTSNSSATIARELLMNGTSSTAEAIGLKGSSPTPPCSPVQPSKQLEYLARIQGFQV

SEQ ID NO: 18704 - DNA, 2204 bp, Homo sapiens
ggggagcccgaggggtggaagccggcggcggccgagcggggtcagttctctgtagtgtttgccaatgttggagccgtctgcaaagtgtccccggcaagaagaggctgcctaccacaaggactttagcttactttttaaagattgaagaaaaaaaagaagacagaaaaagaagaactcaaagatacacaaagtaatttgaaccaaggctcagaagtttttggagccgtgagggatacagcagtttggtcaatattgtcttaacatgcttcaaataaatcagatgttctcagtgcagctgagtcttggtgagcagacatgggaatccgaaggcagcagtataaagaaggctcagcaggctgttgccaataaagctttgactgaatctacgcttcccaaaccagttcagaagccacccaaaagtaatgttaacaataacccaggcagtataactccaactgtggaactgaatgggcttgctatgaaaaggggagagcctgccatctacaggccattagatccaaagccattcccaaattatagagctaattacaactttcggggcatgtacaatcagagatgaagagttacctaagtcagtgttataagatgttccatggtaaaagggatttgaagacaaattttggaaatgctgcatactgtatctctcttgaagactcctaaaggtgtcatgaagaaaactgtttacctaagtggttcctaacactgactgaacatcaggctttcctgggcagctttaaaaattctgatgcccagactttatgtggactaattaaatcagaatttctggttgcagagcttgaaccgcactgttttttaaaacttccccaagtaattctatgtccagtcatttaaatactggtccccacaacccaaaacacattaccctctattaacatcaaagattatgagatggtttgaatagtcatagaacttttgaaagaagtaaagaagaagggaagaattacagttaaccacactccttaaggataattgttctggacagctagcttccccacattgctgagggttcacttttttttggaacctaaaactttacttagttcagtaattttggatagaaatatttctaaaagttatggcatatattttttatatccttaaatagaaaatgccacaattcttagcatgaagaatccttgctgttgactcattatcaaccttataaacaataagtattacaagcctcatgagatatgtacatggtttgtccttataccagataatcctagacatctgtttctagagtacccaagtgtgcttttagttactttccaaatcattgttgtcagtcagattgtcatcttatttcttgtttttgtcagtgcacctttgcatattgcttgctcctttctttgatgcttttcaattgctattatcttgaaaaccgatattattgtttgaatttggggcaaagtaagagtagcagggctttaattacgccctaagatgtccccttaactgtggaaaacatcgagttttatctagttggtgaatttttttacttcagaatttatttttttctgtcataaattttgctaaggatctgcattttgagtagaatgaagtggccagatagttgaataatggtttggtgaatatctatatgtatatatgtatgtgtatgtgtgttacacatacatatttaatgacatgaagtactttggttgcttggaattggacagaaataacagtttttttttttttttgggacagagtcttgctctgtcacctaggctggagtgcaatggcgcgatctctgctcactgcaacttccacctcccaggttcaagtgattctcctgccgcagcctcccgagtagctgggattgcaggcgcctgccagcatgcccgccagcacgcctggctaatttttttttttgtatttttagtagagatggggtttcactatgttggccaggctggtcttggaactcctgatctcgtgatctgtgtgccttggcctcccaaagtgctgggattacaggcgtgagccaccgcgcctggccagaaataacagttttaataaatttcatgaaatcactttcttgtatgttaaaggaaacagaaagggttcatttgtgcatggtttagtctttcttttgaatgtggaagtttttcttcttatttgtgtgtctaaaaaaattaaaaagtgaaacattttcc

SEQ ID NO: 18705 - protein, 105 aa, Homo sapiens
MLQINQMFSVQLSLGEQTWESEGSSIKKAQQAVANKALTESTLPKPVQKPPKSNVNNNPGSITPTVELNGLAMKRGEPAIYRPLDPKPFPNYRANYNFRGMYNQR

SEQ ID NO: 18706 - DNA, 1110 bp, Homo sapiens
gcggcgggagcgccggggaggcgggcggaggcgggcggaggcggggggcggggagcccgaggggtggaagccggcggcggccgagcggggtcagttctctgtagtgtttgccaatgttggagccgtctgcaaagtgtccccggcaagaagaggctgcctaccacaaggactttagcttactttttaaagattgaagaaaaaaaagaagacagaaaaagaagaactcaaagatacacaaagtaatttgaaccaaggctcagaagtttttggagccgtgagggatacagcagtttggtcaatattgtcttaacatgcttcaaataaatcagcttctctccaagataaaatggcaaacccaaaagagaaaactgcaatgtgtctggtaaatgagttagcccgtttcaatagagtccaaccccagtataaacttctgaatgaaagagggcctgctcattcaaagatgttctcagtgcagctgagtcttggtgagcagacatgggaatccgaaggcagcagtataaagaaggctcagcaggctgttgccaataaagctttgactgaatctacgcttcccaaaccagttcagaagccacccaaaagtaatgttaacaataacccaggcagtataactccaactgtggaactgaatgggcttgctatgaaaaggggagagcctgccatctacaggccattagatccaaagccattcccaaattatagagctaattacaactttcggggcatgtacaatcagagatgaagagttacctaagtcagtgttataagatgttccatggtaaaagggatttgaagacaaattttggaaatgctgcatactgtatctctcttgaagactcctaaaggtgtcatgaagaaaactgtttacctaagtggttcctaacactgactgaacatcaggctttcctgggcagctttaaaaattctgatgcccagactttatgtggactaattaaatcagaatttctggttgcagagcttgaaccgcactgttttttaaaacttccccaagtaattctatgtccagtcatttaaatactggtccccacaacccaaaacacattaccctctattaacatcaaagattatgag

SEQ ID NO: 18707 - protein, 137 aa, Homo sapiens
MANPKEKTAMCLVNELARFNRVQPQYKLLNERGPAHSKMFSVQLSLGEQTWESEGSSIKKAQQAVANKALTESTLPKPVQKPPKSNVNNNPGSITPTVELNGLAMKRGEPAIYRPLDPKPFPNYRANYNFRGMYNQR

SEQ ID NO: 18708 - DNA, 814 bp, Homo sapiens
ggggagcccgaggggtggaagccggcggcggccgagcggggtcagttctctgtagtgtttgccaatgttggagccgtctgcaaagtgtccccggcaagaagaggctgcctaccacaaggactttagcttactttttaaagattgaagaaaaaaaagaagacagaaaaagaagaactcaaagatacacaaagtaatttgaaccaaggctcagaagtttttggagccgtgagggatacagcagtttggtcaatattgtcttaacatgcttcaaataaatcagatgttctcagtgcagctgagtcttggtgagcagacatgggaatccgaaggcagcagtataaagaaggctcagcaggctgttgccaataaagctttgactgaatctacgcttcccaaaccagttcagaagccacccaaaagtaatgttaacaataacccaggcagtataactccaactgtggaactgaatgggcttgctatgaaaaggggagagcctgccatctacaggccattagatccaaagccattcccaaattatagagctaattacaactttcggggcatgtacaatcagagatgaagagttacctaagtcagtgttataagatgttccatggtaaaagggatttgaagacaaattttggaaatgctgcatactgtatctctcttgaagactcctaaaggtgtcatgaagaaaactgtttacctaagtggttcctaacactgactgaacatcaggctttcctgggcagctttaaaaattctgatgcccagactttatgtggactaattaaatcagaatttctggttgcag

SEQ ID NO: 18709 - protein, 105 aa, Homo sapiens; identical to SEQ ID NO: 18705

SEQ ID NO: 18710 - DNA, 908 bp, Homo sapiens
gtttgccaatgttggagccgtctgcaaagtgtccccggcaagaagtttttggagccgtgagggatacagcagtttggtcaatattgtcttaacatgcttcaaataaatcagattgaagaactcccttcaggatttcttgtagaacaagtctggtgttgatgaaatccttcggcttttgtttgtctgggaaagactttatctctccttcataattaaaggatattttcaccagatatactattctagatgttctcagtgcagctgagtcttggtgagcagacatgggaatccgaaggcagcagtataaagaaggctcagcaggctgttgccaataaagctttgactgaatctacgcttcccaaaccagttcagaagccacccaaaagtaatgttaacaataacccaggcagtataactccaactgtggaactgaatgggcttgctatgaaaaggggagagcctgccatctacaggccattagatccaaagccattcccaaattatagagctaattacaactttcggggcatgtacaatcagagatggcaacacttgaatggattacagggactctggagccaaagatccaaggagatgtcttttccttgtcagaacccagattaatcattagcttcttaaggcagggaatgaaaggtgaagtccaagaaacagatgaagagttacctaagtcagtgttataagatgttccatggtaaaagggatttgaagacaaattttggaaatgctgcatactgtatctctcttgaagactcctaaaggtgtcatgaagaaaactgtttacctaagtggttcctaacactgactgaacatcaggctttcctgggcagctttaaaaattctgatgcccagactttatgtggactaattaaatcagaatttctggttgc

SEQ ID NO: 18711 - protein, 125 aa, Homo sapiens
MFSVQLSLGEQTWESEGSSIKKAQQAVANKALTESTLPKPVQKPPKSNVNNNPGSITPTVELNGLAMKRGEPAIYRPLDPKPFPNYRANYNFRGMYNQRWQHLNGLQGLWSQRSKEMSFPCQNPD

SEQ ID NO: 18712 - DNA, 793 bp, Homo sapiens
gggagcccgaggggtggaagccggcggcggccgagcggggtcagttctctgtagtgtttgccaatgttggagccgtctgcaaagtgtccccggcaagaagaggctgcctaccacaaggactttagcttactttttaaagattgaagaaaaaaaagaagacagaaaaagaagaactcaaagatacacaaagtaatttgaaccaaggctcagaagtttttggagccgtgagggatacagcagtttggtcaatattgtcttaacatgcttcaaataaatcagcttctctccaagataaaatggcaaacccaaaagagaaaactgcaatgtgtctggtaaatgagttagcccgtttcaatagagtccaaccccagtataaacttctgaatgaaagagggcctgctcattcaaaggcagtataactccaactgtggaactgaatgggcttgctatgaaaaggggagagcctgccatctacaggccattagatccaaagccattcccaaattatagagctaattacaactttcggggcatgtacaatcagagcctcacgtgatcaccactcagatcgagatacagaatgttcccaatcacctctgagagtttcctcagacctctttgtctttgacacatccttctcccagaaataatcactattttattatcatagactagtttttgcctgttgttgaactttttatatctagactcatacagtatttatgtgcatctggcttcttttactttgtataatgattttcttgtttggggattcatccatgttgcttatatc

SEQ ID NO: 18713 - protein, 41 aa, Homo sapiens
MKEGLLIQRQYNSNCGTEWACYEKGRACHLQAIRSKAIPKL

SEQ ID NO: 18714 - DNA, 1171 bp, Homo sapiens
ggggagcccgaggggtggaagccggcggcggccgagcggggtcagttctctgtagtgtttgccaatgttggagccgtctgcaaagtgtccccggcaagaagaggctgcctaccacaaggactttagcttactttttaaagattgaagaaaaaaaagaagacagaaaaagaagaactcaaagatacacaaagtaatttgaaccaaggctcagaagtttttggagccgtgagggatacagcagtttggtcaatattgtcttaacatgcttcaaataaatcagatgttctcagtgcagctgagtcttggtgagcagacatgggaatccgaaggcagcagtataaagaaggctcagcaggctgttgccaataaagctttgactgaatctacgcttcccaaaccagttcagaagccacccaaaagtaatgttaacaataacccaggcagtataactccaactgtggaactgaatgggcttgctatgaaaaggggagagcctgccatctacaggccattagatccaaagccattcccaaattatagagctaattacaactttcggggcatgtacaatcagaggtttgtatgtcttttttggttttgttcttaattattattttatccatgttataaaagtttctcacactcaaaagagtattttcattgtaaatctaattgaccttgggcattgtgcatggaatttagataaagcaggttcacaaggaatatttaaattaataacttaaagaaacccagttttcaggaactagttttttttttttttcccctaccccacaaacgtaaaagatctgaaggaactagtttttattgtgtcatgagggccctgtatttgttgcagggaagaccaagtcttaaagtcatttcacagtttatagtgttgactttctcattcatttaccaagcagagctcagtttttttcttgatttgtctaaatacattagtgaacatgaatgtttgtaatttatagggaaaaaagaaaaaatgtaaataatgtaatcccagaatttgccaccttttatattttcatgtactttacattctttttttctttgcatttaaatatatttaaccaagttgaagttgtcctttatatgcagtttttgtagtactttatgaaggtatgatagacatacagtaaaatgtacaaatctt

SEQ ID NO: 18715 - protein, 114 aa, Homo sapiens
MLQINQMFSVQLSLGEQTWESEGSSIKKAQQAVANKALTESTLPKPVQKPPKSNVNNNPGSITPTVELNGLAMKRGEPAIYRPLDPKPFPNYRANYNFRGMYNQRFVCLFWFCS

SEQ ID NO: 18716 - DNA, 383 bp, Homo sapiens
agggttccagtttctccacatcgtcctcaaaaccagttactgcccgtcttttgattctggccatcctagtaggctatattctatggctacaagagacatgagcagattacagagctccacacccagtcttggaaagaaaagtaactactactaagtagcagcaacttttaagagaaaagaatagagttcctggtgcttgtggcaagaagcaggaggaccttgaagccaatctgggcttgagaaagtggttcattcccccaaatacttcactcaatgatctacctaaatgtctgccgtctgccctcctttcccaccaatttccagtcaggcagcaatagccaacagcaatattaatagtaaaattaatagcagtagtaccagca

SEQ ID NO: 18717 - protein, 31 aa, Homo sapiens
MSAVCPPFPPISSQAAIANSNINSKINSSST

SEQ ID NO: 18718 - DNA, 3865 bp, Homo sapiens
ggggggatggttccatcatggcgtcaatgcagaaacgactacagaaagaactgttggctttgcaaaatgacccacctcctggaatgaccttaaatgagaagagtgttcaaaattcaattacacagtcatgtttactggtgaaaatattcctgttcatcctcatgtttatagcaatggtcatatctgtttatccattctaacagaagactggtccccagcgctctcagtccaatcagtttgtcttagcattattagcatgctttccagctgcaaggaaaagagacgaccaccggataattctttttatgtgcgaacatgtaacaagaatccaaagaaaacaaaatggtggtatcatgatgatacttgttgatgccactgttatcatcctcctagcagaagatagtcctactgagaaaatgagcactttgatcattcagtctttgaactttaacctttgactggaagtgacctataggcaatgaagactacttccttttactgcatttttactcgtgtgcattctgggcgcatgttgatcgctggttcagtccaggcaactgacatgcttttattagtcatacagtattaatgcaggtgtcaggaaatgtcaaatataattccattttttatttttatttttttaagcttttggaaaagctccaggtcctcatgtattgtgcaataacaatgacttccttggcggttttggtacgttcattgccggcaatgggcgttgtaacaggaaaagttttcattaactcctgccattcaatgattaatgcatgatagggcctatgaaatgaacttactggttatagtgggaatataaataaagtgagggatccaacattactttaaaagtcaccccaactgtttatatttggattctatgcactgtgatcctaaggttaacagcatgaattaacatgcgtctttaaaggactgtaatgaaagatcattgcatatttattgaattgtttatatctactgtcaagttgttttgacatggaagattttcaagtaacattggcagagaggtacagtatgttatccctatggtgaaaataaattaatttgttgtatatagttcctcaatctctgaagtaaaggtatgagtaatatagggtatgaatggtttaatcaaggctttattttggaagtaagaaaaatggcagtgatgattaaattgctgcagtccataatttgggcttgttatttgtacattaaagattttttccaagtaagttacactctgttaacttcctgctagccatcagcatgagccctactgcctaaacactatttcatttatttatgtttggaaaccccgtaaacatttttgtttgcaatcttgtttcttttgttataagtcaagtttgaatgttacaatacttttattgaaacttttgttaagttttttcttgtaaattttctttacttgtgagtatcatcttgtcctttaatcctgtaccctaaaataagaaatacatttttgacagaggcttaatgttttaacaaaagagtgtggacatttttattttaaaatttaggcaaaagtcactatcaaatggttgcttatttgtctcacacagccatatagtttttcctggagggttttgttttgttgttgttgaaaagactttgcttacagctagatgaaactttctatagaaaaaaaaaattgttgaaaggtccagttctcagtaccatgtgagttaatgatactacaactaagttctttttaaaaagtgattaatgtattttataaattaccttttcacatatgcaaaatctgtttctactacaatgttatttttactaatgccttattgttgcactctttttgaaatatcctgcagtgaatatatgaatcaatttgggcttaaaactgaaagccagttggctgaaaggtttgaaatacgtaccccagtaaaaccattcaatcaataattggtaaataatattttaaaattgtttttaatctgtatagatgacattttgtagctttgtacatgttgttaattaagggcatataattttacactcaaagtataattgctgaactcaggggtgggtagacttcaaaaatatgtctgctatagaaataacttgaaaaaaaaaattaaaaccgtggccagccaccaaattgtggacactgtttatatactgctagttaacaattaccacttttaaaaaattataaccgtttttgttctatcttgactagataaattctcacaatgatctctgtcagttttattagttggcctgtttaaccaagacagaaagtctttgaattactcatagttttaaactgcttttaatatgaaaattgcagctgtaaattatgtattttcatattttgcgtaactgctctacactactgtttgacttgatcttcttctgggggttagggagaaatctgtctccatattgctggttctcttaccaaaatgcttttataaagaaatgaccggtgacatttattcaccaaaggaattaatatactgagtcaaagattaacaatgctatactatagagtaataggtcatatatagcctcaattgagttttttatgacaatattttaacatacctctctctctacatataaataccataaagtaaactaaaatgacacagaggaaagtagaggaaaatgaaataatttcggtacatcttatggtttaaagagtagaaaataagatgaaatatcctaaaatataggagcacagacatttaaaattcataatcaggctaacaacactctcttgaatttaggaatcattgaaaactccttgcacttagatttaatttatatgttagttacattattaaaagtcataaggcatttatctgagtcattgctctacagagagcaattaatggcttgtaataataaaaagaatatttctctgtaatgcattgttgaaagacaaccagaatatcaagaaaatgtatataggaatatgctacttgcctcctccctgcatttcctcgtggggcactatttgcgacataggcctacagaattagactttcatacttagaagataaggtacactcttcttcttttatttatttatttatttatttttaggccattcttctggtttgccaaattctattaagacagtgatacatttgcttccttatttatgcatgcttagatcatgaacatgatgcccttcttttttttttttttctttggtcaagtagggattaatgccataggtttagagagaaggattgttttcagtttttaagagaattttttaaaaatacattttatggttctcttaaggaattaatattcacttctgaaggacttacttgtaatatataatttatcattttagccagcagggaaataaatcatttttaatccccagaagaaagtgctggaaatagcttctatatagtcagcagttcacctggagaaagatcttaattccttgttgttttgactaggaatatcaatatttggtataaaataactagaatagtttattaccttttccctcatgaaattttaaatatatgcaaatatatatatcattagattcctgtggtggataataatttcttcagattctaaaacaggtgtctagtgactgcttaattgtttccaagttgcatcaaagatgaattggtaaataatggaaatgagtagtgatatgaaaatggttatgtaactacatattacttgtttctggtaatcaagtcttattttttaaaagcctattgtttttcagaattgagatatttaaaacttgttataacttcttcctaaaaatagaagagaagaggaggtactgtgtgttacaaaaatttttttaaataaagaattcagtgtcactagttct

SEQ ID NO: 18719 - protein, 80 aa, Homo sapiens
MFTGENIPVHPHVYSNGHICLSILTEDWSPALSVQSVCLSIISMLSSCKEKRRPPDNSFYVRTCNKNPKKTKWWYHDDTC

SEQ ID NO: 18720 - DNA, 3534 bp, Homo sapiens
agaaacgactacagaaagaactgttggctttgcaaaatgacccacctcctggaatgaccttaaatgagaagagtgttcaaaattcaattacacagtcatgtttactggtgaaaatattcctgttcatcctcatgtttatagcaatggtcatatctgtttatccattctaacagaagactggtccccagcgctctcagtccaatcagtttgtcttagcattattagcatgctttccagctgcaaggaaaagggcaaagcagtttgtgggtacaaggccttctatgttcctgttacgcttaaagactatagaaagagacgaccaccggataattctttttatgtgcgaacatgtaacaagaatccaaagaaaacaaaatggtggtatcatgatgatacttgttgatgccactgttatcatcctcctagcagaagatagtcctactgagaaaatgagcactttgatcattcagtctttgaacttactggttatagtgggaatataaataaagtgagggatccaacattactttaaaagtcaccccaactgtttatatttggattctatgcactgtgatcctaaggttaacagcatgaattaacatgcgtctttaaaggactgtaatgaaagatcattgcatatttattgaattgtttatatctactgtcaagttgttttgacatggaagattttcaagtaacattggcagagaggtacagtatgttatccctatggtgaaaataaattaatttgttgtatatagttcctcaatctctgaagtaaaggtatgagtaatatagggtatgaatggtttaatcaaggctttattttggaagtaagaaaaatggcagtgatgattaaattgctgcagtccataatttgggcttgttatttgtacattaaagattttttccaagtaagttacactctgttaacttcctgctagccatcagcatgagccctactgcctaaacactatttcatttatttatgtttggaaaccccgtaaacatttttgtttgcaatcttgtttcttttgttataagtcaagtttgaatgttacaatacttttattgaaacttttgttaagttttttcttgtaaattttctttacttgtgagtatcatcttgtcctttaatcctgtaccctaaaataagaaatacatttttgacagaggcttaatgttttaacaaaagagtgtggacatttttattttaaaatttaggcaaaagtcactatcaaatggttgcttatttgtctcacacagccatatagtttttcctggagggttttgttttgttgttgttgaaaagactttgcttacagctagatgaaactttctatagaaaaaaaaaattgttgaaaggtccagttctcagtaccatgtgagttaatgatactacaactaagttctttttaaaaagtgattaatgtattttataaattaccttttcacatatgcaaaatctgtttctactacaatgttatttttactaatgccttattgttgcactctttttgaaatatcctgcagtgaatatatgaatcaatttgggcttaaaactgaaagccagttggctgaaaggtttgaaatacgtaccccagtaaaaccattcaatcaataattggtaaataatattttaaaattgtttttaatctgtatagatgacattttgtagctttgtacatgttgttaattaagggcatataattttacactcaaagtataattgctgaactcaggggtgggtagacttcaaaaatatgtctgctatagaaataacttgaaaaaaaaaattaaaaccgtggccagccaccaaattgtggacactgtttatatactgctagttaacaattaccacttttaaaaaattataaccgtttttgttctatcttgactagataaattctcacaatgatctctgtcagttttattagttggcctgtttaaccaagacagaaagtctttgaattactcatagttttaaactgcttttaatatgaaaattgcagctgtaaattatgtattttcatattttgcgtaactgctctacactactgtttgacttgatcttcttctgggggttagggagaaatctgtctccatattgctggttctcttaccaaaatgcttttataaagaaatgaccggtgacatttattcaccaaaggaattaatatactgagtcaaagattaacaatgctatactatagagtaataggtcatatatagcctcaattgagttttttatgacaatattttaacatacctctctctctacatataaataccataaagtaaactaaaatgacacagaggaaagtagaggaaaatgaaataatttcggtacatcttatggtttaaagagtagaaaataagatgaaatatcctaaaatataggagcacagacatttaaaattcataatcaggctaacaacactctcttgaatttaggaatcattgaaaactccttgcacttagatttaatttatatgttagttacattattaaaagtcataaggcatttatctgagtcattgctctacagagagcaattaatggcttgtaataataaaaagaatatttctctgtaatgcattgttgaaagacaaccagaatatcaagaaaatgtatataggaatatgctacttgcctcctccctgcatttcctcgtggggcactatttgcgacataggcctacagaattagactttcatacttagaagataaggtacactcttcttcttttatttatttatttatttatttttaggccattcttctggtttgccaaattctattaagacagtgatacatttgcttccttatttatgcatgcttagatcatgaacatgatgcccttcttttttttttttttctttggtcaagtagggattaatgccataggtttagagagaaggattgttttcagtttttaagagaattttttaaaaatacattttatggttctcttaaggaattaatattcacttctgaaggacttacttgtaatatataatttatcattttagccagcagggaaataaatcatttttaatccccagaagaaagtgctggaaatagcttctatatagtcagcagttcacctggagaaagatcttaattccttgttgttttgactaggaatatcaatatttggtataaaataactagaatagtttattaccttttccctcatgaaattttaaatatatgcaaatatatatatcattagattcctgtggtggataataatttcttcagattctaaaacaggtgtctagtgactgcttaattgtttccaagttgcatcaaagatgaattggtaaataatggaaatgagtagtgatatgaaaatggttatgtaactacatattacttgtttctggtaatcaagtcttattttttaaaagcctattgtttttcagaattgagatatttaaaacttgttataacttcttcctaaaaatagaagagaagaggaggtactgtgtgttacaaaaatttttttaaataaagaattcagtgtcacta

SEQ ID NO: 18721 - protein, 101 aa, Homo sapiens
MFTGENIPVHPHVYSNGHICLSILTEDWSPALSVQSVCLSIISMLSSCKEKGKAVCGYKAFYVPVTLKDYRKRRPPDNSFYVRTCNKNPKKTKWWYHDDTC

SEQ ID NO: 18722 - DNA, 3959 bp, Homo sapiens
ggcctcgccggtcttggggggatggttccatcatggcgtcaatgcagaaacgactacagaaagaactgttggctttgcaaaatgacccacctcctggaatgaccttaaatgagaagagtgttcaaaattcaattacacagtcatgtttactggtgaaaatattcctgttcatcctcatgtttatagcaatggtcatatctgtttatccattctaacagaagactggtccccagcgctctcagtccaatcagtttgtcttagcattattagcatgctttccagctgcaaggaaaagagacgaccaccggataattctttttatgtgcgaacatgtaacaagaatccaaagaaaacaaaatggtggtatcatgccatcatggattcgtagtcccgcaagtccctgttgatctagctgttacagatcatttgtttcttcaaaacgagggtattcaaagatgatacttgttgatgccactgttatcatcctcctagcagaagatagtcctactgagaaaatgagcactttgatcattcagtctttgaactttaacctttgactggaagtgacctataggcaatgaagactacttccttttactgcatttttactcgtgtgcattctgggcgcatgttgatcgctggttcagtccaggcaactgacatgcttttattagtcatacagtattaatgcaggtgtcaggaaatgtcaaatataattccattttttatttttatttttttaagcttttggaaaagctccaggtcctcatgtattgtgcaataacaatgacttccttggcggttttggtacgttcattgccggcaatgggcgttgtaacaggaaaagttttcattaactcctgccattcaatgattaatgcatgatagggcctatgaaatgaacttactggttatagtgggaatataaataaagtgagggatccaacattactttaaaagtcaccccaactgtttatatttggattctatgcactgtgatcctaaggttaacagcatgaattaacatgcgtctttaaaggactgtaatgaaagatcattgcatatttattgaattgtttatatctactgtcaagttgttttgacatggaagattttcaagtaacattggcagagaggtacagtatgttatccctatggtgaaaataaattaatttgttgtatatagttcctcaatctctgaagtaaaggtatgagtaatatagggtatgaatggtttaatcaaggctttattttggaagtaagaaaaatggcagtgatgattaaattgctgcagtccataatttgggcttgttatttgtacattaaagattttttccaagtaagttacactctgttaacttcctgctagccatcagcatgagccctactgcctaaacactatttcatttatttatgtttggaaaccccgtaaacatttttgtttgcaatcttgtttcttttgttataagtcaagtttgaatgttacaatacttttattgaaacttttgttaagttttttcttgtaaattttctttacttgtgagtatcatcttgtcctttaatcctgtaccctaaaataagaaatacatttttgacagaggcttaatgttttaacaaaagagtgtggacatttttattttaaaatttaggcaaaagtcactatcaaatggttgcttatttgtctcacacagccatatagtttttcctggagggttttgttttgttgttgttgaaaagactttgcttacagctagatgaaactttctatagaaaaaaaaaattgttgaaaggtccagttctcagtaccatgtgagttaatgatactacaactaagttctttttaaaaagtgattaatgtattttataaattaccttttcacatatgcaaaatctgtttctactacaatgttatttttactaatgccttattgttgcactctttttgaaatatcctgcagtgaatatatgaatcaatttgggcttaaaactgaaagccagttggctgaaaggtttgaaatacgtaccccagtaaaaccattcaatcaataattggtaaataatattttaaaattgtttttaatctgtatagatgacattttgtagctttgtacatgttgttaattaagggcatataattttacactcaaagtataattgctgaactcaggggtgggtagacttcaaaaatatgtctgctatagaaataacttgaaaaaaaaaattaaaaccgtggccagccaccaaattgtggacactgtttatatactgctagttaacaattaccacttttaaaaaattataaccgtttttgttctatcttgactagataaattctcacaatgatctctgtcagttttattagttggcctgtttaaccaagacagaaagtctttgaattactcatagttttaaactgcttttaatatgaaaattgcagctgtaaattatgtattttcatattttgcgtaactgctctacactactgtttgacttgatcttcttctgggggttagggagaaatctgtctccatattgctggttctcttaccaaaatgcttttataaagaaatgaccggtgacatttattcaccaaaggaattaatatactgagtcaaagattaacaatgctatactatagagtaataggtcatatatagcctcaattgagttttttatgacaatattttaacatacctctctctctacatataaataccataaagtaaactaaaatgacacagaggaaagtagaggaaaatgaaataatttcggtacatcttatggtttaaagagtagaaaataagatgaaatatcctaaaatataggagcacagacatttaaaattcataatcaggctaacaacactctcttgaatttaggaatcattgaaaactccttgcacttagatttaatttatatgttagttacattattaaaagtcataaggcatttatctgagtcattgctctacagagagcaattaatggcttgtaataataaaaagaatatttctctgtaatgcattgttgaaagacaaccagaatatcaagaaaatgtatataggaatatgctacttgcctcctccctgcatttcctcgtggggcactatttgcgacataggcctacagaattagactttcatacttagaagataaggtacactcttcttcttttatttatttatttatttatttttaggccattcttctggtttgccaaattctattaagacagtgatacatttgcttccttatttatgcatgcttagatcatgaacatgatgcccttcttttttttttttttctttggtcaagtagggattaatgccataggtttagagagaaggattgttttcagtttttaagagaattttttaaaaatacattttatggttctcttaaggaattaatattcacttctgaaggacttacttgtaatatataatttatcattttagccagcagggaaataaatcatttttaatccccagaagaaagtgctggaaatagcttctatatagtcagcagttcacctggagaaagatcttaattccttgttgttttgactaggaatatcaatatttggtataaaataactagaatagtttattaccttttccctcatgaaattttaaatatatgcaaatatatatatcattagattcctgtggtggataataatttcttcagattctaaaacaggtgtctagtgactgcttaattgtttccaagttgcatcaaagatgaattggtaaataatggaaatgagtagtgatatgaaaatggttatgtaactacatattacttgtttctggtaatcaagtcttattttttaaaagcctattgtttttcagaattgagatatttaaaacttgttataacttcttcctaaaaatagaagagaagaggaggtactgtgtgttacaaaaatttttttaaataaagaattcagtgtcacta

SEQ ID NO: 18723 - protein, 81 aa, Homo sapiens
MFTGENIPVHPHVYSNGHICLSILTEDWSPALSVQSVCLSIISMLSSCKEKRRPPDNSFYVRTCNKNPKKTKWWYHAIMDS

SEQ ID NO: 18724 - DNA, 3996 bp, Homo sapiens
tcctccccctgcgtctctggcctcgccggtcttggggggatggttccatcatggcgtcaatgcagaaacgactacagaaagaactgttggctttgcaaaatgacccacctcctggaatgaccttaaatgagaagagtgttcaaaattcaattacacagtggattgtagacatggaaggtgcaccaggtaccttatatgaaggggaaaaatttcaacttctatttaaatttagtagtcgatatccttttgactctcctcaggtcatgtttactggtgaaaatattcctgttcatcctcatgtttatagcaatggtcatatctgtttatccattctaacagaagactggtccccagcgctctcagtccaatcagtttgtcttagcattattagcatgctttccagctgcaaggaaaagagacgaccaccggataattctttttatgtgcgaacatgtaacaagaatccaaagaaaacaaaatggtggtatcatgatgatacttgttgatgccactgttatcatcctcctagcagaagatagtcctactgagaaaatgagcactttgatcattcagtctttgaactttaacctttgactggaagtgacctataggcaatgaagactacttccttttactgcatttttactcgtgtgcattctgggcgcatgttgatcgctggttcagtccaggcaactgacatgcttttattagtcatacagtattaatgcaggtgtcaggaaatgtcaaatataattccattttttatttttatttttttaagcttttggaaaagctccaggtcctcatgtattgtgcaataacaatgacttccttggcggttttggtacgttcattgccggcaatgggcgttgtaacaggaaaagttttcattaactcctgccattcaatgattaatgcatgatagggcctatgaaatgaacttactggttatagtgggaatataaataaagtgagggatccaacattactttaaaagtcaccccaactgtttatatttggattctatgcactgtgatcctaaggttaacagcatgaattaacatgcgtctttaaaggactgtaatgaaagatcattgcatatttattgaattgtttatatctactgtcaagttgttttgacatggaagattttcaagtaacattggcagagaggtacagtatgttatccctatggtgaaaataaattaatttgttgtatatagttcctcaatctctgaagtaaaggtatgagtaatatagggtatgaatggtttaatcaaggctttattttggaagtaagaaaaatggcagtgatgattaaattgctgcagtccataatttgggcttgttatttgtacattaaagattttttccaagtaagttacactctgttaacttcctgctagccatcagcatgagccctactgcctaaacactatttcatttatttatgtttggaaaccccgtaaacatttttgtttgcaatcttgtttcttttgttataagtcaagtttgaatgttacaatacttttattgaaacttttgttaagttttttcttgtaaattttctttacttgtgagtatcatcttgtcctttaatcctgtaccctaaaataagaaatacatttttgacagaggcttaatgttttaacaaaagagtgtggacatttttattttaaaatttaggcaaaagtcactatcaaatggttgcttatttgtctcacacagccatatagtttttcctggagggttttgttttgttgttgttgaaaagactttgcttacagctagatgaaactttctatagaaaaaaaaaattgttgaaaggtccagttctcagtaccatgtgagttaatgatactacaactaagttctttttaaaaagtgattaatgtattttataaattaccttttcacatatgcaaaatctgtttctactacaatgttatttttactaatgccttattgttgcactctttttgaaatatcctgcagtgaatatatgaatcaatttgggcttaaaactgaaagccagttggctgaaaggtttgaaatacgtaccccagtaaaaccattcaatcaataattggtaaataatattttaaaattgtttttaatctgtatagatgacattttgtagctttgtacatgttgttaattaagggcatataattttacactcaaagtataattgctgaactcaggggtgggtagacttcaaaaatatgtctgctatagaaataacttgaaaaaaaaaattaaaaccgtggccagccaccaaattgtggacactgtttatatactgctagttaacaattaccacttttaaaaaattataaccgtttttgttctatcttgactagataaattctcacaatgatctctgtcagttttattagttggcctgtttaaccaagacagaaagtctttgaattactcatagttttaaactgcttttaatatgaaaattgcagctgtaaattatgtattttcatattttgcgtaactgctctacactactgtttgacttgatcttcttctgggggttagggagaaatctgtctccatattgctggttctcttaccaaaatgcttttataaagaaatgaccggtgacatttattcaccaaaggaattaatatactgagtcaaagattaacaatgctatactatagagtaataggtcatatatagcctcaattgagttttttatgacaatattttaacatacctctctctctacatataaataccataaagtaaactaaaatgacacagaggaaagtagaggaaaatgaaataatttcggtacatcttatggtttaaagagtagaaaataagatgaaatatcctaaaatataggagcacagacatttaaaattcataatcaggctaacaacactctcttgaatttaggaatcattgaaaactccttgcacttagatttaatttatatgttagttacattattaaaagtcataaggcatttatctgagtcattgctctacagagagcaattaatggcttgtaataataaaaagaatatttctctgtaatgcattgttgaaagacaaccagaatatcaagaaaatgtatataggaatatgctacttgcctcctccctgcatttcctcgtggggcactatttgcgacataggcctacagaattagactttcatacttagaagataaggtacactcttcttcttttatttatttatttatttatttttaggccattcttctggtttgccaaattctattaagacagtgatacatttgcttccttatttatgcatgcttagatcatgaacatgatgcccttcttttttttttttttctttggtcaagtagggattaatgccataggtttagagagaaggattgttttcagtttttaagagaattttttaaaaatacattttatggttctcttaaggaattaatattcacttctgaaggacttacttgtaatatataatttatcattttagccagcagggaaataaatcatttttaatccccagaagaaagtgctggaaatagcttctatatagtcagcagttcacctggagaaagatcttaattccttgttgttttgactaggaatatcaatatttggtataaaataactagaatagtttattaccttttccctcatgaaattttaaatatatgcaaatatatatatcattagattcctgtggtggataataatttcttcagattctaaaacaggtgtctagtgactgcttaattgtttccaagttgcatcaaagatgaattggtaaataatggaaatgagtagtgatatgaaaatggttatgtaactacatattacttgtttctggtaatcaagtcttattttttaaaagcctattgtttttcagaattgagatatttaaaacttgttataacttcttcctaaaaatagaagagaagaggaggtactgtgtgttacaaaaatttttttaaataaagaattcagtgtcacta

SEQ ID NO: 18725 - protein, 151 aa, Homo sapiens
MASMQKRLQKELLALQNDPPPGMTLNEKSVQNSITQWIVDMEGAPGTLYEGEKFQLLFKFSSRYPFDSPQVMFTGENIPVHPHVYSNGHICLSILTEDWSPALSVQSVCLSIISMLSSCKEKRRPPDNSFYVRTCNKNPKKTKWWYHDDTC

SEQ ID NO: 18726 - DNA, 4032 bp, Homo sapiens
agctcctccccctgcgtctctggcctcgccggtcttggggggatggttccatcatggcgtcaatgcagaccacaggaaggagggtggaagtatggtttccaaaacgactacagaaagaactgttggctttgcaaaatgacccacctcctggaatgaccttaaatgagaagagtgttcaaaattcaattacacagtggattgtagacatggaaggtgcaccaggtaccttatatgaaggggaaaaatttcaacttctatttaaatttagtagtcgatatccttttgactctcctcaggtcatgtttactggtgaaaatattcctgttcatcctcatgtttatagcaatggtcatatctgtttatccattctaacagaagactggtccccagcgctctcagtccaatcagtttgtcttagcattattagcatgctttccagctgcaaggaaaagagacgaccaccggataattctttttatgtgcgaacatgtaacaagaatccaaagaaaacaaaatggtggtatcatgatgatacttgttgatgccactgttatcatcctcctagcagaagatagtcctactgagaaaatgagcactttgatcattcagtctttgaactttaacctttgactggaagtgacctataggcaatgaagactacttccttttactgcatttttactcgtgtgcattctgggcgcatgttgatcgctggttcagtccaggcaactgacatgcttttattagtcatacagtattaatgcaggtgtcaggaaatgtcaaatataattccattttttatttttatttttttaagcttttggaaaagctccaggtcctcatgtattgtgcaataacaatgacttccttggcggttttggtacgttcattgccggcaatgggcgttgtaacaggaaaagttttcattaactcctgccattcaatgattaatgcatgatagggcctatgaaatgaacttactggttatagtgggaatataaataaagtgagggatccaacattactttaaaagtcaccccaactgtttatatttggattctatgcactgtgatcctaaggttaacagcatgaattaacatgcgtctttaaaggactgtaatgaaagatcattgcatatttattgaattgtttatatctactgtcaagttgttttgacatggaagattttcaagtaacattggcagagaggtacagtatgttatccctatggtgaaaataaattaatttgttgtatatagttcctcaatctctgaagtaaaggtatgagtaatatagggtatgaatggtttaatcaaggctttattttggaagtaagaaaaatggcagtgatgattaaattgctgcagtccataatttgggcttgttatttgtacattaaagattttttccaagtaagttacactctgttaacttcctgctagccatcagcatgagccctactgcctaaacactatttcatttatttatgtttggaaaccccgtaaacatttttgtttgcaatcttgtttcttttgttataagtcaagtttgaatgttacaatacttttattgaaacttttgttaagttttttcttgtaaattttctttacttgtgagtatcatcttgtcctttaatcctgtaccctaaaataagaaatacatttttgacagaggcttaatgttttaacaaaagagtgtggacatttttattttaaaatttaggcaaaagtcactatcaaatggttgcttatttgtctcacacagccatatagtttttcctggagggttttgttttgttgttgttgaaaagactttgcttacagctagatgaaactttctatagaaaaaaaaaattgttgaaaggtccagttctcagtaccatgtgagttaatgatactacaactaagttctttttaaaaagtgattaatgtattttataaattaccttttcacatatgcaaaatctgtttctactacaatgttatttttactaatgccttattgttgcactctttttgaaatatcctgcagtgaatatatgaatcaatttgggcttaaaactgaaagccagttggctgaaaggtttgaaatacgtaccccagtaaaaccattcaatcaataattggtaaataatattttaaaattgtttttaatctgtatagatgacattttgtagctttgtacatgttgttaattaagggcatataattttacactcaaagtataattgctgaactcaggggtgggtagacttcaaaaatatgtctgctatagaaataacttgaaaaaaaaaattaaaaccgtggccagccaccaaattgtggacactgtttatatactgctagttaacaattaccacttttaaaaaattataaccgtttttgttctatcttgactagataaattctcacaatgatctctgtcagttttattagttggcctgtttaaccaagacagaaagtctttgaattactcatagttttaaactgcttttaatatgaaaattgcagctgtaaattatgtattttcatattttgcgtaactgctctacactactgtttgacttgatcttcttctgggggttagggagaaatctgtctccatattgctggttctcttaccaaaatgcttttataaagaaatgaccggtgacatttattcaccaaaggaattaatatactgagtcaaagattaacaatgctatactatagagtaataggtcatatatagcctcaattgagttttttatgacaatattttaacatacctctctctctacatataaataccataaagtaaactaaaatgacacagaggaaagtagaggaaaatgaaataatttcggtacatcttatggtttaaagagtagaaaataagatgaaatatcctaaaatataggagcacagacatttaaaattcataatcaggctaacaacactctcttgaatttaggaatcattgaaaactccttgcacttagatttaatttatatgttagttacattattaaaagtcataaggcatttatctgagtcattgctctacagagagcaattaatggcttgtaataataaaaagaatatttctctgtaatgcattgttgaaagacaaccagaatatcaagaaaatgtatataggaatatgctacttgcctcctccctgcatttcctcgtggggcactatttgcgacataggcctacagaattagactttcatacttagaagataaggtacactcttcttcttttatttatttatttatttatttttaggccattcttctggtttgccaaattctattaagacagtgatacatttgcttccttatttatgcatgcttagatcatgaacatgatgcccttcttttttttttttttctttggtcaagtagggattaatgccataggtttagagagaaggattgttttcagtttttaagagaattttttaaaaatacattttatggttctcttaaggaattaatattcacttctgaaggacttacttgtaatatataatttatcattttagccagcagggaaataaatcatttttaatccccagaagaaagtgctggaaatagcttctatatagtcagcagttcacctggagaaagatcttaattccttgttgttttgactaggaatatcaatatttggtataaaataactagaatagtttattaccttttccctcatgaaattttaaatatatgcaaatatatatatcattagattcctgtggtggataataatttcttcagattctaaaacaggtgtctagtgactgcttaattgtttccaagttgcatcaaagatgaattggtaaataatggaaatgagtagtgatatgaaaatggttatgtaactacatattacttgtttctggtaatcaagtcttattttttaaaagcctattgtttttcagaattgagatatttaaaacttgttataacttcttcctaaaaatagaagagaagaggaggtactgtgtgttacaaaaatttttttaaataaagaattcagtgtcacta

SEQ ID NO: 18727 - protein, 162 aa, Homo sapiens; identical to SEQ ID NO: 2290

SEQ ID NO: 18728 - DNA, 1481 bp, Homo sapiens
cgactacagaaagaactgttggctttgcaaaatgacccacctcctggaatgaccttaaatgagaagagtgttcaaaattcaattacacagtcatgtttactggtgaaaatattcctgttcatcctcatgtttatagcaatggtcatatctgtttatccattctaacagaagactggtccccagcgctctcagtccaatcagtttgtcttagcattattagcatgctttccagctgcaaggaaaagagacgaccaccggataattctttttatgtgcgaacatgtaacaagaatccaaagaaaacaaaatggtggtatcatgatgatacttgttgatgccactgttatcatcctcctagcagaagatagtcctactgagaaaatgagcactttgatcattcagtctttgaactttaacctttgactggaagtgacctataggcaatgaagactacttccttttactgcatttttactcgtgtgcattctgggcgcatgttgatcgctggttcagtccaggcaactgacatgcttttattagtcatacagtattaatgcaggtgtcaggaaatgtcaaatataattccattttttatttttatttttttaagcttttggaaaagctccaggtcctcatgtattgtgcaataacaatgacttccttggcggttttggtacgttcattgccggcaatgggcgttgtaacaggaaaagttttcattaactcctgccattcaatgattaatgcatgatagggcctatgaaatgaacttactggttatagtgggaatataaataaagtgagggatccaacattactttaaaagtcaccccaactgtttatatttggattctatgcactgtgatcctaaggttaacagcatgaattaacatgcgtctttaaaggactgtaatgaaagatcattgcatatttattgaattgtttatatctactgtcaagttgttttgacatggaagattttcaagtaacattggcagagaggtacagtatgttatccctatggtgaaaataaattaatttgttgtatatagttcctcaatctctgaagtaaaggtatgagtaatatagggtatgaatggtttaatcaaggctttattttggaagtaagaaaaatggcagtgatgattaaattgctgcagtccataatttgggcttgttatttgtacattaaagattttttccaagtaagttacactctgttaacttcctgctagccatcagcatgagccctactgcctaaacactatttcatttatttatgtttggaaaccccgtaaacatttttgtttgcaatcttgtttcttttgttataagtcaagtttgaatgttacaatacttttattgaaacttttgttaagttttttcttgtaaattttctttacttgtgagtatcatcttgtcctttaatcctgtaccctaaaataagaaatacatttttgacagaggcttaatgttttaac

SEQ ID NO: 18729 - protein, 80 aa, Homo sapiens; identical to SEQ ID NO: 18719

SEQ ID NO: 18730 - DNA, 1190 bp, Homo sapiens
agaaacgactacagaaagaactgttggctttgcaaaatgacccacctcctggaatgaccttaaatgagaagagtgttcaaaattcaattacacagtcatgtttactggtgaaaatattcctgttcatcctcatgtttatagcaatggtcatatctgtttatccattctaacagaagactggtccccagcgctctcagtccaatcagtttgtcttagcattattagcatgctttccagctgcaaggaaaagggcaaagcagtttgtgggtacaaggccttctatgttcctgttacgcttaaagactatagaaagagacgaccaccggataattctttttatgtgcgaacatgtaacaagaatccaaagaaaacaaaatggtggtatcatgatgatacttgttgatgccactgttatcatcctcctagcagaagatagtcctactgagaaaatgagcactttgatcattcagtctttgaacttactggttatagtgggaatataaataaagtgagggatccaacattactttaaaagtcaccccaactgtttatatttggattctatgcactgtgatcctaaggttaacagcatgaattaacatgcgtctttaaaggactgtaatgaaagatcattgcatatttattgaattgtttatatctactgtcaagttgttttgacatggaagattttcaagtaacattggcagagaggtacagtatgttatccctatggtgaaaataaattaatttgttgtatatagttcctcaatctctgaagtaaaggtatgagtaatatagggtatgaatggtttaatcaaggctttattttggaagtaagaaaaatggcagtgatgattaaattgctgcagtccataatttgggcttgttatttgtacattaaagattttttccaagtaagttacactctgttaacttcctgctagccatcagcatgagccctactgcctaaacactatttcatttatttatgtttggaaaccccgtaaacatttttgtttgcaatcttgtttcttttgttataagtcaagtttgaatgttacaatacttttattgaaacttttgttaagttttttcttgtaaattttctttacttgtgagtatcatcttgtcctttaatcctgtaccctaaaataagaaatacatttttgacagaggcttaatgttttaac

SEQ ID NO: 18731 - protein, 101 aa, Homo sapiens; identical to SEQ ID NO: 18721

SEQ ID NO: 18732 - DNA, 1615 bp, Homo sapiens
ggcctcgccggtcttggggggatggttccatcatggcgtcaatgcagaaacgactacagaaagaactgttggctttgcaaaatgacccacctcctggaatgaccttaaatgagaagagtgttcaaaattcaattacacagtcatgtttactggtgaaaatattcctgttcatcctcatgtttatagcaatggtcatatctgtttatccattctaacagaagactggtccccagcgctctcagtccaatcagtttgtcttagcattattagcatgctttccagctgcaaggaaaagagacgaccaccggataattctttttatgtgcgaacatgtaacaagaatccaaagaaaacaaaatggtggtatcatgccatcatggattcgtagtcccgcaagtccctgttgatctagctgttacagatcatttgtttcttcaaaacgagggtattcaaagatgatacttgttgatgccactgttatcatcctcctagcagaagatagtcctactgagaaaatgagcactttgatcattcagtctttgaactttaacctttgactggaagtgacctataggcaatgaagactacttccttttactgcatttttactcgtgtgcattctgggcgcatgttgatcgctggttcagtccaggcaactgacatgcttttattagtcatacagtattaatgcaggtgtcaggaaatgtcaaatataattccattttttatttttatttttttaagcttttggaaaagctccaggtcctcatgtattgtgcaataacaatgacttccttggcggttttggtacgttcattgccggcaatgggcgttgtaacaggaaaagttttcattaactcctgccattcaatgattaatgcatgatagggcctatgaaatgaacttactggttatagtgggaatataaataaagtgagggatccaacattactttaaaagtcaccccaactgtttatatttggattctatgcactgtgatcctaaggttaacagcatgaattaacatgcgtctttaaaggactgtaatgaaagatcattgcatatttattgaattgtttatatctactgtcaagttgttttgacatggaagattttcaagtaacattggcagagaggtacagtatgttatccctatggtgaaaataaattaatttgttgtatatagttcctcaatctctgaagtaaaggtatgagtaatatagggtatgaatggtttaatcaaggctttattttggaagtaagaaaaatggcagtgatgattaaattgctgcagtccataatttgggcttgttatttgtacattaaagattttttccaagtaagttacactctgttaacttcctgctagccatcagcatgagccctactgcctaaacactatttcatttatttatgtttggaaaccccgtaaacatttttgtttgcaatcttgtttcttttgttataagtcaagtttgaatgttacaatacttttattgaaacttttgttaagttttttcttgtaaattttctttacttgtgagtatcatcttgtcctttaatcctgtaccctaaaataagaaatacatttttgacagaggcttaatgttttaac

SEQ ID NO: 18733 - protein, 81 aa, Homo sapiens; identical to SEQ ID NO: 18723

SEQ ID NO: 18734 - DNA, 1652 bp, Homo sapiens
tcctccccctgcgtctctggcctcgccggtcttggggggatggttccatcatggcgtcaatgcagaaacgactacagaaagaactgttggctttgcaaaatgacccacctcctggaatgaccttaaatgagaagagtgttcaaaattcaattacacagtggattgtagacatggaaggtgcaccaggtaccttatatgaaggggaaaaatttcaacttctatttaaatttagtagtcgatatccttttgactctcctcaggtcatgtttactggtgaaaatattcctgttcatcctcatgtttatagcaatggtcatatctgtttatccattctaacagaagactggtccccagcgctctcagtccaatcagtttgtcttagcattattagcatgctttccagctgcaaggaaaagagacgaccaccggataattctttttatgtgcgaacatgtaacaagaatccaaagaaaacaaaatggtggtatcatgatgatacttgttgatgccactgttatcatcctcctagcagaagatagtcctactgagaaaatgagcactttgatcattcagtctttgaactttaacctttgactggaagtgacctataggcaatgaagactacttccttttactgcatttttactcgtgtgcattctgggcgcatgttgatcgctggttcagtccaggcaactgacatgcttttattagtcatacagtattaatgcaggtgtcaggaaatgtcaaatataattccattttttatttttatttttttaagcttttggaaaagctccaggtcctcatgtattgtgcaataacaatgacttccttggcggttttggtacgttcattgccggcaatgggcgttgtaacaggaaaagttttcattaactcctgccattcaatgattaatgcatgatagggcctatgaaatgaacttactggttatagtgggaatataaataaagtgagggatccaacattactttaaaagtcaccccaactgtttatatttggattctatgcactgtgatcctaaggttaacagcatgaattaacatgcgtctttaaaggactgtaatgaaagatcattgcatatttattgaattgtttatatctactgtcaagttgttttgacatggaagattttcaagtaacattggcagagaggtacagtatgttatccctatggtgaaaataaattaatttgttgtatatagttcctcaatctctgaagtaaaggtatgagtaatatagggtatgaatggtttaatcaaggctttattttggaagtaagaaaaatggcagtgatgattaaattgctgcagtccataatttgggcttgttatttgtacattaaagattttttccaagtaagttacactctgttaacttcctgctagccatcagcatgagccctactgcctaaacactatttcatttatttatgtttggaaaccccgtaaacatttttgtttgcaatcttgtttcttttgttataagtcaagtttgaatgttacaatacttttattgaaacttttgttaagttttttcttgtaaattttctttacttgtgagtatcatcttgtcctttaatcctgtaccctaaaataagaaatacatttttgacagaggcttaatgttttaac

SEQ ID NO: 18735 - protein, 151 aa, Homo sapiens; identical to SEQ ID NO: 18725

SEQ ID NO: 18736 - DNA, 1688 bp, Homo sapiens
agctcctccccctgcgtctctggcctcgccggtcttggggggatggttccatcatggcgtcaatgcagaccacaggaaggagggtggaagtatggtttccaaaacgactacagaaagaactgttggctttgcaaaatgacccacctcctggaatgaccttaaatgagaagagtgttcaaaattcaattacacagtggattgtagacatggaaggtgcaccaggtaccttatatgaaggggaaaaatttcaacttctatttaaatttagtagtcgatatccttttgactctcctcaggtcatgtttactggtgaaaatattcctgttcatcctcatgtttatagcaatggtcatatctgtttatccattctaacagaagactggtccccagcgctctcagtccaatcagtttgtcttagcattattagcatgctttccagctgcaaggaaaagagacgaccaccggataattctttttatgtgcgaacatgtaacaagaatccaaagaaaacaaaatggtggtatcatgatgatacttgttgatgccactgttatcatcctcctagcagaagatagtcctactgagaaaatgagcactttgatcattcagtctttgaactttaacctttgactggaagtgacctataggcaatgaagactacttccttttactgcatttttactcgtgtgcattctgggcgcatgttgatcgctggttcagtccaggcaactgacatgcttttattagtcatacagtattaatgcaggtgtcaggaaatgtcaaatataattccattttttatttttatttttttaagcttttggaaaagctccaggtcctcatgtattgtgcaataacaatgacttccttggcggttttggtacgttcattgccggcaatgggcgttgtaacaggaaaagttttcattaactcctgccattcaatgattaatgcatgatagggcctatgaaatgaacttactggttatagtgggaatataaataaagtgagggatccaacattactttaaaagtcaccccaactgtttatatttggattctatgcactgtgatcctaaggttaacagcatgaattaacatgcgtctttaaaggactgtaatgaaagatcattgcatatttattgaattgtttatatctactgtcaagttgttttgacatggaagattttcaagtaacattggcagagaggtacagtatgttatccctatggtgaaaataaattaatttgttgtatatagttcctcaatctctgaagtaaaggtatgagtaatatagggtatgaatggtttaatcaaggctttattttggaagtaagaaaaatggcagtgatgattaaattgctgcagtccataatttgggcttgttatttgtacattaaagattttttccaagtaagttacactctgttaacttcctgctagccatcagcatgagccctactgcctaaacactatttcatttatttatgtttggaaaccccgtaaacatttttgtttgcaatcttgtttcttttgttataagtcaagtttgaatgttacaatacttttattgaaacttttgttaagttttttcttgtaaattttctttacttgtgagtatcatcttgtcctttaatcctgtaccctaaaataagaaatacatttttgacagaggcttaatgttttaac

SEQ ID NO: 18737 - protein, 162 aa, Homo sapiens; identical to SEQ ID NO: 2290

SEQ ID NO: 18738 - DNA, 380 bp, Homo sapiens
aaaaaaaaaatctggacatacccaagctgtgtatgtgcctgagatcttcccttccaagtgatttattaaactgggaagtcagaagcagtcctgtgaacatttgtttgttgaagcatgaaaaggcagaattgatgagtccttgcttgagtctatgcctccacccagtagtttgttcttagtctcctaggggctgatctcagcagagaaatggagacagttcagtcaccaacagtttgttactggattttggaaaaggtaccaaagtaagaatccaaggcttgtattcttatcttagctctgtgattaacaagcttaggtaaggcttctaatctttctgggtttctttccttatcaataaaatgcgcaagtcagactgcata

SEQ ID NO: 18739 - protein, 48 aa, Homo sapiens
MCLRSSLPSDLLNWEVRSSPVNICLLKHEKAELMSPCLSLCLHPVVCS

SEQ ID NO: 18740 - DNA, 2075 bp, Homo sapiens
cacactctgcgtcctcgcctcaccaggtacggatctcccgcgcgtcgccgaaagcggctctgacccagcggaagtaattctttcgactgccccggaacccaccggagcaggcagctgggggtgggggggcggccctgggataggggctgtggcagtacgcggggacccggctgcggtggctgcgggactgacgagaaactactaaagttcctggggaagcaaagtagaatttcataagaacaaaatggatggagaggagaaaacctatggtggctgtgaaggacctgatgccatgtatgtcaaattgatatcatctgatggccatgaatttattgtaaaaagagaacatgcattaacatcaggcacgataaaagccatgttgagtggcccaggtcagtttgctgagaacgaaaccaatgaggtcaattttagagagataccttcacatgtgctatcgaaagtatgcatgtattttacgtacaaggttcgctacactaacagctccaccgagattcctgaattcccaattgcacctgaaattgcactggaactgctgatggctgcgaacttcttagattgttaaataaaataaattataataaactgttaactcttttcagtatttaatacctgtagttcagttagtaactttttcatatatagcatgttgcctgtatgcagttgaactatataaagttcattgcaaagcagattatcttgtttttttgcatagcaatcaaagttgaaatttgtttgctacatcaacaaattaaggacattttcacaaactgagaaataaacaaatatgccaattcgtaggtggttttgccttatcctttgaatgtgacttaaaatcagcaatgatgatatagtaaatactgaaatttaggtgtaaatcaatacgttctacagggaaataatgaggctaagtatttttatgtttttagtggttttttagaaacctaatcttatagccgccattagcattactagagttatgcaaataattgcattataaacatgtttataacttagccaaaacattgatttttataactctccaagtatgagttgaaatttcttatgtcttttgataaactgcagtattctttaagtgtactttgtccttttgtttattgctacaatttaagaactttatttaaaaacaattttggaaggttactaggtacagcttttgcagaagaaactgaactgtagccagatggtcagcaagtaaactacatgacttagagttcttgtgcattatacattttgggtaattcaaagtactgtatttgcattgactataaagcgtcgtttgcaatatttattcttccttcatagtcccttgttgtgattatacttccagttgtttaaatgtattttaaaagactcactattaactttattcagatcttaaaagctacacctttttgaactattccagtctttctccatccaattagaatgttatggaataacatgtgaagagatacagtgaaaatcatattataatgcattgaagatatcctacatgaattatcttctattaaaatatgtcccaataaatatacccataatcagtgggtcttctactgaaatcaagctcattcagcttttctattaagcagccaaaaaattttttgaaaaaatatgacagcatcattccttatgcatggggaaagaagcactggagatgggtttagtattgtctttatctcagaggtggaacaaagttgtcattatagggtctataaacttaagtctccagcttatttgagactggcttaatatggctgagcccggtggctcatgcctgtaatcccagcactttcagaggacgaggcgggtagatcacttgaggccaggagtttgagaccagcctggccaccatggcaaaaccccatctctaccaaaaatgcaaaaattagctaggccatggtggcacacgcctgtaatcccagctacttgtgaggctgaggcatgagaatcgcttgaacctgggaggtggaggtggcagtgagccgagatcgcaccactgcactccagcctgggtgacagagcgagactgtctc

SEQ ID NO: 18741 - protein, 112 aa, Homo sapiens; identical to SEQ ID NO: 2296

SEQ ID NO: 18742 - DNA, 1923 bp, Homo sapiens
cagacggaagtgagcgacacactctgcgtcctcgcctcaccaggaaactactaaagttcctggggaagcaaagtagaatttcataagaacaaaatggatggagaggagaaaacctatggtggctgtgaaggacctgatgccatgtatgtcaaattgatatcatctgatggccatgaatttattgtaaaaagagaacatgcattaacatcaggcacgataaaagccatgttgagtggcccaggtcagtttgctgagaacgaaaccaatgaggtcaattttagagagataccttcacatgtgctatcgaaagtatgcatgtattttacgtacaaggttcgctacactaacagctccaccgagattcctgaattcccaattgcacctgaaattgcactggaactgctgatggctgcgaacttcttagattgttaaataaaataaattataataaactgttaactcttttcagtatttaatacctgtagttcagttagtaactttttcatatatagcatgttgcctgtatgcagttgaactatataaagttcattgcaaagcagattatcttgtttttttgcatagcaatcaaagttgaaatttgtttgctacatcaacaaattaaggacattttcacaaactgagaaataaacaaatatgccaattcgtaggtggttttgccttatcctttgaatgtgacttaaaatcagcaatgatgatatagtaaatactgaaatttaggtgtaaatcaatacgttctacagggaaataatgaggctaagtatttttatgtttttagtggttttttagaaacctaatcttatagccgccattagcattactagagttatgcaaataattgcattataaacatgtttataacttagccaaaacattgatttttataactctccaagtatgagttgaaatttcttatgtcttttgataaactgcagtattctttaagtgtactttgtccttttgtttattgctacaatttaagaactttatttaaaaacaattttggaaggttactaggtacagcttttgcagaagaaactgaactgtagccagatggtcagcaagtaaactacatgacttagagttcttgtgcattatacattttgggtaattcaaagtactgtatttgcattgactataaagcgtcgtttgcaatatttattcttccttcatagtcccttgttgtgattatacttccagttgtttaaatgtattttaaaagactcactattaactttattcagatcttaaaagctacacctttttgaactattccagtctttctccatccaattagaatgttatggaataacatgtgaagagatacagtgaaaatcatattataatgcattgaagatatcctacatgaattatcttctattaaaatatgtcccaataaatatacccataatcagtgggtcttctactgaaatcaagctcattcagcttttctattaagcagccaaaaaattttttgaaaaaatatgacagcatcattccttatgcatggggaaagaagcactggagatgggtttagtattgtctttatctcagaggtggaacaaagttgtcattatagggtctataaacttaagtctccagcttatttgagactggcttaatatggctgagcccggtggctcatgcctgtaatcccagcactttcagaggacgaggcgggtagatcacttgaggccaggagtttgagaccagcctggccaccatggcaaaaccccatctctaccaaaaatgcaaaaattagctaggccatggtggcacacgcctgtaatcccagctacttgtgaggctgaggcatgagaatcgcttgaacctgggaggtggaggtggcagtgagccgagatcgcaccactgcactccagcctgggtgacagagcgagactgtct

SEQ ID NO: 18743 - protein, 112 aa, Homo sapiens; identical to SEQ ID NO: 2296

SEQ ID NO: 18744 - DNA, 1469 bp, Homo sapiens
atggagaggagaaaacctatggtggctgtgaaggacctgatgccatgtatgtcaaattgatatcatctgatggccatgaatttattgtaaaaagagaacatgcattaacatcaggcacgataaaagccatgttgagtggcccagagagacagagtctcattctgttgcccaggctggagtgcaatggtgcggtctcagctcactgcaatctccgcctgctgggttcaggcaattctcctgcctcagagtagctggaattacaggtcagtttgctgagaacgaaaccaatgaggtcaattttagagagataccttcacatgtgctatcgaaagtatgcatgtattttacgtacaaggttcgctacactaacagctccaccgagattcctgaattcccaattgcacctgaaattgcactggaactgctgatggctgcgaacttcttagattgttaaataaaataaattataataaactgttaactcttttcagtatttaatacctgtagttcagttagtaactttttcatatatagcatgttgcctgtatgcagttgaactatataaagttcattgcaaagcagattatcttgtttttttgcatagcaatcaaagttgaaatttgtttgctacatcaacaaattaaggacattttcacaaactgagaaataaacaaatatgccaattcgtaggtggttttgccttatcctttgaatgtgacttaaaatcagcaatgatgatatagtaaatactgaaatttaggtgtaaatcaatacgttctacagggaaataatgaggctaagtatttttatgtttttagtggttttttagaaacctaatcttatagccgccattagcattactagagttatgcaaataattgcattataaacatgtttataacttagccaaaacattgatttttataactctccaagtatgagttgaaatttcttatgtcttttgataaactgcagtattctttaagtgtactttgtccttttgtttattgctacaatttaagaactttatttaaaaacaattttggaaggttactaggtacagcttttgcagaagaaactgaactgtagccagatggtcagcaagtaaactacatgacttagagttcttgtgcattatacattttgggtaattcaaagtactgtatttgcattgactataaagcgtcgtttgcaatatttattcttccttcatagtcccttgttgtgattatacttccagttgtttaaatgtattttaaaagactcactattaactttattcagatcttaaaagctacacctttttgaactattccagtctttctccatccaattagaatgttatggaataacatgtgaagagatacagtgaaaatcatattataatgcattgaagatatcctacatgaattatcttctattaaaatatgtcccaataaatatacccataatcagtgggtcttctactg

SEQ ID NO: 18745 - protein, 68 aa, Homo sapiens
MYVKLISSDGHEFIVKREHALTSGTIKAMLSGPERQSLILLPRLECNGAVSAHCNLRLLGSGNSPASE

SEQ ID NO: 18746 - DNA, 1516 bp, Homo sapiens
tgttagcatttgcatagctagaaaatttgggttaattttattaccgatgtcactttcaaaagcttaattaggcagaaaaccatcctagagtgatgatatctttggagttaaggaaactactaaagttcctggggaagcaaagtagaatttcataagaacaaaatggatggagaggagaaaacctatggtggctgtgaaggacctgatgccatgtatgtcaaattgatatcatctgatggccatgaatttattgtaaaaagagaacatgcattaacatcaggcacgataaaagccatgttgagtggcccaggtcagtttgctgagaacgaaaccaatgaggtcaattttagagagataccttcacatgtgctatcgaaagtatgcatgtattttacgtacaaggttcgctacactaacagctccaccgagattcctgaattcccaattgcacctgaaattgcactggaactgctgatggctgcgaacttcttagattgttaaataaaataaattataataaactgttaactcttttcagtatttaatacctgtagttcagttagtaactttttcatatatagcatgttgcctgtatgcagttgaactatataaagttcattgcaaagcagattatcttgtttttttgcatagcaatcaaagttgaaatttgtttgctacatcaacaaattaaggacattttcacaaactgagaaataaacaaatatgccaattcgtaggtggttttgccttatcctttgaatgtgacttaaaatcagcaatgatgatatagtaaatactgaaatttaggtgtaaatcaatacgttctacagggaaataatgaggctaagtatttttatgtttttagtggttttttagaaacctaatcttatagccgccattagcattactagagttatgcaaataattgcattataaacatgtttataacttagccaaaacattgatttttataactctccaagtatgagttgaaatttcttatgtcttttgataaactgcagtattctttaagtgtactttgtccttttgtttattgctacaatttaagaactttatttaaaaacaattttggaaggttactaggtacagcttttgcagaagaaactgaactgtagccagatggtcagcaagtaaactacatgacttagagttcttgtgcattatacattttgggtaattcaaagtactgtatttgcattgactataaagcgtcgtttgcaatatttattcttccttcatagtcccttgttgtgattatacttccagttgtttaaatgtattttaaaagactcactattaactttattcagatcttaaaagctacacctttttgaactattccagtctttctccatccaattagaatgttatggaataacatgtgaagagatacagtgaaaatcatattataatgcattgaagatatcctacatgaattatcttctattaaaatatgtcccaataaatatacccataatcagtgggtcttctactg

SEQ ID NO: 18747 - protein, 112 aa, Homo sapiens; identical to SEQ ID NO: 2296

SEQ ID NO: 18748 - DNA, 1638 bp, Homo sapiens
gggagaagagggcggcgggacctttcctggcgccgctcgcagtttacatgtggatttattcattctggagatacaatggcaaggaaacagctgtgagtcttgctgtgtggcccaggctggagtgcccggctggtctcaaattcctgacctcaagtgatctccctcccaaagtgttgcgattgcaggtgtgagccactgcacctggctgctgagaaatctttgcctacagtgagggaaactactaaagttcctggggaagcaaagtagaatttcataagaacaaaatggatggagaggagaaaacctatggtggctgtgaaggacctgatgccatgtatgtcaaattgatatcatctgatggccatgaatttattgtaaaaagagaacatgcattaacatcaggcacgataaaagccatgttgagtggcccaggtcagtttgctgagaacgaaaccaatgaggtcaattttagagagataccttcacatgtgctatcgaaagtatgcatgtattttacgtacaaggttcgctacactaacagctccaccgagattcctgaattcccaattgcacctgaaattgcactggaactgctgatggctgcgaacttcttagattgttaaataaaataaattataataaactgttaactcttttcagtatttaatacctgtagttcagttagtaactttttcatatatagcatgttgcctgtatgcagttgaactatataaagttcattgcaaagcagattatcttgtttttttgcatagcaatcaaagttgaaatttgtttgctacatcaacaaattaaggacattttcacaaactgagaaataaacaaatatgccaattcgtaggtggttttgccttatcctttgaatgtgacttaaaatcagcaatgatgatatagtaaatactgaaatttaggtgtaaatcaatacgttctacagggaaataatgaggctaagtatttttatgtttttagtggttttttagaaacctaatcttatagccgccattagcattactagagttatgcaaataattgcattataaacatgtttataacttagccaaaacattgatttttataactctccaagtatgagttgaaatttcttatgtcttttgataaactgcagtattctttaagtgtactttgtccttttgtttattgctacaatttaagaactttatttaaaaacaattttggaaggttactaggtacagcttttgcagaagaaactgaactgtagccagatggtcagcaagtaaactacatgacttagagttcttgtgcattatacattttgggtaattcaaagtactgtatttgcattgactataaagcgtcgtttgcaatatttattcttccttcatagtcccttgttgtgattatacttccagttgtttaaatgtattttaaaagactcactattaactttattcagatcttaaaagctacacctttttgaactattccagtctttctccatccaattagaatgttatggaataacatgtgaagagatacagtgaaaatcatattataatgcattgaagatatcctacatgaattatcttctattaaaatatgtcccaataaatatacccataatcagtgggtcttctactg

SEQ ID NO: 18749 - protein, 112 aa, Homo sapiens; identical to SEQ ID NO: 2296

SEQ ID NO: 18750 - DNA, 1469 bp, Homo sapiens
acccggctgcggtggctgcgggactgacgagtgagtctcgggctggggcggaaacggagctccgggaaactactaaagttcctggggaagcaaagtagaatttcataagaacaaaatggatggagaggagaaaacctatggtggctgtgaaggacctgatgccatgtatgtcaaattgatatcatctgatggccatgaatttattgtaaaaagagaacatgcattaacatcaggcacgataaaagccatgttgagtggcccaggtcagtttgctgagaacgaaaccaatgaggtcaattttagagagataccttcacatgtgctatcgaaagtatgcatgtattttacgtacaaggttcgctacactaacagctccaccgagattcctgaattcccaattgcacctgaaattgcactggaactgctgatggctgcgaacttcttagattgttaaataaaataaattataataaactgttaactcttttcagtatttaatacctgtagttcagttagtaactttttcatatatagcatgttgcctgtatgcagttgaactatataaagttcattgcaaagcagattatcttgtttttttgcatagcaatcaaagttgaaatttgtttgctacatcaacaaattaaggacattttcacaaactgagaaataaacaaatatgccaattcgtaggtggttttgccttatcctttgaatgtgacttaaaatcagcaatgatgatatagtaaatactgaaatttaggtgtaaatcaatacgttctacagggaaataatgaggctaagtatttttatgtttttagtggttttttagaaacctaatcttatagccgccattagcattactagagttatgcaaataattgcattataaacatgtttataacttagccaaaacattgatttttataactctccaagtatgagttgaaatttcttatgtcttttgataaactgcagtattctttaagtgtactttgtccttttgtttattgctacaatttaagaactttatttaaaaacaattttggaaggttactaggtacagcttttgcagaagaaactgaactgtagccagatggtcagcaagtaaactacatgacttagagttcttgtgcattatacattttgggtaattcaaagtactgtatttgcattgactataaagcgtcgtttgcaatatttattcttccttcatagtcccttgttgtgattatacttccagttgtttaaatgtattttaaaagactcactattaactttattcagatcttaaaagctacacctttttgaactattccagtctttctccatccaattagaatgttatggaataacatgtgaagagatacagtgaaaatcatattataatgcattgaagatatcctacatgaattatcttctattaaaatatgtcccaataaatatacccataatcagtgggtcttctactg

SEQ ID NO: 18751 - protein, 112 aa, Homo sapiens; identical to SEQ ID NO: 2296

SEQ ID NO: 18752 - DNA, 1571 bp, Homo sapiens
aggggctgtggcagtacgcggggacccggctgcggtggctgcgggactgacgagatcatcagggaaggaagacctctctgaggagttgatgttttacctggagacctaaatgatgaggatttaaaagcttttcggacaacagcaattacaaatgcaaagaccttgaggaaactactaaagttcctggggaagcaaagtagaatttcataagaacaaaatggatggagaggagaaaacctatggtggctgtgaaggacctgatgccatgtatgtcaaattgatatcatctgatggccatgaatttattgtaaaaagagaacatgcattaacatcaggcacgataaaagccatgttgagtggcccaggtcagtttgctgagaacgaaaccaatgaggtcaattttagagagataccttcacatgtgctatcgaaagtatgcatgtattttacgtacaaggttcgctacactaacagctccaccgagattcctgaattcccaattgcacctgaaattgcactggaactgctgatggctgcgaacttcttagattgttaaataaaataaattataataaactgttaactcttttcagtatttaatacctgtagttcagttagtaactttttcatatatagcatgttgcctgtatgcagttgaactatataaagttcattgcaaagcagattatcttgtttttttgcatagcaatcaaagttgaaatttgtttgctacatcaacaaattaaggacattttcacaaactgagaaataaacaaatatgccaattcgtaggtggttttgccttatcctttgaatgtgacttaaaatcagcaatgatgatatagtaaatactgaaatttaggtgtaaatcaatacgttctacagggaaataatgaggctaagtatttttatgtttttagtggttttttagaaacctaatcttatagccgccattagcattactagagttatgcaaataattgcattataaacatgtttataacttagccaaaacattgatttttataactctccaagtatgagttgaaatttcttatgtcttttgataaactgcagtattctttaagtgtactttgtccttttgtttattgctacaatttaagaactttatttaaaaacaattttggaaggttactaggtacagcttttgcagaagaaactgaactgtagccagatggtcagcaagtaaactacatgacttagagttcttgtgcattatacattttgggtaattcaaagtactgtatttgcattgactataaagcgtcgtttgcaatatttattcttccttcatagtcccttgttgtgattatacttccagttgtttaaatgtattttaaaagactcactattaactttattcagatcttaaaagctacacctttttgaactattccagtctttctccatccaattagaatgttatggaataacatgtgaagagatacagtgaaaatcatattataatgcattgaagatatcctacatgaattatcttctattaaaatatgtcccaataaatatacccataatcagtgggtcttctactg

SEQ ID NO: 18753 - protein, 112 aa, Homo sapiens; identical to SEQ ID NO: 2296

SEQ ID NO: 18754 - DNA, 1719 bp, Homo sapiens
ctcaccaggtacggatctcccgcgcgtcgccgaaagcggctctgacccagcggaagtaattctttcgactgccccggaacccaccggagcaggcagctgggggtgggggggcggccctgggataggggctgtggcagtacgcggggacccggctgcggtggctgcgggactgacgaagtcttgctgtgtggcccaggctggagtgcccggctggtctcaaattcctgacctcaagtgatctccctcccaaagtgttgcgattgcaggtgtgagccactgcacctggctgctgagaaatctttgcctacagtgagggaaactactaaagttcctggggaagcaaagtagaatttcataagaacaaaatggatggagaggagaaaacctatggtggctgtgaaggacctgatgccatgtatgtcaaattgatatcatctgatggccatgaatttattgtaaaaagagaacatgcattaacatcaggcacgataaaagccatgttgagtggcccaggtcagtttgctgagaacgaaaccaatgaggtcaattttagagagataccttcacatgtgctatcgaaagtatgcatgtattttacgtacaaggttcgctacactaacagctccaccgagattcctgaattcccaattgcacctgaaattgcactggaactgctgatggctgcgaacttcttagattgttaaataaaataaattataataaactgttaactcttttcagtatttaatacctgtagttcagttagtaactttttcatatatagcatgttgcctgtatgcagttgaactatataaagttcattgcaaagcagattatcttgtttttttgcatagcaatcaaagttgaaatttgtttgctacatcaacaaattaaggacattttcacaaactgagaaataaacaaatatgccaattcgtaggtggttttgccttatcctttgaatgtgacttaaaatcagcaatgatgatatagtaaatactgaaatttaggtgtaaatcaatacgttctacagggaaataatgaggctaagtatttttatgtttttagtggttttttagaaacctaatcttatagccgccattagcattactagagttatgcaaataattgcattataaacatgtttataacttagccaaaacattgatttttataactctccaagtatgagttgaaatttcttatgtcttttgataaactgcagtattctttaagtgtactttgtccttttgtttattgctacaatttaagaactttatttaaaaacaattttggaaggttactaggtacagcttttgcagaagaaactgaactgtagccagatggtcagcaagtaaactacatgacttagagttcttgtgcattatacattttgggtaattcaaagtactgtatttgcattgactataaagcgtcgtttgcaatatttattcttccttcatagtcccttgttgtgattatacttccagttgtttaaatgtattttaaaagactcactattaactttattcagatcttaaaagctacacctttttgaactattccagtctttctccatccaattagaatgttatggaataacatgtgaagagatacagtgaaaatcatattataatgcattgaagatatcctacatgaattatcttctattaaaatatgtcccaataaatatacccataatcagtgggtcttctactg

SEQ ID NO: 18755 - protein, 112 aa, Homo sapiens; identical to SEQ ID NO: 2296

SEQ ID NO: 18756 - DNA, 1531 bp, Homo sapiens
ctcgcctcaccaggtacggatctcccgcgcgtcgccgaaagcggctctgacccagcggaagtaattctttcgactgccccggaacccaccggagcaggcagctgggggtgggggggcggccctgggataggggctgtggcagtacgcggggacccggctgcggtggctgcgggactgacgaatggagaggagaaaacctatggtggctgtgaaggacctgatgccatgtatgtcaaattgatatcatctgatggccatgaatttattgtaaaaagagaacatgcattaacatcaggcacgataaaagccatgttgagtggcccaggtcagtttgctgagaacgaaaccaatgaggtcaattttagagagataccttcacatgtgctatcgaaagtatgcatgtattttacgtacaaggttcgctacactaacagctccaccgagattcctgaattcccaattgcacctgaaattgcactggaactgctgatggctgcgaacttcttagattgttaaataaaataaattataataaactgttaactcttttcagtatttaatacctgtagttcagttagtaactttttcatatatagcatgttgcctgtatgcagttgaactatataaagttcattgcaaagcagattatcttgtttttttgcatagcaatcaaagttgaaatttgtttgctacatcaacaaattaaggacattttcacaaactgagaaataaacaaatatgccaattcgtaggtggttttgccttatcctttgaatgtgacttaaaatcagcaatgatgatatagtaaatactgaaatttaggtgtaaatcaatacgttctacagggaaataatgaggctaagtatttttatgtttttagtggttttttagaaacctaatcttatagccgccattagcattactagagttatgcaaataattgcattataaacatgtttataacttagccaaaacattgatttttataactctccaagtatgagttgaaatttcttatgtcttttgataaactgcagtattctttaagtgtactttgtccttttgtttattgctacaatttaagaactttatttaaaaacaattttggaaggttactaggtacagcttttgcagaagaaactgaactgtagccagatggtcagcaagtaaactacatgacttagagttcttgtgcattatacattttgggtaattcaaagtactgtatttgcattgactataaagcgtcgtttgcaatatttattcttccttcatagtcccttgttgtgattatacttccagttgtttaaatgtattttaaaagactcactattaactttattcagatcttaaaagctacacctttttgaactattccagtctttctccatccaattagaatgttatggaataacatgtgaagagatacagtgaaaatcatattataatgcattgaagatatcctacatgaattatcttctattaaaatatgtcccaataaatatacccataatcagtgggtcttctactg

SEQ ID NO: 18757 - protein, 96 aa, Homo sapiens
MYVKLISSDGHEFIVKREHALTSGTIKAMLSGPGQFAENETNEVNFREIPSHVLSKVCMYFTYKVRYTNSSTEIPEFPIAPEIALELLMAANFLDC

SEQ ID NO: 18758 - DNA, 1598 bp, Homo sapiens
cacactctgcgtcctcgcctcaccaggtacggatctcccgcgcgtcgccgaaagcggctctgacccagcggaagtaattctttcgactgccccggaacccaccggagcaggcagctgggggtgggggggcggccctgggataggggctgtggcagtacgcggggacccggctgcggtggctgcgggactgacgagaaactactaaagttcctggggaagcaaagtagaatttcataagaacaaaatggatggagaggagaaaacctatggtggctgtgaaggacctgatgccatgtatgtcaaattgatatcatctgatggccatgaatttattgtaaaaagagaacatgcattaacatcaggcacgataaaagccatgttgagtggcccaggtcagtttgctgagaacgaaaccaatgaggtcaattttagagagataccttcacatgtgctatcgaaagtatgcatgtattttacgtacaaggttcgctacactaacagctccaccgagattcctgaattcccaattgcacctgaaattgcactggaactgctgatggctgcgaacttcttagattgttaaataaaataaattataataaactgttaactcttttcagtatttaatacctgtagttcagttagtaactttttcatatatagcatgttgcctgtatgcagttgaactatataaagttcattgcaaagcagattatcttgtttttttgcatagcaatcaaagttgaaatttgtttgctacatcaacaaattaaggacattttcacaaactgagaaataaacaaatatgccaattcgtaggtggttttgccttatcctttgaatgtgacttaaaatcagcaatgatgatatagtaaatactgaaatttaggtgtaaatcaatacgttctacagggaaataatgaggctaagtatttttatgtttttagtggttttttagaaacctaatcttatagccgccattagcattactagagttatgcaaataattgcattataaacatgtttataacttagccaaaacattgatttttataactctccaagtatgagttgaaatttcttatgtcttttgataaactgcagtattctttaagtgtactttgtccttttgtttattgctacaatttaagaactttatttaaaaacaattttggaaggttactaggtacagcttttgcagaagaaactgaactgtagccagatggtcagcaagtaaactacatgacttagagttcttgtgcattatacattttgggtaattcaaagtactgtatttgcattgactataaagcgtcgtttgcaatatttattcttccttcatagtcccttgttgtgattatacttccagttgtttaaatgtattttaaaagactcactattaactttattcagatcttaaaagctacacctttttgaactattccagtctttctccatccaattagaatgttatggaataacatgtgaagagatacagtgaaaatcatattataatgcattgaagatatcctacatgaattatcttctattaaaatatgtcccaataaatatacccataatcagtgggtcttctactg

SEQ ID NO: 18759 - protein, 112 aa, Homo sapiens; identical to SEQ ID NO: 2296

SEQ ID NO: 18760 - DNA, 1380 bp, Homo sapiens
gcgacacactctgcgtcctcgcctcaccagatggagaggagaaaacctatggtggctgtgaaggacctgatgccatgtatgtcaaattgatatcatctgatggccatgaatttattgtaaaaagagaacatgcattaacatcaggcacgataaaagccatgttgagtggcccaggtcagtttgctgagaacgaaaccaatgaggtcaattttagagagataccttcacatgtgctatcgaaagtatgcatgtattttacgtacaaggttcgctacactaacagctccaccgagattcctgaattcccaattgcacctgaaattgcactggaactgctgatggctgcgaacttcttagattgttaaataaaataaattataataaactgttaactcttttcagtatttaatacctgtagttcagttagtaactttttcatatatagcatgttgcctgtatgcagttgaactatataaagttcattgcaaagcagattatcttgtttttttgcatagcaatcaaagttgaaatttgtttgctacatcaacaaattaaggacattttcacaaactgagaaataaacaaatatgccaattcgtaggtggttttgccttatcctttgaatgtgacttaaaatcagcaatgatgatatagtaaatactgaaatttaggtgtaaatcaatacgttctacagggaaataatgaggctaagtatttttatgtttttagtggttttttagaaacctaatcttatagccgccattagcattactagagttatgcaaataattgcattataaacatgtttataacttagccaaaacattgatttttataactctccaagtatgagttgaaatttcttatgtcttttgataaactgcagtattctttaagtgtactttgtccttttgtttattgctacaatttaagaactttatttaaaaacaattttggaaggttactaggtacagcttttgcagaagaaactgaactgtagccagatggtcagcaagtaaactacatgacttagagttcttgtgcattatacattttgggtaattcaaagtactgtatttgcattgactataaagcgtcgtttgcaatatttattcttccttcatagtcccttgttgtgattatacttccagttgtttaaatgtattttaaaagactcactattaactttattcagatcttaaaagctacacctttttgaactattccagtctttctccatccaattagaatgttatggaataacatgtgaagagatacagtgaaaatcatattataatgcattgaagatatcctacatgaattatcttctattaaaatatgtcccaataaatatacccataatcagtgggtcttctactg

SEQ ID NO: 18761 - protein, 96 aa, Homo sapiens; identical to SEQ ID NO: 18757

SEQ ID NO: 18762 - DNA, 1446 bp, Homo sapiens
agacggaagtgagcgacacactctgcgtcctcgcctcaccaggaaactactaaagttcctggggaagcaaagtagaatttcataagaacaaaatggatggagaggagaaaacctatggtggctgtgaaggacctgatgccatgtatgtcaaattgatatcatctgatggccatgaatttattgtaaaaagagaacatgcattaacatcaggcacgataaaagccatgttgagtggcccaggtcagtttgctgagaacgaaaccaatgaggtcaattttagagagataccttcacatgtgctatcgaaagtatgcatgtattttacgtacaaggttcgctacactaacagctccaccgagattcctgaattcccaattgcacctgaaattgcactggaactgctgatggctgcgaacttcttagattgttaaataaaataaattataataaactgttaactcttttcagtatttaatacctgtagttcagttagtaactttttcatatatagcatgttgcctgtatgcagttgaactatataaagttcattgcaaagcagattatcttgtttttttgcatagcaatcaaagttgaaatttgtttgctacatcaacaaattaaggacattttcacaaactgagaaataaacaaatatgccaattcgtaggtggttttgccttatcctttgaatgtgacttaaaatcagcaatgatgatatagtaaatactgaaatttaggtgtaaatcaatacgttctacagggaaataatgaggctaagtatttttatgtttttagtggttttttagaaacctaatcttatagccgccattagcattactagagttatgcaaataattgcattataaacatgtttataacttagccaaaacattgatttttataactctccaagtatgagttgaaatttcttatgtcttttgataaactgcagtattctttaagtgtactttgtccttttgtttattgctacaatttaagaactttatttaaaaacaattttggaaggttactaggtacagcttttgcagaagaaactgaactgtagccagatggtcagcaagtaaactacatgacttagagttcttgtgcattatacattttgggtaattcaaagtactgtatttgcattgactataaagcgtcgtttgcaatatttattcttccttcatagtcccttgttgtgattatacttccagttgtttaaatgtattttaaaagactcactattaactttattcagatcttaaaagctacacctttttgaactattccagtctttctccatccaattagaatgttatggaataacatgtgaagagatacagtgaaaatcatattataatgcattgaagatatcctacatgaattatcttctattaaaatatgtcccaataaatatacccataatcagtgggtcttctactg

SEQ ID NO: 18763 - protein, 112 aa, Homo sapiens; identical to SEQ ID NO: 2296

SEQ ID NO: 18764 - DNA, 1585 bp, Homo sapiens
agacggaagtgagcgacacactctgcgtcctcgcctcaccagagtcttgctgtgtggcccaggctggagtgcccggctggtctcaaattcctgacctcaagtgatctccctcccaaagtgttgcgattgcaggtgtgagccactgcacctggctgctgagaaatctttgcctacagtgagggaaactactaaagttcctggggaagcaaagtagaatttcataagaacaaaatggatggagaggagaaaacctatggtggctgtgaaggacctgatgccatgtatgtcaaattgatatcatctgatggccatgaatttattgtaaaaagagaacatgcattaacatcaggcacgataaaagccatgttgagtggcccaggtcagtttgctgagaacgaaaccaatgaggtcaattttagagagataccttcacatgtgctatcgaaagtatgcatgtattttacgtacaaggttcgctacactaacagctccaccgagattcctgaattcccaattgcacctgaaattgcactggaactgctgatggctgcgaacttcttagattgttaaataaaataaattataataaactgttaactcttttcagtatttaatacctgtagttcagttagtaactttttcatatatagcatgttgcctgtatgcagttgaactatataaagttcattgcaaagcagattatcttgtttttttgcatagcaatcaaagttgaaatttgtttgctacatcaacaaattaaggacattttcacaaactgagaaataaacaaatatgccaattcgtaggtggttttgccttatcctttgaatgtgacttaaaatcagcaatgatgatatagtaaatactgaaatttaggtgtaaatcaatacgttctacagggaaataatgaggctaagtatttttatgtttttagtggttttttagaaacctaatcttatagccgccattagcattactagagttatgcaaataattgcattataaacatgtttataacttagccaaaacattgatttttataactctccaagtatgagttgaaatttcttatgtcttttgataaactgcagtattctttaagtgtactttgtccttttgtttattgctacaatttaagaactttatttaaaaacaattttggaaggttactaggtacagcttttgcagaagaaactgaactgtagccagatggtcagcaagtaaactacatgacttagagttcttgtgcattatacattttgggtaattcaaagtactgtatttgcattgactataaagcgtcgtttgcaatatttattcttccttcatagtcccttgttgtgattatacttccagttgtttaaatgtattttaaaagactcactattaactttattcagatcttaaaagctacacctttttgaactattccagtctttctccatccaattagaatgttatggaataacatgtgaagagatacagtgaaaatcatattataatgcattgaagatatcctacatgaattatcttctattaaaatatgtcccaataaatatacccataatcagtgggtcttctactg

SEQ ID NO: 18765 - protein, 112 aa, Homo sapiens; identical to SEQ ID NO: 2296

SEQ ID NO: 18766 - DNA, 1208 bp, Homo sapiens
atggagaggagaaaacctatggtggctgtgaaggacctgatgccatgtatgtcaaattgatatcatctgatggccatgaatttattgtaaaaagagaacatgcattaacatcaggcacgataaaagccatgttgagtggcccagagagacagagtctcattctgttgcccaggctggagtgcaatggtgcggtctcagctcactgcaatctccgcctgctgggttcaggcaattctcctgcctcagagtagctggaattacaggtcagtttgctgagaacgaaaccaatgaggtcaattttagagagataccttcacatgtgctatcgaaagtatgcatgtattttacgtacaaggttcgctacactaacagctccaccgagattcctgaattcccaattgcacctgaaattgcactggaactgctgatggctgcgaacttcttagattgttaaataaaataaattataataaactgttaactcttttcagtatttaatacctgtagttcagttagtaactttttcatatatagcatgttgcctgtatgcagttgaactatataaagttcattgcaaagcagattatcttgtttttttgcatagcaatcaaagttgaaatttgtttgctacatcaacaaattaaggacattttcacaaactgagaaataaacaaatatgccaattcgtaggtggttttgccttatcctttgaatgtgacttaaaatcagcaatgatgatatagtaaatactgaaatttaggtgtaaatcaatacgttctacagggaaataatgaggctaagtatttttatgtttttagtggttttttagaaacctaatcttatagccgccattagcattactagagttatgcaaataattgcattataaacatgtttataacttagccaaaacattgatttttataactctccaagtatgagttgaaatttcttatgtcttttgataaactgcagtattctttaagtgtactttgtccttttgtttattgctacaatttaagaactttatttaaaaacaattttggaaggttactaggtacagcttttgcagaagaaactgaactgtagccagatggtcagcaagtaaactacatgacttagagttcttgtgcattatacattttgggtaattcaaagtactgtatttgcattgactataaagcgtcgtttgcaatatttattcttcc

SEQ ID NO: 18767 - protein, 68 aa, Homo sapiens; identical to SEQ ID NO: 18745

SEQ ID NO: 18768 - DNA, 1255 bp, Homo sapiens
tgttagcatttgcatagctagaaaatttgggttaattttattaccgatgtcactttcaaaagcttaattaggcagaaaaccatcctagagtgatgatatctttggagttaaggaaactactaaagttcctggggaagcaaagtagaatttcataagaacaaaatggatggagaggagaaaacctatggtggctgtgaaggacctgatgccatgtatgtcaaattgatatcatctgatggccatgaatttattgtaaaaagagaacatgcattaacatcaggcacgataaaagccatgttgagtggcccaggtcagtttgctgagaacgaaaccaatgaggtcaattttagagagataccttcacatgtgctatcgaaagtatgcatgtattttacgtacaaggttcgctacactaacagctccaccgagattcctgaattcccaattgcacctgaaattgcactggaactgctgatggctgcgaacttcttagattgttaaataaaataaattataataaactgttaactcttttcagtatttaatacctgtagttcagttagtaactttttcatatatagcatgttgcctgtatgcagttgaactatataaagttcattgcaaagcagattatcttgtttttttgcatagcaatcaaagttgaaatttgtttgctacatcaacaaattaaggacattttcacaaactgagaaataaacaaatatgccaattcgtaggtggttttgccttatcctttgaatgtgacttaaaatcagcaatgatgatatagtaaatactgaaatttaggtgtaaatcaatacgttctacagggaaataatgaggctaagtatttttatgtttttagtggttttttagaaacctaatcttatagccgccattagcattactagagttatgcaaataattgcattataaacatgtttataacttagccaaaacattgatttttataactctccaagtatgagttgaaatttcttatgtcttttgataaactgcagtattctttaagtgtactttgtccttttgtttattgctacaatttaagaactttatttaaaaacaattttggaaggttactaggtacagcttttgcagaagaaactgaactgtagccagatggtcagcaagtaaactacatgacttagagttcttgtgcattatacattttgggtaattcaaagtactgtatttgcattgactataaagcgtcgtttgcaatatttattcttcc

SEQ ID NO: 18769 - protein, 112 aa, Homo sapiens; identical to SEQ ID NO: 2296

SEQ ID NO: 18770 - DNA, 1377 bp, Homo sapiens
gggagaagagggcggcgggacctttcctggcgccgctcgcagtttacatgtggatttattcattctggagatacaatggcaaggaaacagctgtgagtcttgctgtgtggcccaggctggagtgcccggctggtctcaaattcctgacctcaagtgatctccctcccaaagtgttgcgattgcaggtgtgagccactgcacctggctgctgagaaatctttgcctacagtgagggaaactactaaagttcctggggaagcaaagtagaatttcataagaacaaaatggatggagaggagaaaacctatggtggctgtgaaggacctgatgccatgtatgtcaaattgatatcatctgatggccatgaatttattgtaaaaagagaacatgcattaacatcaggcacgataaaagccatgttgagtggcccaggtcagtttgctgagaacgaaaccaatgaggtcaattttagagagataccttcacatgtgctatcgaaagtatgcatgtattttacgtacaaggttcgctacactaacagctccaccgagattcctgaattcccaattgcacctgaaattgcactggaactgctgatggctgcgaacttcttagattgttaaataaaataaattataataaactgttaactcttttcagtatttaatacctgtagttcagttagtaactttttcatatatagcatgttgcctgtatgcagttgaactatataaagttcattgcaaagcagattatcttgtttttttgcatagcaatcaaagttgaaatttgtttgctacatcaacaaattaaggacattttcacaaactgagaaataaacaaatatgccaattcgtaggtggttttgccttatcctttgaatgtgacttaaaatcagcaatgatgatatagtaaatactgaaatttaggtgtaaatcaatacgttctacagggaaataatgaggctaagtatttttatgtttttagtggttttttagaaacctaatcttatagccgccattagcattactagagttatgcaaataattgcattataaacatgtttataacttagccaaaacattgatttttataactctccaagtatgagttgaaatttcttatgtcttttgataaactgcagtattctttaagtgtactttgtccttttgtttattgctacaatttaagaactttatttaaaaacaattttggaaggttactaggtacagcttttgcagaagaaactgaactgtagccagatggtcagcaagtaaactacatgacttagagttcttgtgcattatacattttgggtaattcaaagtactgtatttgcattgactataaagcgtcgtttgcaatatttattcttcc

SEQ ID NO: 18771 - protein, 112 aa, Homo sapiens; identical to SEQ ID NO: 2296

SEQ ID NO: 18772 - DNA, 1208 bp, Homo sapiens
acccggctgcggtggctgcgggactgacgagtgagtctcgggctggggcggaaacggagctccgggaaactactaaagttcctggggaagcaaagtagaatttcataagaacaaaatggatggagaggagaaaacctatggtggctgtgaaggacctgatgccatgtatgtcaaattgatatcatctgatggccatgaatttattgtaaaaagagaacatgcattaacatcaggcacgataaaagccatgttgagtggcccaggtcagtttgctgagaacgaaaccaatgaggtcaattttagagagataccttcacatgtgctatcgaaagtatgcatgtattttacgtacaaggttcgctacactaacagctccaccgagattcctgaattcccaattgcacctgaaattgcactggaactgctgatggctgcgaacttcttagattgttaaataaaataaattataataaactgttaactcttttcagtatttaatacctgtagttcagttagtaactttttcatatatagcatgttgcctgtatgcagttgaactatataaagttcattgcaaagcagattatcttgtttttttgcatagcaatcaaagttgaaatttgtttgctacatcaacaaattaaggacattttcacaaactgagaaataaacaaatatgccaattcgtaggtggttttgccttatcctttgaatgtgacttaaaatcagcaatgatgatatagtaaatactgaaatttaggtgtaaatcaatacgttctacagggaaataatgaggctaagtatttttatgtttttagtggttttttagaaacctaatcttatagccgccattagcattactagagttatgcaaataattgcattataaacatgtttataacttagccaaaacattgatttttataactctccaagtatgagttgaaatttcttatgtcttttgataaactgcagtattctttaagtgtactttgtccttttgtttattgctacaatttaagaactttatttaaaaacaattttggaaggttactaggtacagcttttgcagaagaaactgaactgtagccagatggtcagcaagtaaactacatgacttagagttcttgtgcattatacattttgggtaattcaaagtactgtatttgcattgactataaagcgtcgtttgcaatatttattcttcc

SEQ ID NO: 18773 - protein, 112 aa, Homo sapiens; identical to SEQ ID NO: 2296

SEQ ID NO: 18774 - DNA, 1310 bp, Homo sapiens
aggggctgtggcagtacgcggggacccggctgcggtggctgcgggactgacgagatcatcagggaaggaagacctctctgaggagttgatgttttacctggagacctaaatgatgaggatttaaaagcttttcggacaacagcaattacaaatgcaaagaccttgaggaaactactaaagttcctggggaagcaaagtagaatttcataagaacaaaatggatggagaggagaaaacctatggtggctgtgaaggacctgatgccatgtatgtcaaattgatatcatctgatggccatgaatttattgtaaaaagagaacatgcattaacatcaggcacgataaaagccatgttgagtggcccaggtcagtttgctgagaacgaaaccaatgaggtcaattttagagagataccttcacatgtgctatcgaaagtatgcatgtattttacgtacaaggttcgctacactaacagctccaccgagattcctgaattcccaattgcacctgaaattgcactggaactgctgatggctgcgaacttcttagattgttaaataaaataaattataataaactgttaactcttttcagtatttaatacctgtagttcagttagtaactttttcatatatagcatgttgcctgtatgcagttgaactatataaagttcattgcaaagcagattatcttgtttttttgcatagcaatcaaagttgaaatttgtttgctacatcaacaaattaaggacattttcacaaactgagaaataaacaaatatgccaattcgtaggtggttttgccttatcctttgaatgtgacttaaaatcagcaatgatgatatagtaaatactgaaatttaggtgtaaatcaatacgttctacagggaaataatgaggctaagtatttttatgtttttagtggttttttagaaacctaatcttatagccgccattagcattactagagttatgcaaataattgcattataaacatgtttataacttagccaaaacattgatttttataactctccaagtatgagttgaaatttcttatgtcttttgataaactgcagtattctttaagtgtactttgtccttttgtttattgctacaatttaagaactttatttaaaaacaattttggaaggttactaggtacagcttttgcagaagaaactgaactgtagccagatggtcagcaagtaaactacatgacttagagttcttgtgcattatacattttgggtaattcaaagtactgtatttgcattgactataaagcgtcgtttgcaatatttattcttcc

SEQ ID NO: 18775 - protein, 112 aa, Homo sapiens; identical to SEQ ID NO: 2296

SEQ ID NO: 18776 - DNA, 1458 bp, Homo sapiens
ctcaccaggtacggatctcccgcgcgtcgccgaaagcggctctgacccagcggaagtaattctttcgactgccccggaacccaccggagcaggcagctgggggtgggggggcggccctgggataggggctgtggcagtacgcggggacccggctgcggtggctgcgggactgacgaagtcttgctgtgtggcccaggctggagtgcccggctggtctcaaattcctgacctcaagtgatctccctcccaaagtgttgcgattgcaggtgtgagccactgcacctggctgctgagaaatctttgcctacagtgagggaaactactaaagttcctggggaagcaaagtagaatttcataagaacaaaatggatggagaggagaaaacctatggtggctgtgaaggacctgatgccatgtatgtcaaattgatatcatctgatggccatgaatttattgtaaaaagagaacatgcattaacatcaggcacgataaaagccatgttgagtggcccaggtcagtttgctgagaacgaaaccaatgaggtcaattttagagagataccttcacatgtgctatcgaaagtatgcatgtattttacgtacaaggttcgctacactaacagctccaccgagattcctgaattcccaattgcacctgaaattgcactggaactgctgatggctgcgaacttcttagattgttaaataaaataaattataataaactgttaactcttttcagtatttaatacctgtagttcagttagtaactttttcatatatagcatgttgcctgtatgcagttgaactatataaagttcattgcaaagcagattatcttgtttttttgcatagcaatcaaagttgaaatttgtttgctacatcaacaaattaaggacattttcacaaactgagaaataaacaaatatgccaattcgtaggtggttttgccttatcctttgaatgtgacttaaaatcagcaatgatgatatagtaaatactgaaatttaggtgtaaatcaatacgttctacagggaaataatgaggctaagtatttttatgtttttagtggttttttagaaacctaatcttatagccgccattagcattactagagttatgcaaataattgcattataaacatgtttataacttagccaaaacattgatttttataactctccaagtatgagttgaaatttcttatgtcttttgataaactgcagtattctttaagtgtactttgtccttttgtttattgctacaatttaagaactttatttaaaaacaattttggaaggttactaggtacagcttttgcagaagaaactgaactgtagccagatggtcagcaagtaaactacatgacttagagttcttgtgcattatacattttgggtaattcaaagtactgtatttgcattgactataaagcgtcgtttgcaatatttattcttcc

SEQ ID NO: 18777 - protein, 112 aa, Homo sapiens; identical to SEQ ID NO: 2296

SEQ ID NO: 18778 - DNA, 1270 bp, Homo sapiens
ctcgcctcaccaggtacggatctcccgcgcgtcgccgaaagcggctctgacccagcggaagtaattctttcgactgccccggaacccaccggagcaggcagctgggggtgggggggcggccctgggataggggctgtggcagtacgcggggacccggctgcggtggctgcgggactgacgaatggagaggagaaaacctatggtggctgtgaaggacctgatgccatgtatgtcaaattgatatcatctgatggccatgaatttattgtaaaaagagaacatgcattaacatcaggcacgataaaagccatgttgagtggcccaggtcagtttgctgagaacgaaaccaatgaggtcaattttagagagataccttcacatgtgctatcgaaagtatgcatgtattttacgtacaaggttcgctacactaacagctccaccgagattcctgaattcccaattgcacctgaaattgcactggaactgctgatggctgcgaacttcttagattgttaaataaaataaattataataaactgttaactcttttcagtatttaatacctgtagttcagttagtaactttttcatatatagcatgttgcctgtatgcagttgaactatataaagttcattgcaaagcagattatcttgtttttttgcatagcaatcaaagttgaaatttgtttgctacatcaacaaattaaggacattttcacaaactgagaaataaacaaatatgccaattcgtaggtggttttgccttatcctttgaatgtgacttaaaatcagcaatgatgatatagtaaatactgaaatttaggtgtaaatcaatacgttctacagggaaataatgaggctaagtatttttatgtttttagtggttttttagaaacctaatcttatagccgccattagcattactagagttatgcaaataattgcattataaacatgtttataacttagccaaaacattgatttttataactctccaagtatgagttgaaatttcttatgtcttttgataaactgcagtattctttaagtgtactttgtccttttgtttattgctacaatttaagaactttatttaaaaacaattttggaaggttactaggtacagcttttgcagaagaaactgaactgtagccagatggtcagcaagtaaactacatgacttagagttcttgtgcattatacattttgggtaattcaaagtactgtatttgcattgactataaagcgtcgtttgcaatatttattcttcc

SEQ ID NO: 18779 - protein, 96 aa, Homo sapiens; identical to SEQ ID NO: 18757

SEQ ID NO: 18780 - DNA, 1337 bp, Homo sapiens
cacactctgcgtcctcgcctcaccaggtacggatctcccgcgcgtcgccgaaagcggctctgacccagcggaagtaattctttcgactgccccggaacccaccggagcaggcagctgggggtgggggggcggccctgggataggggctgtggcagtacgcggggacccggctgcggtggctgcgggactgacgagaaactactaaagttcctggggaagcaaagtagaatttcataagaacaaaatggatggagaggagaaaacctatggtggctgtgaaggacctgatgccatgtatgtcaaattgatatcatctgatggccatgaatttattgtaaaaagagaacatgcattaacatcaggcacgataaaagccatgttgagtggcccaggtcagtttgctgagaacgaaaccaatgaggtcaattttagagagataccttcacatgtgctatcgaaagtatgcatgtattttacgtacaaggttcgctacactaacagctccaccgagattcctgaattcccaattgcacctgaaattgcactggaactgctgatggctgcgaacttcttagattgttaaataaaataaattataataaactgttaactcttttcagtatttaatacctgtagttcagttagtaactttttcatatatagcatgttgcctgtatgcagttgaactatataaagttcattgcaaagcagattatcttgtttttttgcatagcaatcaaagttgaaatttgtttgctacatcaacaaattaaggacattttcacaaactgagaaataaacaaatatgccaattcgtaggtggttttgccttatcctttgaatgtgacttaaaatcagcaatgatgatatagtaaatactgaaatttaggtgtaaatcaatacgttctacagggaaataatgaggctaagtatttttatgtttttagtggttttttagaaacctaatcttatagccgccattagcattactagagttatgcaaataattgcattataaacatgtttataacttagccaaaacattgatttttataactctccaagtatgagttgaaatttcttatgtcttttgataaactgcagtattctttaagtgtactttgtccttttgtttattgctacaatttaagaactttatttaaaaacaattttggaaggttactaggtacagcttttgcagaagaaactgaactgtagccagatggtcagcaagtaaactacatgacttagagttcttgtgcattatacattttgggtaattcaaagtactgtatttgcattgactataaagcgtcgtttgcaatatttattcttcc

SEQ ID NO: 18781 - protein, 112 aa, Homo sapiens; identical to SEQ ID NO: 2296

SEQ ID NO: 18782 - DNA, 1119 bp, Homo sapiens
gcgacacactctgcgtcctcgcctcaccagatggagaggagaaaacctatggtggctgtgaaggacctgatgccatgtatgtcaaattgatatcatctgatggccatgaatttattgtaaaaagagaacatgcattaacatcaggcacgataaaagccatgttgagtggcccaggtcagtttgctgagaacgaaaccaatgaggtcaattttagagagataccttcacatgtgctatcgaaagtatgcatgtattttacgtacaaggttcgctacactaacagctccaccgagattcctgaattcccaattgcacctgaaattgcactggaactgctgatggctgcgaacttcttagattgttaaataaaataaattataataaactgttaactcttttcagtatttaatacctgtagttcagttagtaactttttcatatatagcatgttgcctgtatgcagttgaactatataaagttcattgcaaagcagattatcttgtttttttgcatagcaatcaaagttgaaatttgtttgctacatcaacaaattaaggacattttcacaaactgagaaataaacaaatatgccaattcgtaggtggttttgccttatcctttgaatgtgacttaaaatcagcaatgatgatatagtaaatactgaaatttaggtgtaaatcaatacgttctacagggaaataatgaggctaagtatttttatgtttttagtggttttttagaaacctaatcttatagccgccattagcattactagagttatgcaaataattgcattataaacatgtttataacttagccaaaacattgatttttataactctccaagtatgagttgaaatttcttatgtcttttgataaactgcagtattctttaagtgtactttgtccttttgtttattgctacaatttaagaactttatttaaaaacaattttggaaggttactaggtacagcttttgcagaagaaactgaactgtagccagatggtcagcaagtaaactacatgacttagagttcttgtgcattatacattttgggtaattcaaagtactgtatttgcattgactataaagcgtcgtttgcaatatttattcttcc

SEQ ID NO: 18783 - protein, 96 aa, Homo sapiens; identical to SEQ ID NO: 18757

SEQ ID NO: 18784 - DNA, 1185 bp, Homo sapiens
agacggaagtgagcgacacactctgcgtcctcgcctcaccaggaaactactaaagttcctggggaagcaaagtagaatttcataagaacaaaatggatggagaggagaaaacctatggtggctgtgaaggacctgatgccatgtatgtcaaattgatatcatctgatggccatgaatttattgtaaaaagagaacatgcattaacatcaggcacgataaaagccatgttgagtggcccaggtcagtttgctgagaacgaaaccaatgaggtcaattttagagagataccttcacatgtgctatcgaaagtatgcatgtattttacgtacaaggttcgctacactaacagctccaccgagattcctgaattcccaattgcacctgaaattgcactggaactgctgatggctgcgaacttcttagattgttaaataaaataaattataataaactgttaactcttttcagtatttaatacctgtagttcagttagtaactttttcatatatagcatgttgcctgtatgcagttgaactatataaagttcattgcaaagcagattatcttgtttttttgcatagcaatcaaagttgaaatttgtttgctacatcaacaaattaaggacattttcacaaactgagaaataaacaaatatgccaattcgtaggtggttttgccttatcctttgaatgtgacttaaaatcagcaatgatgatatagtaaatactgaaatttaggtgtaaatcaatacgttctacagggaaataatgaggctaagtatttttatgtttttagtggttttttagaaacctaatcttatagccgccattagcattactagagttatgcaaataattgcattataaacatgtttataacttagccaaaacattgatttttataactctccaagtatgagttgaaatttcttatgtcttttgataaactgcagtattctttaagtgtactttgtccttttgtttattgctacaatttaagaactttatttaaaaacaattttggaaggttactaggtacagcttttgcagaagaaactgaactgtagccagatggtcagcaagtaaactacatgacttagagttcttgtgcattatacattttgggtaattcaaagtactgtatttgcattgactataaagcgtcgtttgcaatatttattcttcc

SEQ ID NO: 18785 - protein, 112 aa, Homo sapiens; identical to SEQ ID NO: 2296

SEQ ID NO: 18786 - DNA, 1324 bp, Homo sapiens
agacggaagtgagcgacacactctgcgtcctcgcctcaccagagtcttgctgtgtggcccaggctggagtgcccggctggtctcaaattcctgacctcaagtgatctccctcccaaagtgttgcgattgcaggtgtgagccactgcacctggctgctgagaaatctttgcctacagtgagggaaactactaaagttcctggggaagcaaagtagaatttcataagaacaaaatggatggagaggagaaaacctatggtggctgtgaaggacctgatgccatgtatgtcaaattgatatcatctgatggccatgaatttattgtaaaaagagaacatgcattaacatcaggcacgataaaagccatgttgagtggcccaggtcagtttgctgagaacgaaaccaatgaggtcaattttagagagataccttcacatgtgctatcgaaagtatgcatgtattttacgtacaaggttcgctacactaacagctccaccgagattcctgaattcccaattgcacctgaaattgcactggaactgctgatggctgcgaacttcttagattgttaaataaaataaattataataaactgttaactcttttcagtatttaatacctgtagttcagttagtaactttttcatatatagcatgttgcctgtatgcagttgaactatataaagttcattgcaaagcagattatcttgtttttttgcatagcaatcaaagttgaaatttgtttgctacatcaacaaattaaggacattttcacaaactgagaaataaacaaatatgccaattcgtaggtggttttgccttatcctttgaatgtgacttaaaatcagcaatgatgatatagtaaatactgaaatttaggtgtaaatcaatacgttctacagggaaataatgaggctaagtatttttatgtttttagtggttttttagaaacctaatcttatagccgccattagcattactagagttatgcaaataattgcattataaacatgtttataacttagccaaaacattgatttttataactctccaagtatgagttgaaatttcttatgtcttttgataaactgcagtattctttaagtgtactttgtccttttgtttattgctacaatttaagaactttatttaaaaacaattttggaaggttactaggtacagcttttgcagaagaaactgaactgtagccagatggtcagcaagtaaactacatgacttagagttcttgtgcattatacattttgggtaattcaaagtactgtatttgcattgactataaagcgtcgtttgcaatatttattcttcc

SEQ ID NO: 18787 - protein, 112 aa, Homo sapiens; identical to SEQ ID NO: 2296

SEQ ID NO: 18788 - DNA, 983 bp, Homo sapiens
atggagaggagaaaacctatggtggctgtgaaggacctgatgccatgtatgtcaaattgatatcatctgatggccatgaatttattgtaaaaagagaacatgcattaacatcaggcacgataaaagccatgttgagtggcccagagagacagagtctcattctgttgcccaggctggagtgcaatggtgcggtctcagctcactgcaatctccgcctgctgggttcaggcaattctcctgcctcagagtagctggaattacaggtcagtttgctgagaacgaaaccaatgaggtcaattttagagagataccttcacatgtgctatcgaaagtatgcatgtattttacgtacaaggttcgctacactaacagctccaccgagattcctgaattcccaattgcacctgaaattgcactggaactgctgatggctgcgaacttcttagattgttaaataaaataaattataataaactgttaactcttttcagtatttaatacctgtagttcagttagtaactttttcatatatagcatgttgcctgtatgcagttgaactatataaagttcattgcaaagcagattatcttgtttttttgcatagcaatcaaagttgaaatttgtttgctacatcaacaaattaaggacattttcacaaactgagaaataaacaaatatgccaattcgtaggtggttttgccttatcctttgaatgtgacttaaaatcagcaatgatgatatagtaaatactgaaatttaggtgtaaatcaatacgttctacagggaaataatgaggctaagtatttttatgtttttagtggttttttagaaacctaatcttatagccgccattagcattactagagttatgcaaataattgcattataaacatgtttataacttagccaaaacattgatttttataactctccaagtatgagttgaaatttcttatgtcttttgataaactgcagtattcttt

SEQ ID NO: 18789 - protein, 68 aa, Homo sapiens; identical to SEQ ID NO: 18745

SEQ ID NO: 18790 - DNA, 1030 bp, Homo sapiens
tgttagcatttgcatagctagaaaatttgggttaattttattaccgatgtcactttcaaaagcttaattaggcagaaaaccatcctagagtgatgatatctttggagttaaggaaactactaaagttcctggggaagcaaagtagaatttcataagaacaaaatggatggagaggagaaaacctatggtggctgtgaaggacctgatgccatgtatgtcaaattgatatcatctgatggccatgaatttattgtaaaaagagaacatgcattaacatcaggcacgataaaagccatgttgagtggcccaggtcagtttgctgagaacgaaaccaatgaggtcaattttagagagataccttcacatgtgctatcgaaagtatgcatgtattttacgtacaaggttcgctacactaacagctccaccgagattcctgaattcccaattgcacctgaaattgcactggaactgctgatggctgcgaacttcttagattgttaaataaaataaattataataaactgttaactcttttcagtatttaatacctgtagttcagttagtaactttttcatatatagcatgttgcctgtatgcagttgaactatataaagttcattgcaaagcagattatcttgtttttttgcatagcaatcaaagttgaaatttgtttgctacatcaacaaattaaggacattttcacaaactgagaaataaacaaatatgccaattcgtaggtggttttgccttatcctttgaatgtgacttaaaatcagcaatgatgatatagtaaatactgaaatttaggtgtaaatcaatacgttctacagggaaataatgaggctaagtatttttatgtttttagtggttttttagaaacctaatcttatagccgccattagcattactagagttatgcaaataattgcattataaacatgtttataacttagccaaaacattgatttttataactctccaagtatgagttgaaatttcttatgtcttttgataaactgcagtattcttt

SEQ ID NO: 18791 - protein, 112 aa, Homo sapiens; identical to SEQ ID NO: 2296

SEQ ID NO: 18792 - DNA, 1152 bp, Homo sapiens
gggagaagagggcggcgggacctttcctggcgccgctcgcagtttacatgtggatttattcattctggagatacaatggcaaggaaacagctgtgagtcttgctgtgtggcccaggctggagtgcccggctggtctcaaattcctgacctcaagtgatctccctcccaaagtgttgcgattgcaggtgtgagccactgcacctggctgctgagaaatctttgcctacagtgagggaaactactaaagttcctggggaagcaaagtagaatttcataagaacaaaatggatggagaggagaaaacctatggtggctgtgaaggacctgatgccatgtatgtcaaattgatatcatctgatggccatgaatttattgtaaaaagagaacatgcattaacatcaggcacgataaaagccatgttgagtggcccaggtcagtttgctgagaacgaaaccaatgaggtcaattttagagagataccttcacatgtgctatcgaaagtatgcatgtattttacgtacaaggttcgctacactaacagctccaccgagattcctgaattcccaattgcacctgaaattgcactggaactgctgatggctgcgaacttcttagattgttaaataaaataaattataataaactgttaactcttttcagtatttaatacctgtagttcagttagtaactttttcatatatagcatgttgcctgtatgcagttgaactatataaagttcattgcaaagcagattatcttgtttttttgcatagcaatcaaagttgaaatttgtttgctacatcaacaaattaaggacattttcacaaactgagaaataaacaaatatgccaattcgtaggtggttttgccttatcctttgaatgtgacttaaaatcagcaatgatgatatagtaaatactgaaatttaggtgtaaatcaatacgttctacagggaaataatgaggctaagtatttttatgtttttagtggttttttagaaacctaatcttatagccgccattagcattactagagttatgcaaataattgcattataaacatgtttataacttagccaaaacattgatttttataactctccaagtatgagttgaaatttcttatgtcttttgataaactgcagtattcttt

SEQ ID NO: 18793 - protein, 112 aa, Homo sapiens; identical to SEQ ID NO: 2296

SEQ ID NO: 18794 - DNA, 983 bp, Homo sapiens
acccggctgcggtggctgcgggactgacgagtgagtctcgggctggggcggaaacggagctccgggaaactactaaagttcctggggaagcaaagtagaatttcataagaacaaaatggatggagaggagaaaacctatggtggctgtgaaggacctgatgccatgtatgtcaaattgatatcatctgatggccatgaatttattgtaaaaagagaacatgcattaacatcaggcacgataaaagccatgttgagtggcccaggtcagtttgctgagaacgaaaccaatgaggtcaattttagagagataccttcacatgtgctatcgaaagtatgcatgtattttacgtacaaggttcgctacactaacagctccaccgagattcctgaattcccaattgcacctgaaattgcactggaactgctgatggctgcgaacttcttagattgttaaataaaataaattataataaactgttaactcttttcagtatttaatacctgtagttcagttagtaactttttcatatatagcatgttgcctgtatgcagttgaactatataaagttcattgcaaagcagattatcttgtttttttgcatagcaatcaaagttgaaatttgtttgctacatcaacaaattaaggacattttcacaaactgagaaataaacaaatatgccaattcgtaggtggttttgccttatcctttgaatgtgacttaaaatcagcaatgatgatatagtaaatactgaaatttaggtgtaaatcaatacgttctacagggaaataatgaggctaagtatttttatgtttttagtggttttttagaaacctaatcttatagccgccattagcattactagagttatgcaaataattgcattataaacatgtttataacttagccaaaacattgatttttataactctccaagtatgagttgaaatttcttatgtcttttgataaactgcagtattcttt

SEQ ID NO: 18795 - protein, 112 aa, Homo sapiens; identical to SEQ ID NO: 2296

SEQ ID NO: 18796 - DNA, 1085 bp, Homo sapiens
aggggctgtggcagtacgcggggacccggctgcggtggctgcgggactgacgagatcatcagggaaggaagacctctctgaggagttgatgttttacctggagacctaaatgatgaggatttaaaagcttttcggacaacagcaattacaaatgcaaagaccttgaggaaactactaaagttcctggggaagcaaagtagaatttcataagaacaaaatggatggagaggagaaaacctatggtggctgtgaaggacctgatgccatgtatgtcaaattgatatcatctgatggccatgaatttattgtaaaaagagaacatgcattaacatcaggcacgataaaagccatgttgagtggcccaggtcagtttgctgagaacgaaaccaatgaggtcaattttagagagataccttcacatgtgctatcgaaagtatgcatgtattttacgtacaaggttcgctacactaacagctccaccgagattcctgaattcccaattgcacctgaaattgcactggaactgctgatggctgcgaacttcttagattgttaaataaaataaattataataaactgttaactcttttcagtatttaatacctgtagttcagttagtaactttttcatatatagcatgttgcctgtatgcagttgaactatataaagttcattgcaaagcagattatcttgtttttttgcatagcaatcaaagttgaaatttgtttgctacatcaacaaattaaggacattttcacaaactgagaaataaacaaatatgccaattcgtaggtggttttgccttatcctttgaatgtgacttaaaatcagcaatgatgatatagtaaatactgaaatttaggtgtaaatcaatacgttctacagggaaataatgaggctaagtatttttatgtttttagtggttttttagaaacctaatcttatagccgccattagcattactagagttatgcaaataattgcattataaacatgtttataacttagccaaaacattgatttttataactctccaagtatgagttgaaatttcttatgtcttttgataaactgcagtattcttt

SEQ ID NO: 18797 - protein, 112 aa, Homo sapiens; identical to SEQ ID NO: 2296

SEQ ID NO: 18798 - DNA, 1233 bp, Homo sapiens
ctcaccaggtacggatctcccgcgcgtcgccgaaagcggctctgacccagcggaagtaattctttcgactgccccggaacccaccggagcaggcagctgggggtgggggggcggccctgggataggggctgtggcagtacgcggggacccggctgcggtggctgcgggactgacgaagtcttgctgtgtggcccaggctggagtgcccggctggtctcaaattcctgacctcaagtgatctccctcccaaagtgttgcgattgcaggtgtgagccactgcacctggctgctgagaaatctttgcctacagtgagggaaactactaaagttcctggggaagcaaagtagaatttcataagaacaaaatggatggagaggagaaaacctatggtggctgtgaaggacctgatgccatgtatgtcaaattgatatcatctgatggccatgaatttattgtaaaaagagaacatgcattaacatcaggcacgataaaagccatgttgagtggcccaggtcagtttgctgagaacgaaaccaatgaggtcaattttagagagataccttcacatgtgctatcgaaagtatgcatgtattttacgtacaaggttcgctacactaacagctccaccgagattcctgaattcccaattgcacctgaaattgcactggaactgctgatggctgcgaacttcttagattgttaaataaaataaattataataaactgttaactcttttcagtatttaatacctgtagttcagttagtaactttttcatatatagcatgttgcctgtatgcagttgaactatataaagttcattgcaaagcagattatcttgtttttttgcatagcaatcaaagttgaaatttgtttgctacatcaacaaattaaggacattttcacaaactgagaaataaacaaatatgccaattcgtaggtggttttgccttatcctttgaatgtgacttaaaatcagcaatgatgatatagtaaatactgaaatttaggtgtaaatcaatacgttctacagggaaataatgaggctaagtatttttatgtttttagtggttttttagaaacctaatcttatagccgccattagcattactagagttatgcaaataattgcattataaacatgtttataacttagccaaaacattgatttttataactctccaagtatgagttgaaatttcttatgtcttttgataaactgcagtattcttt

SEQ ID NO: 18799 - protein, 112 aa, Homo sapiens; identical to SEQ ID NO: 2296

SEQ ID NO: 18800 - DNA, 1045 bp, Homo sapiens
ctcgcctcaccaggtacggatctcccgcgcgtcgccgaaagcggctctgacccagcggaagtaattctttcgactgccccggaacccaccggagcaggcagctgggggtgggggggcggccctgggataggggctgtggcagtacgcggggacccggctgcggtggctgcgggactgacgaatggagaggagaaaacctatggtggctgtgaaggacctgatgccatgtatgtcaaattgatatcatctgatggccatgaatttattgtaaaaagagaacatgcattaacatcaggcacgataaaagccatgttgagtggcccaggtcagtttgctgagaacgaaaccaatgaggtcaattttagagagataccttcacatgtgctatcgaaagtatgcatgtattttacgtacaaggttcgctacactaacagctccaccgagattcctgaattcccaattgcacctgaaattgcactggaactgctgatggctgcgaacttcttagattgttaaataaaataaattataataaactgttaactcttttcagtatttaatacctgtagttcagttagtaactttttcatatatagcatgttgcctgtatgcagttgaactatataaagttcattgcaaagcagattatcttgtttttttgcatagcaatcaaagttgaaatttgtttgctacatcaacaaattaaggacattttcacaaactgagaaataaacaaatatgccaattcgtaggtggttttgccttatcctttgaatgtgacttaaaatcagcaatgatgatatagtaaatactgaaatttaggtgtaaatcaatacgttctacagggaaataatgaggctaagtatttttatgtttttagtggttttttagaaacctaatcttatagccgccattagcattactagagttatgcaaataattgcattataaacatgtttataacttagccaaaacattgatttttataactctccaagtatgagttgaaatttcttatgtcttttgataaactgcagtattcttt

SEQ ID NO: 18801 - protein, 96 aa, Homo sapiens; identical to SEQ ID NO: 18757

SEQ ID NO: 18802 - DNA, 1112 bp, Homo sapiens
cacactctgcgtcctcgcctcaccaggtacggatctcccgcgcgtcgccgaaagcggctctgacccagcggaagtaattctttcgactgccccggaacccaccggagcaggcagctgggggtgggggggcggccctgggataggggctgtggcagtacgcggggacccggctgcggtggctgcgggactgacgagaaactactaaagttcctggggaagcaaagtagaatttcataagaacaaaatggatggagaggagaaaacctatggtggctgtgaaggacctgatgccatgtatgtcaaattgatatcatctgatggccatgaatttattgtaaaaagagaacatgcattaacatcaggcacgataaaagccatgttgagtggcccaggtcagtttgctgagaacgaaaccaatgaggtcaattttagagagataccttcacatgtgctatcgaaagtatgcatgtattttacgtacaaggttcgctacactaacagctccaccgagattcctgaattcccaattgcacctgaaattgcactggaactgctgatggctgcgaacttcttagattgttaaataaaataaattataataaactgttaactcttttcagtatttaatacctgtagttcagttagtaactttttcatatatagcatgttgcctgtatgcagttgaactatataaagttcattgcaaagcagattatcttgtttttttgcatagcaatcaaagttgaaatttgtttgctacatcaacaaattaaggacattttcacaaactgagaaataaacaaatatgccaattcgtaggtggttttgccttatcctttgaatgtgacttaaaatcagcaatgatgatatagtaaatactgaaatttaggtgtaaatcaatacgttctacagggaaataatgaggctaagtatttttatgtttttagtggttttttagaaacctaatcttatagccgccattagcattactagagttatgcaaataattgcattataaacatgtttataacttagccaaaacattgatttttataactctccaagtatgagttgaaatttcttatgtcttttgataaactgcagtattcttt

SEQ ID NO: 18803 - protein, 112 aa, Homo sapiens; identical to SEQ ID NO: 2296

SEQ ID NO: 18804 - DNA, 894 bp, Homo sapiens
gcgacacactctgcgtcctcgcctcaccagatggagaggagaaaacctatggtggctgtgaaggacctgatgccatgtatgtcaaattgatatcatctgatggccatgaatttattgtaaaaagagaacatgcattaacatcaggcacgataaaagccatgttgagtggcccaggtcagtttgctgagaacgaaaccaatgaggtcaattttagagagataccttcacatgtgctatcgaaagtatgcatgtattttacgtacaaggttcgctacactaacagctccaccgagattcctgaattcccaattgcacctgaaattgcactggaactgctgatggctgcgaacttcttagattgttaaataaaataaattataataaactgttaactcttttcagtatttaatacctgtagttcagttagtaactttttcatatatagcatgttgcctgtatgcagttgaactatataaagttcattgcaaagcagattatcttgtttttttgcatagcaatcaaagttgaaatttgtttgctacatcaacaaattaaggacattttcacaaactgagaaataaacaaatatgccaattcgtaggtggttttgccttatcctttgaatgtgacttaaaatcagcaatgatgatatagtaaatactgaaatttaggtgtaaatcaatacgttctacagggaaataatgaggctaagtatttttatgtttttagtggttttttagaaacctaatcttatagccgccattagcattactagagttatgcaaataattgcattataaacatgtttataacttagccaaaacattgatttttataactctccaagtatgagttgaaatttcttatgtcttttgataaactgcagtattcttt

SEQ ID NO: 18805 - protein, 96 aa, Homo sapiens; identical to SEQ ID NO: 18757

SEQ ID NO: 18806 - DNA, 960 bp, Homo sapiens
agacggaagtgagcgacacactctgcgtcctcgcctcaccaggaaactactaaagttcctggggaagcaaagtagaatttcataagaacaaaatggatggagaggagaaaacctatggtggctgtgaaggacctgatgccatgtatgtcaaattgatatcatctgatggccatgaatttattgtaaaaagagaacatgcattaacatcaggcacgataaaagccatgttgagtggcccaggtcagtttgctgagaacgaaaccaatgaggtcaattttagagagataccttcacatgtgctatcgaaagtatgcatgtattttacgtacaaggttcgctacactaacagctccaccgagattcctgaattcccaattgcacctgaaattgcactggaactgctgatggctgcgaacttcttagattgttaaataaaataaattataataaactgttaactcttttcagtatttaatacctgtagttcagttagtaactttttcatatatagcatgttgcctgtatgcagttgaactatataaagttcattgcaaagcagattatcttgtttttttgcatagcaatcaaagttgaaatttgtttgctacatcaacaaattaaggacattttcacaaactgagaaataaacaaatatgccaattcgtaggtggttttgccttatcctttgaatgtgacttaaaatcagcaatgatgatatagtaaatactgaaatttaggtgtaaatcaatacgttctacagggaaataatgaggctaagtatttttatgtttttagtggttttttagaaacctaatcttatagccgccattagcattactagagttatgcaaataattgcattataaacatgtttataacttagccaaaacattgatttttataactctccaagtatgagttgaaatttcttatgtcttttgataaactgcagtattcttt

SEQ ID NO: 18807 - protein, 112 aa, Homo sapiens; identical to SEQ ID NO: 2296

SEQ ID NO: 18808 - DNA, 1099 bp, Homo sapiens
agacggaagtgagcgacacactctgcgtcctcgcctcaccagagtcttgctgtgtggcccaggctggagtgcccggctggtctcaaattcctgacctcaagtgatctccctcccaaagtgttgcgattgcaggtgtgagccactgcacctggctgctgagaaatctttgcctacagtgagggaaactactaaagttcctggggaagcaaagtagaatttcataagaacaaaatggatggagaggagaaaacctatggtggctgtgaaggacctgatgccatgtatgtcaaattgatatcatctgatggccatgaatttattgtaaaaagagaacatgcattaacatcaggcacgataaaagccatgttgagtggcccaggtcagtttgctgagaacgaaaccaatgaggtcaattttagagagataccttcacatgtgctatcgaaagtatgcatgtattttacgtacaaggttcgctacactaacagctccaccgagattcctgaattcccaattgcacctgaaattgcactggaactgctgatggctgcgaacttcttagattgttaaataaaataaattataataaactgttaactcttttcagtatttaatacctgtagttcagttagtaactttttcatatatagcatgttgcctgtatgcagttgaactatataaagttcattgcaaagcagattatcttgtttttttgcatagcaatcaaagttgaaatttgtttgctacatcaacaaattaaggacattttcacaaactgagaaataaacaaatatgccaattcgtaggtggttttgccttatcctttgaatgtgacttaaaatcagcaatgatgatatagtaaatactgaaatttaggtgtaaatcaatacgttctacagggaaataatgaggctaagtatttttatgtttttagtggttttttagaaacctaatcttatagccgccattagcattactagagttatgcaaataattgcattataaacatgtttataacttagccaaaacattgatttttataactctccaagtatgagttgaaatttcttatgtcttttgataaactgcagtattcttt

SEQ ID NO: 18809 - protein, 112 aa, Homo sapiens; identical to SEQ ID NO: 2296

SEQ ID NO: 18810 - DNA, 688 bp, Homo sapiens
atggagaggagaaaacctatggtggctgtgaaggacctgatgccatgtatgtcaaattgatatcatctgatggccatgaatttattgtaaaaagagaacatgcattaacatcaggcacgataaaagccatgttgagtggcccagagagacagagtctcattctgttgcccaggctggagtgcaatggtgcggtctcagctcactgcaatctccgcctgctgggttcaggcaattctcctgcctcagagtagctggaattacaggtcagtttgctgagaacgaaaccaatgaggtcaattttagagagataccttcacatgtgctatcgaaagtatgcatgtattttacgtacaaggttcgctacactaacagctccaccgagattcctgaattcccaattgcacctgaaattgcactggaactgctgatggctgcgaacttcttagattgttaaataaaataaattataataaactgttaactcttttcagtatttaatacctgtagttcagttagtaactttttcatatatagcatgttgcctgtatgcagttgaactatataaagttcattgcaaagcagattatcttgtttttttgcatagcaatcaaagttgaaatttgtttgctacatcaacaaattaaggacattttcacaaactgagaaataaacaaatatgccaattcgt

SEQ ID NO: 18811 - protein, 68 aa, Homo sapiens; identical to SEQ ID NO: 18745

SEQ ID NO: 18812 - DNA, 735 bp, Homo sapiens
tgttagcatttgcatagctagaaaatttgggttaattttattaccgatgtcactttcaaaagcttaattaggcagaaaaccatcctagagtgatgatatctttggagttaaggaaactactaaagttcctggggaagcaaagtagaatttcataagaacaaaatggatggagaggagaaaacctatggtggctgtgaaggacctgatgccatgtatgtcaaattgatatcatctgatggccatgaatttattgtaaaaagagaacatgcattaacatcaggcacgataaaagccatgttgagtggcccaggtcagtttgctgagaacgaaaccaatgaggtcaattttagagagataccttcacatgtgctatcgaaagtatgcatgtattttacgtacaaggttcgctacactaacagctccaccgagattcctgaattcccaattgcacctgaaattgcactggaactgctgatggctgcgaacttcttagattgttaaataaaataaattataataaactgttaactcttttcagtatttaatacctgtagttcagttagtaactttttcatatatagcatgttgcctgtatgcagttgaactatataaagttcattgcaaagcagattatcttgtttttttgcatagcaatcaaagttgaaatttgtttgctacatcaacaaattaaggacattttcacaaactgagaaataaacaaatatgccaattcgt

SEQ ID NO: 18813 - protein, 112 aa, Homo sapiens; identical to SEQ ID NO: 2296

SEQ ID NO: 18814 - DNA, 857 bp, Homo sapiens
gggagaagagggcggcgggacctttcctggcgccgctcgcagtttacatgtggatttattcattctggagatacaatggcaaggaaacagctgtgagtcttgctgtgtggcccaggctggagtgcccggctggtctcaaattcctgacctcaagtgatctccctcccaaagtgttgcgattgcaggtgtgagccactgcacctggctgctgagaaatctttgcctacagtgagggaaactactaaagttcctggggaagcaaagtagaatttcataagaacaaaatggatggagaggagaaaacctatggtggctgtgaaggacctgatgccatgtatgtcaaattgatatcatctgatggccatgaatttattgtaaaaagagaacatgcattaacatcaggcacgataaaagccatgttgagtggcccaggtcagtttgctgagaacgaaaccaatgaggtcaattttagagagataccttcacatgtgctatcgaaagtatgcatgtattttacgtacaaggttcgctacactaacagctccaccgagattcctgaattcccaattgcacctgaaattgcactggaactgctgatggctgcgaacttcttagattgttaaataaaataaattataataaactgttaactcttttcagtatttaatacctgtagttcagttagtaactttttcatatatagcatgttgcctgtatgcagttgaactatataaagttcattgcaaagcagattatcttgtttttttgcatagcaatcaaagttgaaatttgtttgctacatcaacaaattaaggacattttcacaaactgagaaataaacaaatatgccaattcgt

SEQ ID NO: 18815 - protein, 112 aa, Homo sapiens; identical to SEQ ID NO: 2296

SEQ ID NO: 18816 - DNA, 688 bp, Homo sapiens
acccggctgcggtggctgcgggactgacgagtgagtctcgggctggggcggaaacggagctccgggaaactactaaagttcctggggaagcaaagtagaatttcataagaacaaaatggatggagaggagaaaacctatggtggctgtgaaggacctgatgccatgtatgtcaaattgatatcatctgatggccatgaatttattgtaaaaagagaacatgcattaacatcaggcacgataaaagccatgttgagtggcccaggtcagtttgctgagaacgaaaccaatgaggtcaattttagagagataccttcacatgtgctatcgaaagtatgcatgtattttacgtacaaggttcgctacactaacagctccaccgagattcctgaattcccaattgcacctgaaattgcactggaactgctgatggctgcgaacttcttagattgttaaataaaataaattataataaactgttaactcttttcagtatttaatacctgtagttcagttagtaactttttcatatatagcatgttgcctgtatgcagttgaactatataaagttcattgcaaagcagattatcttgtttttttgcatagcaatcaaagttgaaatttgtttgctacatcaacaaattaaggacattttcacaaactgagaaataaacaaatatgccaattcgt

SEQ ID NO: 18817 - protein, 112 aa, Homo sapiens; identical to SEQ ID NO: 2296

SEQ ID NO: 18818 - DNA, 790 bp, Homo sapiens
aggggctgtggcagtacgcggggacccggctgcggtggctgcgggactgacgagatcatcagggaaggaagacctctctgaggagttgatgttttacctggagacctaaatgatgaggatttaaaagcttttcggacaacagcaattacaaatgcaaagaccttgaggaaactactaaagttcctggggaagcaaagtagaatttcataagaacaaaatggatggagaggagaaaacctatggtggctgtgaaggacctgatgccatgtatgtcaaattgatatcatctgatggccatgaatttattgtaaaaagagaacatgcattaacatcaggcacgataaaagccatgttgagtggcccaggtcagtttgctgagaacgaaaccaatgaggtcaattttagagagataccttcacatgtgctatcgaaagtatgcatgtattttacgtacaaggttcgctacactaacagctccaccgagattcctgaattcccaattgcacctgaaattgcactggaactgctgatggctgcgaacttcttagattgttaaataaaataaattataataaactgttaactcttttcagtatttaatacctgtagttcagttagtaactttttcatatatagcatgttgcctgtatgcagttgaactatataaagttcattgcaaagcagattatcttgtttttttgcatagcaatcaaagttgaaatttgtttgctacatcaacaaattaaggacattttcacaaactgagaaataaacaaatatgccaattcgt

SEQ ID NO: 18819 - protein, 112 aa, Homo sapiens; identical to SEQ ID NO: 2296

SEQ ID NO: 18820 - DNA, 938 bp, Homo sapiens
ctcaccaggtacggatctcccgcgcgtcgccgaaagcggctctgacccagcggaagtaattctttcgactgccccggaacccaccggagcaggcagctgggggtgggggggcggccctgggataggggctgtggcagtacgcggggacccggctgcggtggctgcgggactgacgaagtcttgctgtgtggcccaggctggagtgcccggctggtctcaaattcctgacctcaagtgatctccctcccaaagtgttgcgattgcaggtgtgagccactgcacctggctgctgagaaatctttgcctacagtgagggaaactactaaagttcctggggaagcaaagtagaatttcataagaacaaaatggatggagaggagaaaacctatggtggctgtgaaggacctgatgccatgtatgtcaaattgatatcatctgatggccatgaatttattgtaaaaagagaacatgcattaacatcaggcacgataaaagccatgttgagtggcccaggtcagtttgctgagaacgaaaccaatgaggtcaattttagagagataccttcacatgtgctatcgaaagtatgcatgtattttacgtacaaggttcgctacactaacagctccaccgagattcctgaattcccaattgcacctgaaattgcactggaactgctgatggctgcgaacttcttagattgttaaataaaataaattataataaactgttaactcttttcagtatttaatacctgtagttcagttagtaactttttcatatatagcatgttgcctgtatgcagttgaactatataaagttcattgcaaagcagattatcttgtttttttgcatagcaatcaaagttgaaatttgtttgctacatcaacaaattaaggacattttcacaaactgagaaataaacaaatatgccaattcgt

SEQ ID NO: 18821 - protein, 112 aa, Homo sapiens; identical to SEQ ID NO: 2296

SEQ ID NO: 18822 - DNA, 750 bp, Homo sapiens
ctcgcctcaccaggtacggatctcccgcgcgtcgccgaaagcggctctgacccagcggaagtaattctttcgactgccccggaacccaccggagcaggcagctgggggtgggggggcggccctgggataggggctgtggcagtacgcggggacccggctgcggtggctgcgggactgacgaatggagaggagaaaacctatggtggctgtgaaggacctgatgccatgtatgtcaaattgatatcatctgatggccatgaatttattgtaaaaagagaacatgcattaacatcaggcacgataaaagccatgttgagtggcccaggtcagtttgctgagaacgaaaccaatgaggtcaattttagagagataccttcacatgtgctatcgaaagtatgcatgtattttacgtacaaggttcgctacactaacagctccaccgagattcctgaattcccaattgcacctgaaattgcactggaactgctgatggctgcgaacttcttagattgttaaataaaataaattataataaactgttaactcttttcagtatttaatacctgtagttcagttagtaactttttcatatatagcatgttgcctgtatgcagttgaactatataaagttcattgcaaagcagattatcttgtttttttgcatagcaatcaaagttgaaatttgtttgctacatcaacaaattaaggacattttcacaaactgagaaataaacaaatatgccaattcgt

SEQ ID NO: 18823 - protein, 96 aa, Homo sapiens; identical to SEQ ID NO: 18757

SEQ ID NO: 18824 - DNA, 817 bp, Homo sapiens
cacactctgcgtcctcgcctcaccaggtacggatctcccgcgcgtcgccgaaagcggctctgacccagcggaagtaattctttcgactgccccggaacccaccggagcaggcagctgggggtgggggggcggccctgggataggggctgtggcagtacgcggggacccggctgcggtggctgcgggactgacgagaaactactaaagttcctggggaagcaaagtagaatttcataagaacaaaatggatggagaggagaaaacctatggtggctgtgaaggacctgatgccatgtatgtcaaattgatatcatctgatggccatgaatttattgtaaaaagagaacatgcattaacatcaggcacgataaaagccatgttgagtggcccaggtcagtttgctgagaacgaaaccaatgaggtcaattttagagagataccttcacatgtgctatcgaaagtatgcatgtattttacgtacaaggttcgctacactaacagctccaccgagattcctgaattcccaattgcacctgaaattgcactggaactgctgatggctgcgaacttcttagattgttaaataaaataaattataataaactgttaactcttttcagtatttaatacctgtagttcagttagtaactttttcatatatagcatgttgcctgtatgcagttgaactatataaagttcattgcaaagcagattatcttgtttttttgcatagcaatcaaagttgaaatttgtttgctacatcaacaaattaaggacattttcacaaactgagaaataaacaaatatgccaattcgt

SEQ ID NO: 18825 - protein, 112 aa, Homo sapiens; identical to SEQ ID NO: 2296

SEQ ID NO: 18826 - DNA, 599 bp, Homo sapiens
gcgacacactctgcgtcctcgcctcaccagatggagaggagaaaacctatggtggctgtgaaggacctgatgccatgtatgtcaaattgatatcatctgatggccatgaatttattgtaaaaagagaacatgcattaacatcaggcacgataaaagccatgttgagtggcccaggtcagtttgctgagaacgaaaccaatgaggtcaattttagagagataccttcacatgtgctatcgaaagtatgcatgtattttacgtacaaggttcgctacactaacagctccaccgagattcctgaattcccaattgcacctgaaattgcactggaactgctgatggctgcgaacttcttagattgttaaataaaataaattataataaactgttaactcttttcagtatttaatacctgtagttcagttagtaactttttcatatatagcatgttgcctgtatgcagttgaactatataaagttcattgcaaagcagattatcttgtttttttgcatagcaatcaaagttgaaatttgtttgctacatcaacaaattaaggacattttcacaaactgagaaataaacaaatatgccaattcgt

SEQ ID NO: 18827 - protein, 96 aa, Homo sapiens; identical to SEQ ID NO: 18757

SEQ ID NO: 18828 - DNA, 665 bp, Homo sapiens
agacggaagtgagcgacacactctgcgtcctcgcctcaccaggaaactactaaagttcctggggaagcaaagtagaatttcataagaacaaaatggatggagaggagaaaacctatggtggctgtgaaggacctgatgccatgtatgtcaaattgatatcatctgatggccatgaatttattgtaaaaagagaacatgcattaacatcaggcacgataaaagccatgttgagtggcccaggtcagtttgctgagaacgaaaccaatgaggtcaattttagagagataccttcacatgtgctatcgaaagtatgcatgtattttacgtacaaggttcgctacactaacagctccaccgagattcctgaattcccaattgcacctgaaattgcactggaactgctgatggctgcgaacttcttagattgttaaataaaataaattataataaactgttaactcttttcagtatttaatacctgtagttcagttagtaactttttcatatatagcatgttgcctgtatgcagttgaactatataaagttcattgcaaagcagattatcttgtttttttgcatagcaatcaaagttgaaatttgtttgctacatcaacaaattaaggacattttcacaaactgagaaataaacaaatatgccaattcgt

SEQ ID NO: 18829 - protein, 112 aa, Homo sapiens; identical to SEQ ID NO: 2296

SEQ ID NO: 18830 - DNA, 804 bp, Homo sapiens
agacggaagtgagcgacacactctgcgtcctcgcctcaccagagtcttgctgtgtggcccaggctggagtgcccggctggtctcaaattcctgacctcaagtgatctccctcccaaagtgttgcgattgcaggtgtgagccactgcacctggctgctgagaaatctttgcctacagtgagggaaactactaaagttcctggggaagcaaagtagaatttcataagaacaaaatggatggagaggagaaaacctatggtggctgtgaaggacctgatgccatgtatgtcaaattgatatcatctgatggccatgaatttattgtaaaaagagaacatgcattaacatcaggcacgataaaagccatgttgagtggcccaggtcagtttgctgagaacgaaaccaatgaggtcaattttagagagataccttcacatgtgctatcgaaagtatgcatgtattttacgtacaaggttcgctacactaacagctccaccgagattcctgaattcccaattgcacctgaaattgcactggaactgctgatggctgcgaacttcttagattgttaaataaaataaattataataaactgttaactcttttcagtatttaatacctgtagttcagttagtaactttttcatatatagcatgttgcctgtatgcagttgaactatataaagttcattgcaaagcagattatcttgtttttttgcatagcaatcaaagttgaaatttgtttgctacatcaacaaattaaggacattttcacaaactgagaaataaacaaatatgccaattcgt

SEQ ID NO: 18831 - protein, 112 aa, Homo sapiens; identical to SEQ ID NO: 2296

SEQ ID NO: 18832 - DNA, 539 bp, Homo sapiens
tgttagcatttgcatagctagaaaatttgggttaattttattaccgatgtcactttcaaaagcttaattaggcagaaaaccatcctagagtgatgatatctttggagttaaggaaactactaaagttcctggggaagcaaagtagaatttcataagaacaaaatggatggagaggagaaaacctatggtggctgtgaaggacctgatgccatgtatgtcaaattgatatcatctgatggccatgaatttattgtaaaaagagaacatgcattaacatcaggcacgataaaagccatgttgagtggcccaggtcagtttgctgagaacgaaaccaatgaggtcaattttagagagataccttcacatgtgctatcgaaagtatgcatgtattttacgtacaaggttcgctacactaacagctccaccgagattcctgaattcccaattgcacctgaaattgcactggaactgctgatggctgcgaacttcttagattgttaaataaaataaattataataaactgttaactcttttcagt

SEQ ID NO: 18833 - protein, 112 aa, Homo sapiens; identical to SEQ ID NO: 2296

SEQ ID NO: 18834 - DNA, 594 bp, Homo sapiens
aggggctgtggcagtacgcggggacccggctgcggtggctgcgggactgacgagatcatcagggaaggaagacctctctgaggagttgatgttttacctggagacctaaatgatgaggatttaaaagcttttcggacaacagcaattacaaatgcaaagaccttgaggaaactactaaagttcctggggaagcaaagtagaatttcataagaacaaaatggatggagaggagaaaacctatggtggctgtgaaggacctgatgccatgtatgtcaaattgatatcatctgatggccatgaatttattgtaaaaagagaacatgcattaacatcaggcacgataaaagccatgttgagtggcccaggtcagtttgctgagaacgaaaccaatgaggtcaattttagagagataccttcacatgtgctatcgaaagtatgcatgtattttacgtacaaggttcgctacactaacagctccaccgagattcctgaattcccaattgcacctgaaattgcactggaactgctgatggctgcgaacttcttagattgttaaataaaataaattataataaactgttaactcttttcagt

SEQ ID NO: 18835 - protein, 112 aa, Homo sapiens; identical to SEQ ID NO: 2296

SEQ ID NO: 18836 - DNA, 444 bp, Homo sapiens
ggggggcggccctgggataggggctgtggcagtacgcggggacccggctgcggtggctgcgggactgacgaatggagaggagaaaacctatggtggctgtgaaggacctgatgccatgtatgtcaaattgatatcatctgatggccatgaatttattgtaaaaagagaacatgcattaacatcaggcacgataaaagccatgttgagtggcccaggtcagtttgctgagaacgaaaccaatgaggtcaattttagagagataccttcacatgtgctatcgaaagtatgcatgtattttacgtacaaggttcgctacactaacagctccaccgagattcctgaattcccaattgcacctgaaattgcactggaactgctgatggctgcgaacttcttagattgttaaataaaataaattataataaactgttaactcttttcagt

SEQ ID NO: 18837 - protein, 96 aa, Homo sapiens; identical to SEQ ID NO: 18757

SEQ ID NO: 18838 - DNA, 742 bp, Homo sapiens
ctcaccaggtacggatctcccgcgcgtcgccgaaagcggctctgacccagcggaagtaattctttcgactgccccggaacccaccggagcaggcagctgggggtgggggggcggccctgggataggggctgtggcagtacgcggggacccggctgcggtggctgcgggactgacgaagtcttgctgtgtggcccaggctggagtgcccggctggtctcaaattcctgacctcaagtgatctccctcccaaagtgttgcgattgcaggtgtgagccactgcacctggctgctgagaaatctttgcctacagtgagggaaactactaaagttcctggggaagcaaagtagaatttcataagaacaaaatggatggagaggagaaaacctatggtggctgtgaaggacctgatgccatgtatgtcaaattgatatcatctgatggccatgaatttattgtaaaaagagaacatgcattaacatcaggcacgataaaagccatgttgagtggcccaggtcagtttgctgagaacgaaaccaatgaggtcaattttagagagataccttcacatgtgctatcgaaagtatgcatgtattttacgtacaaggttcgctacactaacagctccaccgagattcctgaattcccaattgcacctgaaattgcactggaactgctgatggctgcgaacttcttagattgttaaataaaataaattataataaactgttaactcttttcagt

SEQ ID NO: 18839 - protein, 112 aa, Homo sapiens; identical to SEQ ID NO: 2296

SEQ ID NO: 18840 - DNA, 621 bp, Homo sapiens
cacactctgcgtcctcgcctcaccaggtacggatctcccgcgcgtcgccgaaagcggctctgacccagcggaagtaattctttcgactgccccggaacccaccggagcaggcagctgggggtgggggggcggccctgggataggggctgtggcagtacgcggggacccggctgcggtggctgcgggactgacgagaaactactaaagttcctggggaagcaaagtagaatttcataagaacaaaatggatggagaggagaaaacctatggtggctgtgaaggacctgatgccatgtatgtcaaattgatatcatctgatggccatgaatttattgtaaaaagagaacatgcattaacatcaggcacgataaaagccatgttgagtggcccaggtcagtttgctgagaacgaaaccaatgaggtcaattttagagagataccttcacatgtgctatcgaaagtatgcatgtattttacgtacaaggttcgctacactaacagctccaccgagattcctgaattcccaattgcacctgaaattgcactggaactgctgatggctgcgaacttcttagattgttaaataaaataaattataataaactgttaactcttttcagt

SEQ ID NO: 18841 - protein, 112 aa, Homo sapiens; identical to SEQ ID NO: 2296

SEQ ID NO: 18842 - DNA, 469 bp, Homo sapiens
agacggaagtgagcgacacactctgcgtcctcgcctcaccaggaaactactaaagttcctggggaagcaaagtagaatttcataagaacaaaatggatggagaggagaaaacctatggtggctgtgaaggacctgatgccatgtatgtcaaattgatatcatctgatggccatgaatttattgtaaaaagagaacatgcattaacatcaggcacgataaaagccatgttgagtggcccaggtcagtttgctgagaacgaaaccaatgaggtcaattttagagagataccttcacatgtgctatcgaaagtatgcatgtattttacgtacaaggttcgctacactaacagctccaccgagattcctgaattcccaattgcacctgaaattgcactggaactgctgatggctgcgaacttcttagattgttaaataaaataaattataataaactgttaactcttttcagt

SEQ ID NO: 18843 - protein, 112 aa, Homo sapiens; identical to SEQ ID NO: 2296

SEQ ID NO: 18844 - DNA, 608 bp, Homo sapiens
agacggaagtgagcgacacactctgcgtcctcgcctcaccagagtcttgctgtgtggcccaggctggagtgcccggctggtctcaaattcctgacctcaagtgatctccctcccaaagtgttgcgattgcaggtgtgagccactgcacctggctgctgagaaatctttgcctacagtgagggaaactactaaagttcctggggaagcaaagtagaatttcataagaacaaaatggatggagaggagaaaacctatggtggctgtgaaggacctgatgccatgtatgtcaaattgatatcatctgatggccatgaatttattgtaaaaagagaacatgcattaacatcaggcacgataaaagccatgttgagtggcccaggtcagtttgctgagaacgaaaccaatgaggtcaattttagagagataccttcacatgtgctatcgaaagtatgcatgtattttacgtacaaggttcgctacactaacagctccaccgagattcctgaattcccaattgcacctgaaattgcactggaactgctgatggctgcgaacttcttagattgttaaataaaataaattataataaactgttaactcttttcagt

SEQ ID NO: 18845 - protein, 112 aa, Homo sapiens; identical to SEQ ID NO: 2296

SEQ ID NO: 18846 - DNA, 531 bp, Homo sapiens
actactaaagttcctggggaagcaaagtagaatttcataagaacaaaatggatggagaggagaaaacctatggtggctgtgaaggacctgatgccatgtatgtcaaattgatatcatctgatggccatgaatttattgtaaaaagagaacatgcattaacatcaggcacgataaaagccatgttgagtggcccagagagacagagtctcattctgttgcccaggctggagtgcaatggtgcggtctcagctcactgcaatctccgcctgctgggttcaggcaattctcctgcctcagagtagctggaattacaggtcagtttgctgagaacgaaaccaatgaggtcaattttagagagataccttcacatgtgctatcgaaagtatgcatgtattttacgtacaaggttcgctacactaacagctccaccgagattcctgaattcccaattgcacctgaaattgcactggaactgctgatggctgcgaacttcttagattgttaaataaaataaattataataaactgtta

SEQ ID NO: 18847 - protein, 84 aa, Homo sapiens
MDGEEKTYGGCEGPDAMYVKLISSDGHEFIVKREHALTSGTIKAMLSGPERQSLILLPRLECNGAVSAHCNLRLLGSGNSPASE

SEQ ID NO: 18848 - DNA, 758 bp, Homo sapiens
ctgcgctcgacccggacgccggagaaggcgcgcggctcccgaaggccccgtactccagccggctaccggccccgaaggcccgctgctggaggacgcccgggagacagaggcccggggacctcggagcgcggcggccgcacacaatgcagtcctccttccgcagagaggcagttcgaccgcccacgggcttctttataacagtgtggaggggcagagggctgtacgagaatgacaatgcccagaagccagggttaaatatttttttttctcgtggacgacatcactaaaaactgtttcctttgcggaaaatgattctagccataggaaacgcgggggggtgggaagcggggcgtggaatgagaaagaagttcccaaaaactgagtaacggtttggcaggcgcctggattttctgtgcgtgagctccggatccaggacagctgagctaacccagaggcaaaggcaggaccctcgcgggtggagtgggggacgtggttagttttcagttaacattgaattctaccgggaagagaggaaatgaggccagccgattgcgctagtcgttgctgtgctggctcttcagcacgcacagcaacttttcaccagggacagatgctgcttcataaagagtacgatctcgttagcaaagaaaccgccctcccacgtttcaatctttcctcagcagtctcccacctccaggcgtaaccctaaatgagaggtacggacagtctctgtaaccaccaaaatcttaacacgcagt

SEQ ID NO: 18849 - protein, 47 aa, Homo sapiens
MQSSFRREAVRPPTGFFITVWRGRGLYENDNAQKPGLNIFFSRGRHH

SEQ ID NO: 18850 - DNA, 2067 bp, Homo sapiens
tatttttcacctgtttaataacagtggttttcctacacccatagggtgccaccaagggaggagtgcacagttgcagaaacaaattaagatactgaagacaacactacttaccatttcccgtatagctaaccaccagttcaactgtacatgtatgttcttatgggcaatcatgccaggggttaggcaaaaacctgtgttctgaaccaaagaagacttaaaactgctcccataatttgtgaatttcttgaaattttgcggttttttgaaaattttttaacaactggtaatcaatttatgaaaacagttgacttaagcatttgcaatggtgacttccatctcaactcctggctcaatactgatggaagtaatctgcttaactatctgaggactgcgcaagtcaatgagtcgcttgtggattctcatctggaaacgatcccatgccttagaaccttcaccgtaagtttttcttgtagtgattctcaaagtcttggtaggcattcaaactggtcctttcactgattcttttcctttgctcctcagatcaagtcagcacacaccttatccagggattttacgttgcaactcgttagagtgatatgaattcggtgaattgccacctctgactccacgggtgtttttctggtatgtttaaaagccatggctgctgcaaggcttcctagccagcttcctgacagacttggtcctcaggcaacagcaaagagcagtgagtcaggagcaggagcaggtggaccacagctccgcaccacctatgactgtgtcttcctcaaagagaaaatgtcttttaatgtcggaaaatatttatacacttagaaaaatccatacacaaagaataaagcaactctcccatttgctactgacatcagatccccagtttagagtcaaccacagtaacacagaactcttatactagcatgaacatatttattcacatacctttctaaaacacgaatggtagatactacattttggttttcaaacatagcttgttttattataaacaaacatcattctctggaaattaaaagctttgataatttcaaattatttttaacaatcagtcactaacggaatgcaaaaggcaattttattattatacattaaaacgtaaatcacatttgagcacgaacactaacaaataggctcatttgtcatctttatgccgtttctcttcactggtttcttccatatacaaaataaattcttctttgtcataacccattagatggatatagtcttcacggtttggaaagagcactggattaactaacagtgattttgttttagcataaaatgtggtaaatacatgtttagcatctggaatcttcacatcattctggtgaaacactgtactcgtttctgcaagcatagcattgtaggtaatggctttataagtgtctgttgtggcctcatggtacaatcgaatgacatagccttttgtaataaagtgaagcagcactggggtgatcaccgtaaagcttcccatgatgccatagaatatgatttgaataggcagaggcacactttcagaaatagcattattttgtgtaaaaatgtatggcagaaatgtaaggccaatcagactcgtagaataagagaaacatttcacaccaaacactgctcgggccatattgccagtataaattagccttccatcttctgatttgtcagatggcgtatttaagaatcgaacatatccttcccaataaacagggatctgcgctcgacccggacgccggagaaggcgcgcggctcccgaaggccccgtactccagccggctaccggccccgaaggcccgctgctggaggacgcccgggagacagaggcccggggacctcggagcgcggcggccgcacacaatgcagtcctccttccgcagagaggcagttcgaccgcccacgggctgcccaacgccagaaacagcatcacgcgggtgacgagcggctgcggacgccccagctgcacgagtccacgactgcgagacacggcttcccacccgactgccgcacaagtggcgcatgcccagcccgggacgcctgactggcagc

SEQ ID NO: 18851 - protein, 113 aa, Homo sapiens
MFSIWNLHIILVKHCTRFCKHSIVGNGFISVCCGLMVQSNDIAFCNKVKQHWGDHRKASHDAIEYDLNRQRHTFRNSIILCKNVWQKCKANQTRRIRETFHTKHCSGHIASIN

SEQ ID NO: 18852 - DNA, 1204 bp, Homo sapiens
cttatactagcatgaacatatttattcacatacctttctaaaacacgaatggtagatactacattttggttttcaaacatagcttgttttattataaacaaacatcattctctggaaattaaaagctttgataatttcaaattatttttaacaatcagtcactaacggaatgcaaaaggcaattttattattatacattaaaacgtaaatcacatttgagcacgaacactaacaaataggctcatttgtcatctttatgccgtttctcttcactggtttcttccatatacaaaataaattcttctttgtcataacccattagatggatatagtcttcacggtttggaaagagcactggattaactaacagtgattttgttttagcataaaatgtggtaaatacatgtttagcatctggaatcttcacatcattctggtgaaacactgtactcgtttctgcaagcatagcattgtaggtaatggctttataagtgtctgttgtggcctcatggtacaatcgaatgacatagccttttgtaataaagtgaagcagcactggggtgatcaccgtaaagcttcccatgatgccatagaatatgatttgaataggcagaggcacactttcagaaatagcattattttgtgtaaaaatgtatggcagaaatgtaaggccaatcagactcgtagaataagagaaacatttcacacctgtaatcccagcaggaggctgagccaggagaatcgcttgaacatgggaggcgaagagtatggtgaaccaagatcatgccactgcactccagccaaacactgctcgggccatattgccagtataaattagccttccatcttctgatttgtcagatggcgtatttaagaatcgaacatatccttcccaataaacagggatctgcgctcgacccggacgccggagaaggcgcgcggctcccgaaggccccgtactccagccggctaccggccccgaaggcccgctgctggaggacgcccgggagacagaggcccggggacctcggagcgcggcggccgcacacaatgcagtcctccttccgcagagaggcagttcgaccgcccacgggctgcccaacgccagaaacagcatcacgcgggtgacgagcggctgcggacgccccagctgcacgagtccacgactgcgagacacggcttcccacccgactgccgcacaagt

SEQ ID NO: 18853 - protein, 144 aa, Homo sapiens
MFSIWNLHIILVKHCTRFCKHSIVGNGFISVCCGLMVQSNDIAFCNKVKQHWGDHRKASHDAIEYDLNRQRHTFRNSIILCKNVWQKCKANQTRRIRETFHTCNPSRRLSQENRLNMGGEEYGEPRSCHCTPAKHCSGHIASIN

SEQ ID NO: 18854 - DNA, 543 bp, Homo sapiens
tataacattttatttttttcttctcagcaaggcagtttacttctatagaagggggcgccctcacagatggagcaatgccgtgaagaggatgccctgcagactcactgcccaccggctccctcccccgcatccctgcaaccccagaggcgaagatggcctcaggagtgcaagtagctgatgaagtatgtcgcattttttatgacatgaaagttcgtaaatgctccacaccagaagaaatcaagaaaagaaagaaggctgtcattttttgtctcggtgcagacgaaaagtgcatcattgtagaagaaggcaaagagatcttggttggagatgttggtgtaaccataactggtcctttcaagcattttgtgggaatgcttcctgaaaaagattgtcgctgtgctttgtatgatgcaagctttgaaacaaaagaatccagtacagaagagttgattttttttttgtaggcatgagaactagcacctctgaaaagtaaaatgatctgtgcaacatccaaggatgcaatgaaaaagaaatttcaaggca

SEQ ID NO: 18855 - protein, 35 aa, Homo sapiens [sequence omitted]

SEQ ID NO: 18856 - DNA, 622 bp, Homo sapiens
agaaatcatgtgactgatgactaagttaaatcttttctgcttactgaaaaggaagagtctgatgattagttactgatcctctttgcatttgtaaagctttggagatattgaatcatgttaccatttctgtttttttccaccctgttttcttccatatttactgaagctcagaagcagtattgggtctgcaactcatccgatgcaagtatttcatacacctactgtgataaaatgcaatacccaatttcaattaatgttaacccctgtatagaattgaaaagatccaaaggattattgcacattttctacattccaaggagagatttaaagcaattatatttcaatctctatataactgtcaacaccatgaatcttccaaagcgcaaagaagttatttgccgaggatctgatgacgattactctttttgcagagctctgaagggagagactgtgaatacaacaatatcattctccttcaagggaataaaattttctaagggaaaatacaaatgtgttgttgaagctatttctgggagcccagaagaaatgctcttttgcttggagtttgtcatcctacaccaacctaattcaaattagaataaattgagtatttaaaaaaaaa

SEQ ID NO: 18857 - protein, 160 aa, Homo sapiens [sequence omitted]

SEQ ID NO: 18858 - DNA, 614 bp, Homo sapiens
tatttctgtaaattgttgtgttagtggaggcaagaagagttcagggcttctgattctgccacattgctgatgtcattcttctggggagatattttcaatcatcatcaatttttcttattttataattttaatgcaagattcatcttaaaaggctgatattcagaatactatacttaatggagatgatttgtagtaatttattgacattatctttattgcttttagataaaatgcaatacccaatttcaattaatgttaacccctgtatagaattgaaaagatccaaaggattattgcacattttctacattccaaggagagatttaaagcaattatatttcaatctctatataactgtcaacaccatgaatcttccaaagcgcaaagaagttatttgccgaggatctgatgacgattactctttttgcagagctctgaagggagagactgtgaatacaacaatatcattctccttcaagggaataaaattttctaagggaaaatacaaatgtgttgttgaagctatttctgggagcccagaagaaatgctcttttgcttggagtttgtcatcctacaccaacctaattcaaattagaataaattgagtatttaa

SEQ ID NO: 18859 - protein, 139 aa, Homo sapiens
MEMICSNLLTLSLLLLDKMQYPISINVNPCIELKRSKGLLHIFYIPRRDLKQLYFNLYITVNTMNLPKRKEVICRGSDDDYSFCRALKGETVNTTISFSFKGIKFSKGKYKCVVEAISGSPEEMLFCLEFVILHQPNSN

SEQ ID NO: 18860 - DNA, 735 bp, Homo sapiens
acttggaagaagggctgtaacctttagcttcccccagtttagcccgttggccttgtctaggctggtctgtttctgactcttcttttcctcatctaatatagacctacttttcttttattggaagtaggaagaggaaaaatagacaaaggaagagaaaaatactagattaaggctcagatattgtaggcatgagacctggaaactggagactccttttgggacagagttgtagcagcaagcccaactatagaagaagggaactggggcctgttggtggcatggtgaccagagattttggtgttgttttggtgcaacaacagaccagcatttcttcctgatgagagacaattgaccatggagtggttctggccagtctatggagaatgtgcagcaaaggttttcctgtcatctgcttcatcttttgatgtcagagggcctaaaactccaccctgggattatgctaacactgccattttttgtacacaggacccatgaagaggcatgaagctcaattgcacatgtgcatgtttttccttttgtaaatattaatgactcctcctataatctgttgaatatgtacacttaaccactcaacttaccatacgtttctgttcccttttcccctcccttgaagtatctgtttttggcttctgaccagagactacacttcccagcctctgggaatggccaccctgcaggctgaaactcttcatgagaaataaagctcttctttct

SEQ ID NO: 18861 - protein, 49 aa, Homo sapiens
MRPGNWRLLLGQSCSSKPNYRRRELGPVGGMVTRDFGVVLVQQQTSISS

SEQ ID NO: 18862 - DNA, 531 bp, Homo sapiens
gagatgggaagctgtgggctgcgcagtgggtctttatggtcttggaaaggggacaccccaccttgtgctcatctttgtagaatctgggcaagtttgggggtcctcataaagattttgaaatttttgaagtctattctctgcctgtttttctaaaaaattcttcagtaggtgaataatttacttaacattgtgtacttgggagaatatgatgatggggacagagcatgctgcattgcatggcttcttaggaagaaaacactatgggctgccctgcagaaatgcaggcagaagctgtcatcagtgaatgttgggaggatccataatgttggattggaatagaactagagtgagactgtttcatgaggccttctcccatctagaatctttctcaggagtattctggatgctttgacctggatcagttactgctttggtttgtggcaacatgaaaactggcacaacaggacaaaaatgagttgattatttcagctgaacttcctgggagtttcattcacaataaaggagaggcag

SEQ ID NO: 18863 - protein, 35 aa, Homo sapiens
MLGGSIMLDWNRTRVRLFHEAFSHLESFSGVFWML

SEQ ID NO: 18864 - DNA, 1336 bp, Homo sapiens
ctctcgcctcggcctgcggccgggatcctccgcccgggtcgcgcagcggaggccgagggctgggacgggcggctgggaagtgggaaagggagccagaggcgctccttttgtcttctcttcccatcccccaggtttgggaaagttttccttttgggaaagcccctctcttcagcctgctggcgggtgtcggattggttagcgaccaccggcccccgcctcccccaacaggattctcctttgggccacaggtcttccggaagttgccaaaccccggtagcggcagcgtccggctgggggctttattagggggcaccggggtctgctttccgactcccttccgactccgcgcctgcgcaggaagcgatttggggagtgttgtgaattccgagggctccacacttaagaggttgtacactcacctgtctacctggactccaatttccatatttccagccacttgaggactgagaggtggatgataaaccctgtcatagtggagcaagttcaggtgtttaaccgctgttatgggggatctgccttttctccctcttctttcttacttccataagtatgtatgtgcagagattgaaaaataaccttgagagagtccatccatctaactccagaatctctctctgtcacccaggctggagtgcagtggcgtgattttggctcactgtatccttcgcctccctggctcaagtgattctcctgcctcagcctcccaagtagcttggattacagaggttgttggcttccatcaggggtggtcatttccaatcagacacctaagaactcctgctaatgggcaatgatggaggcacattctagatggaggcacattctagaaacgcttgaaactgtgtgttgctttggacagctgtttcaggatgttgggaactgactgtaaggaagacaggattggagaaccaggtttagaagagaaaaggcagtgccagaagtttttgattggagaaaactacagggtaatgttgcacaagaaccattgctggactgcatcattgcttacccaacatgactcagcctcggtattgccactgactcacggagctcctaatagaggagaattagtgtcacagatcgactggaaaaccaatccacatgaagccaggaagagaaatgaagctgctgttgctgaatccatagctggccttaatgatgctggctaggaaagacggcccattctgggggagataagtgatgaaactgtacgttttccaaggacacagtgctagtatgaatgaataataatggggttgtctatgaagaggagagaatgaaaaagctcagcttaccaagatgaatgctcctctga

SEQ ID NO: 18865 - protein, 99 aa, Homo sapiens [sequence omitted]

SEQ ID NO: 18866 - DNA, 762 bp, Homo sapiens
tatttgttgaagctcagcatgtccatctccctgctttgaagaaggatgttgggaactgactgtaaggaagacaggattggagaaccaggtttagaagagaaaaggcagtgccagaagtttttgattggagaaaactacagggtaatgttgcacaagaaccattgctggactgcatcattgcttacccaacatgactcagcctcggtattgccactgactcacggagctcctaatagaggagaattagtgtcacagatcgactggaaaaccaatccacatgaagccaggaagagaaatgaagctgctgttgctgaatccatagctggccttaatgatgctggctaggaaagacggcccattctgggggagataagtcaattttgcagtgtctgttattatcatagtgactattgtcttcctgttttatatttatttacctaaattgttttggaaagactcagaggtatagagacatgcctactttttgcaaaaatcatcacactgtcatggaggtagtccaggctatggggctcttatttgttggtgtcttgggcaagttgcttgacctctgatcattgtttgcttattcttatatggcccctgtatttcagactcactctgtgtcaggcatttgtttacctttgtagcaagctcaggaggaaaataccattgcccttgttttacaggtgatgaaactgtacgttttccaaggacacagtgctagtaagtaatgaatgtgaaattttaactgtttcaatctct

SEQ ID NO: 18867 - protein, 99 aa, Homo sapiens [sequence omitted]

SEQ ID NO: 18868 - DNA, 445 bp, Homo sapiens
tgagagagtccatccatctaactccaggtagctttgaacacatggtaaggaaatacattcatcttttcactgagaactgctcacctaattgcttggtacagtcatgttcaatgatatgtagttgattaaaaaatgacaaatactgtgaccagctgcccttttgatgtcaaataatgtggaagattgaacaccatgctgatccattagccatttccaggaaacattgcagcgttataagagaaattatagactatttgttgaagctcagcatgtccatctccctgctttgaagaaggcaagcttcattaaaaccaacatcttacttggcctaaaacatctttggagtaggagatttatggcctttctgggaaagtagttctaatttttataaaccttagaattaagaagttcttttgtaaatacaattataattctttcttctcga

SEQ ID NO: 18869 - protein, 38 aa, Homo sapiens
MWKIEHHADPLAISRKHCSVIREIIDYLLKLSMSISLL

SEQ ID NO: 18870 - DNA, 284 bp, Homo sapiens
tgcccgtgctttcaccgtgcaatgtgcctgctcctgctttgccttctgtcatgattggaagcttcctgagacctccccagaagcatatgccaccatgcttcctgtacagactgcagaactgaaacattgcagcgttataagagaaattatagactatttgttgaagctcagcatgtccatctccctgctttgaagaaggcaagcttcattaaaaccaacatcttacttggcctaaaacatctttggagtaggagatttatggcctttctgggaaagtagttcta

SEQ ID NO: 18871 - protein, 32 aa, Homo sapiens
MLPVQTAELKHCSVIREIIDYLLKLSMSISLL

SEQ ID NO: 18872 - DNA, 1571 bp, Homo sapiens
ggcaaggcggggagaggggcagcccgctcgcggccctcccgcctggctctcgcctcggcctgcggccgggatcctccgcccgggtcgcgcagcggaggccgagggctgggacgggcggctgggaagtgggaaagggagccagaggcgctccttttgtcttctcttcccatcccccaggtttgggaaagttttccttttgggaaagcccctctcttcagcctgctggcgggtgtcggattggttagcgaccaccggcccccgcctcccccaacaggattctcctttgggccacaggtcttccggaagttgccaaaccccggtagcggcagcgtccggctgggggctttattagggggcaccggggtctgctttccgactcccttccgactccgcgcctgcgcaggaagcgatttggggagtgttgtgaattccgagggctccacacttaagaggttgtacactcacctgtctacctggactccaatttccatatttccagccacttgaggactgagaggtggatgataaaccctgtcatagtggagcaagttcaggtgtttaaccgctgttatgggggatctgccttttctccctcttctttcttacttccataagtatgtatgtgcagagattgaaaaataaccttgagagagtccatccatctaactccagttcattggaaatttctgcttctttgagactgaggttatattccacttcttctgactacaccaccaccatcaatctccttctctgaactcttggatcattacttcaacctgaaacaactcatcaggcagaatagttgcctactgccccaaccccaccaaatgttccagcacctctgatattacctcacatggcaagagggctttgaagatgtgattgagtcaaggatcttgaatggggagattatcctgaattattcagctggacccagtgtaatcacaaaggtttttcaaagatggaagagaggcagaagagccagaaaaggatatgtgacaatggagtcagtgtcagagttggagtgacgtgatgtgagaaggattcaacctgctgtttctggctttgaggatgaaagaaggggccatgagccaagcaatacaggtggcttctttcaagaagttggaaaagtggtaatattttatgttattttggtttgatttttgtttgtggcatatggctctgctgtcctgtgactctaagtagaagagaaaatagtgccaataattcttcatggagatgcacctctctcaagtcttgaacaatgtttgagatttccccaggccaccatcactggatttggctatttgacttgctgtagtcaatggaatgtgagtgaaaagtgactctgtaccagtggggaggcaaagccttaaaagacccagcaaatttcttccagcccttttgtgcttctgccaaaagaatactgtgagcaatcagtgcccttaagcctgggcctcagaacgagagatatggagcaaacctgaacctgaacagcagcctacaatcaagccaggatgaccctgcaaagcccagccaacgatagcaaagccacagcagacttgtag

SEQ ID NO: 18873 - protein, 46 aa, Homo sapiens
MYVQRLKNNLERVHPSNSSSLEISASLRLRLYSTSSDYTTTINLLL

SEQ ID NO: 18874 - DNA, 1119 bp, Homo sapiens
agtaattttgtcgctagttactgtattactggaaaatgtattcctaggctttaagatttgggaagcgtgtgagtctaacttctcaaacagaatttgacaaggacgtagcagtgttttaaaaagtcagggaaaggaaagaggtgtgttcagcattcctgccccatcttaacatattctttttctcgtcttaacagtggtaatattttatgttattttggtttgatttttgtttgtggcatatggctctgctgtcctgtgactctaagtagaagagaaaatagtgccaataattcttcatggagatgcacctctctcaagtcttgaacaatgtttgaggaaaagtgctttcagctgggctgatgagaacaccttggcactctttcctgcaatgggcactgattgagggtcttcctggtgtggcatcatcaaatccctgttgctcaaacccactaattagctcattcttatctacaagtagcaggggccctaaagctctctgagaagatctcatactgtgtctcctacatttcatcttctataatctcttattcttagagacagaaagatggttaaaagacatcacttcatttctttctctggatttggaaagagttatatattgggattatgctgttagtttacacttgcattgtttaaattagaggaaaggttattttgtgcagaacaaataaaaattactctttaactacctttcagaatatcccaacttttaacataagctgttttgtaaaggctggttgtagtgacttgcttcataatagactattaaaataagatgcattgaaatcttgttcttttctttgcaataccatgtatcagctttgttttgagaggcaaactcaattttcccctgaaattaggaaattactgtaagggactggaatgacacacaagaaaagattacatcatagcagggagactagccagttagaatggggatttctttacaaacactagactggactatggattataatttacctagtgttaatagttgcagtcatacattaaggacaatatgtatgttctttagttttttgtcactgagcagaggtagaaacagggaaacaacaaaggccgaataatttccagccattg

SEQ ID NO: 18875 - protein, 50 aa, Homo sapiens
MGISLQTLDWTMDYNLPSVNSCSHTLRTICMFFSFLSLSRGRNRETTKAE

SEQ ID NO: 18876 - DNA, 804 bp, Homo sapiens
agtaattttgtcgctagttactgtattactggaaaatgtattcctaggctttaagatttgggaagcgtgtgagtctaacttctcaaacagaatttgacaaggacgtagcagtgttttaaaaagtcagggaaaggaaagaggtgtgttcagcattcctgccccatcttaacatattctttttctcgtcttaacagtggtaatattttatgttattttggtttgatttttgtttgtggcatatggctctgctgtcctgtgactctaagtagaagagaaaatagtgccaataattcttcatggagatgcacctctctcaagtcttgaacaatgtttgaggaaaagtgctttcagctgggctgatgagaacaccttggcactctttcctgcaatgggcactgattgagggtcttcctggtgtggcatcatcaaatccctgttgctcaaacccactaattagctcattcttatctacaagtagcaggggccctaaagctctctgagaagatctcatactgtgtctcctacatttcatcttctataatctcttattcttagagacagaaagatggttaaaagacatcacttcatttctttctctggatttggaaagagttatatattgggattatgctgttagtttacacttgcattgtttaaattagaggaaaggttattttgtgcagaacaaataaaaattactctttaactacctttcagaatatcccaacttttaacataagctgttttgtaaaggctggttgtagtgacttgcttcataatagactattaaaataagatgcattg

SEQ ID NO: 18877 - protein, 46 aa, Homo sapiens
MRTPWHSFLQWALIEGLPGVASSNPCCSNPLISSFLSTSSRGPKAL

SEQ ID NO: 18878 - DNA, 1203 bp, Homo sapiens
ctctcgcctcggcctgcggccgggatcctccgcccgggtcgcgcagcggaggccgagggctgggacgggcggctgggaagtgggaaagggagccagaggcgctccttttgtcttctcttcccatcccccaggtttgggaaagttttccttttgggaaagcccctctcttcagcctgctggcgggtgtcggattggttagcgaccaccggcccccgcctcccccaacaggattctcctttgggccacaggtcttccggaagttgccaaaccccggtagcggcagcgtccggctgggggctttattagggggcaccggggtctgctttccgactcccttccgactccgcgcctgcgcaggaagcgatttggggagtgttgtgaattccgagggctccacacttaagaggttgtacactcacctgtctacctggactccaatttccatatttccagccacttgaggactgagaggtggatgataaaccctgtcatagtggagcaagttcaggtgtttaaccgctgttatgggggatctgccttttctccctcttctttcttacttccataagtatgtatgtgcagagattgaaaaataaccttgagagagtccatccatctaactccagttcattggaaatttctgcttctttgagactgaggttatattccacttcttctgactacaccaccaccatcaatctccttctctgaactcttggatcattacttcaacctgaaacaactcatcaggcagaatagttgcctactgccccaaccccaccaaatgttccagcacctctgatattacctcacatggcaagagggctttgaagatgtgattgagtcaaggatcttgaatggggagattatcctgaattattcagctggacccagtgtaatcacaaaggtttttcaaagatggaagagaggcagaagagccagaaaaggatatgtgacaatggagtcagtgtcagagttggagtgacgtgatgtgagaaggattcaacctgctgtttctggctttgaggatgaaagaaggggccatgagccaagcaatacaggtggcttctttcaagaagttggaaaaggtaaggaaatgggttctcacctagaactgctggaaagcaacccagccctactgacaccatgattttagctcagtgagactctgtccagatttctgacctctagaactataagata

SEQ ID NO: 18879 - protein, 46 aa, Homo sapiens; identical to SEQ ID NO: 18873

SEQ ID NO: 18880 - DNA, 1002 bp, Homo sapiens
ctctcgcctcggcctgcggccgggatcctccgcccgggtcgcgcagcggaggccgagggctgggacgggcggctgggaagtgggaaagggagccagaggcgctccttttgtcttctcttcccatcccccaggtttgggaaagttttccttttgggaaagcccctctcttcagcctgctggcgggtgtcggattggttagcgaccaccggcccccgcctcccccaacaggattctcctttgggccacaggtcttccggaagttgccaaaccccggtagcggcagcgtccggctgggggctttattagggggcaccggggtctgctttccgactcccttccgactccgcgcctgcgcaggaagcgatttggggagtgttgtgaattccgagggctccacacttaagaggttgtacactcacctgtctacctggactccaatttccatatttccagccacttgaggactgagaggtggatgataaaccctgtcatagtggagcaagttcaggtgtttaaccgctgttatgggggatctgccttttctccctcttctttcttacttccataagtatgtatgtgcagagattgaaaaataaccttgagagagtccatccatctaactccagggagtcgtgctctgtcacccaggctggagtgtagtggcgcgatctctgctctgctcattgcaacctctgcctccctggttcaagcaattcttctgcctcagcctcccaagtagcttggattacaggcgcccgccaccacacccagctaatttttgtatttttagtagagacggggtttcaccgtgttggccaagctggtctcgaactcctgacctcgtgatccgcccaccttgtcctcccaaagtgctgggattacaggcgtgagccaccgcgcccggccaataagcttttttcttaaaaagtactcagaagacttttctatccattcattctgttaacgcgcgtcagtgtgaagagaccaccaaacaggctttgg

SEQ ID NO: 18881 - protein, 30 aa, Homo sapiens
MINPVIVEQVQVFNRCYGGSAFSPSSFLLP

SEQ ID NO: 18882 - DNA, 2003 bp, Homo sapiens
gtttggggagggaggagctcgggcggccggagctggtcgctgcgcgcgccggggggagggccggggctgcgagagaggaagctctttcgcggcgctaccgcgttggcaccagtctctagaaaagaagtcagctctggttcggagaagcagcggctggcgtgggccatccggggaatgggcgccctcgtgacctagtgttgcggggcaaaaagggtcttgccggcctcgctcgtgcaggggcgtatctgggcgcctgagcgcggcgtgggagccttgggagccgccgcagcagggggcacacccggaaccggcctgagcgcccgggaccatgaacggggaggccatctgcagcgccctgcccaccattccctaccacaaactcgccgacctgcgctacctgagccgcggcgcctctggcactgtgtcgtccgcccgccacgcagactggcgcgtccaggtggccgtgaagcacctgcacatccacactccgctgctcgacagtgaaagaaaggatgtcttaagagaagctgaaattttacacaaagctagatttagttacattcttccaattttgggaatttgcaatgagcctgaatttttgggaatagttactgaatacatgccaaatggatcattaaatgaactcctacataggaaaactgaatatcctgatgttgcttggccattgagatttcgcatcctgcatgaaattgcccttggtgtaaattacctgcacaatatgactcctcctttacttcatcatgacttgaagactcagaatatcttattggacaatgaatttcatgttaagattgcagattttggtttatcaaagtggcgcatgatgtccctctcacagtcacgaagtagcaaatctgcaccagaaggagggacaattatctatatgccacctgaaaactatgaacctggacaaaaatcaagggccagtatcaagcacgatatatatagctatgcagttatcacatgggaagtgttatccagaaaacagccttttgaagatgtcaccaatcctttgcagataatgtatagtgtgtcacaaggacatcgacctgttattaatgaagaaagtttgccatatgatatacctcaccgagcacgtatgatctctctaatagaaagtggatgggcacaaaatccagatgaaagaccatctttcttaaaatgtttaatagaacttgaaccagttttgagaacatttgaagagataacttttcttgaagctgttattcagctaaagaaaacaaagttacagagtgtttcaagtgccattcacctatgtgacaagaagaaaatggaattatctctgaacatacctgtaaatcatggtccacaagaggaatcatgtggatcctctcagctccatgaaaatagtggttctcctgaaacttcaaggtccctgccagctcctcaagacaatgattttttatctagaaaagctcaagactgttattttatgaagctgcatcactgtcctggaaatcacagttgggatagcaccatttctggatctcaaagggctgcattctgtgatcacaagaccactccatgctcttcagcaataataaatccactctcaactgcaggaaactcagaacgtctgcagcctggtatagcccagcagtggatccagagcaaaagggaagacattgtgaaccaaatgacagaagcctgccttaaccagtcgctagatgcccttctgtccagggacttgatcatgaaagaggactatgaacttgttagtaccaagcctacaaggacctcaaaagtcagacaattactagacactactgacatccaaggagaagaatttgccaaagttatagtacaaaaattgaaagataacaaacaaatgggtcttcagccttacccggaaatacttgtggtttctagatcaccatctttaaatttacttcaaaataaaagcatgtaagtgactgtttttcaagaagaaatgtgtttcataaaaggatatttatatctct

SEQ ID NO: 18883 - protein, 540 aa, Homo sapiens; identical to SEQ ID NO: 2304

SEQ ID NO: 18884 - DNA, 2059 bp, Homo sapiens
gtttggggagggaggagctcgggcggccggagctggtcgctgcgcgcgccggggggagggccggggctgcgagagaggaagctctttcgcggcgctaccgcgttggcaccagtctctagaaaagaagtcagctctggttcggagaagcagcggctggcgtgggccatccggggaatgggcgccctcgtgacctagtgttgcggggcaaaaagggtcttgccggcctcgctcgtgcaggggcgtatctgggcgcctgagcgcggcgtgggagccttgggagccgccgcagcagggggcacacccggaaccggcctgagcgcccgggaccatgaacggggaggccatctgcagcgccctgcccaccattccctaccacaaactcgccgacctgcgctacctgagccgcggcgcctctggcactgtgtcgtccgcccgccacgcagactggcgcgtccaggtggccgtgaagcacctgcacatccacactccgctgctcgacagtgaaagaaaggatgtcttaagagaagctgaaattttacacaaagctagatttagttacattcttccaattttgggaatttgcaatgagcctgaatttttgggaatagttactgaatacatgccaaatggatcattaaatgaactcctacataggaaaactgaatatcctgatgttgcttggccattgagatttcgcatcctgcatgaaattgcccttggtgtaaattacctgcacaatatgactcctcctttacttcatcatgacttgaagactcagaatatcttattggacaatgaatttcatgttaagattgcagattttggtttatcaaagtggcgcatgatgtccctctcacagtcacgaagtagcaaatctgcaccagaaggagggacaattatctatatgccacctgaaaactatgaacctggacaaaaatcaagggccagtatcaagcacgatatatatagctatgcagttatcacatgggaagtgttatccagaaaacagccttttgaagatgtcaccaatcctttgcagataatgtatagtgtgtcacaaggacatcgacctgttattaatgaagaaagtttgccatatgatatacctcaccgagcacgtatgatctctctaatagaaagtggatgggcacaaaatccagatgaaagaccatctttcttaaaatgtttaatagaacttgaaccagttttgagaacatttgaagagataacttttcttgaagctgttattcagctaaagaaaacaaagttacagagtgtttcaagtgccattcacctatgtgacaagaagaaaatggaattatctctgaacatacctgtaaatcatggtccacaagaggaatcatgtggatcctctcagctccatgaaaatagtggttctcctgaaacttcaaggtccctgccagctcctcaagacaatgattttttatctagaaaagctcaagactgttattttatgaagctgcatcactgtcctggaaatcacagttgggatagcaccatttctggatctcaaagggctgcattctgtgatcacaagaccactccatgctcttcagcaataataaatccactctcaactgcaggaaactcagaacgtctgcagcctggtatagcccagcagtggatccagagcaaaagggaagacattgtgaaccaaatgacagaagcctgccttaaccagtcgctagatgcccttctgtccagggacttgatcatgaaagaggactatgaacttgttagtaccaagcctacaaggacctcaaaagtcagacaattactagacactactgacatccaaggagaagaatttgccaaagttatagtacaaaaattgaaagataacaaacaaatgggtcttcagccttacccggaaatacttgtggtttctagatcaccatctttaaatttacttcaaaataaaagcatgtaagtgactgtttttcaagaagaaatgtgtttcataaaaggatatttatatctctgttgctttgactttttttatataaaatccgtgagtattaaagctttattgaaggtt

SEQ ID NO: 18885 - protein, 540 aa, Homo sapiens; identical to SEQ ID NO: 2304

SEQ ID NO: 18886 - DNA, 2143 bp, Homo sapiens
gtttggggagggaggagctcgggcggccggagctggtcgctgcgcgcgccggggggagggccggggctgcgagagaggaagctctttcgcggcgctaccgcgttggcaccagtctctagaaaagaagtcagctctggttcggagaagcagcggctggcgtgggccatccggggaatgggcgccctcgtgacctagtgttgcggggcaaaaagggtcttgccggcctcgctcgtgcaggggcgtatctgggcgcctgagcgcggcgtgggagccttgggagccgccgcagcagggggcacacccggaaccggcctgagcgcccgggaccatgaacggggaggccatctgcagcgccctgcccaccattccctaccacaaactcgccgacctgcgctacctgagccgcggcgcctctggcactgtgtcgtccgcccgccacgcagactggcgcgtccaggtggccgtgaagcacctgcacatccacactccgctgctcgacagtgaaagaaaggatgtcttaagagaagctgaaattttacacaaagctagatttagttacattcttccaattttgggaatttgcaatgagcctgaatttttgggaatagttactgaatacatgccaaatggatcattaaatgaactcctacataggaaaactgaatatcctgatgttgcttggccattgagatttcgcatcctgcatgaaattgcccttggtgtaaattacctgcacaatatgactcctcctttacttcatcatgacttgaagactcagaatatcttattggacaatgaatttcatgttaagattgcagattttggtttatcaaagtggcgcatgatgtccctctcacagtcacgaagtagcaaatctgcaccagaaggagggacaattatctatatgccacctgaaaactatgaacctggacaaaaatcaagggccagtatcaagcacgatatatatagctatgcagttatcacatgggaagtgttatccagaaaacagccttttgaagatgtcaccaatcctttgcagataatgtatagtgtgtcacaaggacatcgacctgttattaatgaagaaagtttgccatatgatatacctcaccgagcacgtatgatctctctaatagaaagtggatgggcacaaaatccagatgaaagaccatctttcttaaaatgtttaatagaacttgaaccagttttgagaacatttgaagagataacttttcttgaagctgttattcagctaaagaaaacaaagttacagagtgtttcaagtgccattcacctatgtgacaagaagaaaatggaattatctctgaacatacctgtaaatcatggtccacaagaggaatcatgtggatcctctcagctccatgaaaatagtggttctcctgaaacttcaaggtccctgccagctcctcaagacaatgattttttatctagaaaagctcaagactgttattttatgaagctgcatcactgtcctggaaatcacagttgggatagcaccatttctggatctcaaagggctgcattctgtgatcacaagaccactccatgctcttcagcaataataaatccactctcaactgcaggaaactcagaacgtctgcagcctggtatagcccagcagtggatccagagcaaaagggaagacattgtgaaccaaatgacagaagcctgccttaaccagtcgctagatgcccttctgtccagggacttgatcatgaaagaggactatgaacttgttagtaccaagcctacaaggacctcaaaagtcagacaattactagacactactgacatccaaggagaagaatttgccaaagttatagtacaaaaattgaaagataacaaacaaatgggtcttcagccttacccggaaatacttgtggtttctagatcaccatctttaaatttacttcaaaataaaagcatgtaagtgactgtttttcaagaagaaatgtgtttcataaaaggatatttatatctctgttgctttgactttttttatataaaatccgtgagtattaaagctttattgaaggttctttgggtaaatattagtctccctccatgacactgcagtattttttttaattaatacaagtaaaaagtttgaattttgctacat

SEQ ID NO: 18887 - protein, 540 aa, Homo sapiens; identical to SEQ ID NO: 2304

SEQ ID NO: 18888 - DNA, 1989 bp, Homo sapiens
gtttggggagggaggagctcgggcggccggagctggtcgctgcgcgcgccggggggagggccggggctgcgagagaggaagctctttcgcggcgctaccgcgttggcaccagtctctagaaaagaagtcagctctggttcggagaagcagcggctggcgtgggccatccggggaatgggcgccctcgtgacctagtgttgcggggcaaaaagggtcttgccggcctcgctcgtgcaggggcgtatctgggcgcctgagcgcggcgtgggagccttgggagccgccgcagcagggggcacacccggaaccggcctgagcgcccgggaccatgaacggggaggccatctgcagcgccctgcccaccattccctaccacaaactcgccgacctgcgctacctgagccgcggcgcctctggcactgtgtcgtccgcccgccacgcagactggcgcgtccaggtggccgtgaagcacctgcacatccacactccgctgctcgacagaaaactgaatatcctgatgttgcttggccattgagatttcgcatcctgcatgaaattgcccttggtgtaaattacctgcacaatatgactcctcctttacttcatcatgacttgaagactcagaatatcttattggacaatgaatttcatgttaagattgcagattttggtttatcaaagtggcgcatgatgtccctctcacagtcacgaagtagcaaatctgcaccagaaggagggacaattatctatatgccacctgaaaactatgaacctggacaaaaatcaagggccagtatcaagcacgatatatatagctatgcagttatcacatgggaagtgttatccagaaaacagccttttgaagatgtcaccaatcctttgcagataatgtatagtgtgtcacaaggacatcgacctgttattaatgaagaaagtttgccatatgatatacctcaccgagcacgtatgatctctctaatagaaagtggatgggcacaaaatccagatgaaagaccatctttcttaaaatgtttaatagaacttgaaccagttttgagaacatttgaagagataacttttcttgaagctgttattcagctaaagaaaacaaagttacagagtgtttcaagtgccattcacctatgtgacaagaagaaaatggaattatctctgaacatacctgtaaatcatggtccacaagaggaatcatgtggatcctctcagctccatgaaaatagtggttctcctgaaacttcaaggtccctgccagctcctcaagacaatgattttttatctagaaaagctcaagactgttattttatgaagctgcatcactgtcctggaaatcacagttgggatagcaccatttctggatctcaaagggctgcattctgtgatcacaagaccactccatgctcttcagcaataataaatccactctcaactgcaggaaactcagaacgtctgcagcctggtatagcccagcagtggatccagagcaaaagggaagacattgtgaaccaaatgacagaagcctgccttaaccagtcgctagatgcccttctgtccagggacttgatcatgaaagaggactatgaacttgttagtaccaagcctacaaggacctcaaaagtcagacaattactagacactactgacatccaaggagaagaatttgccaaagttatagtacaaaaattgaaagataacaaacaaatgggtcttcagccttacccggaaatacttgtggtttctagatcaccatctttaaatttacttcaaaataaaagcatgtaagtgactgtttttcaagaagaaatgtgtttcataaaaggatatttatatctctgttgctttgactttttttatataaaatccgtgagtattaaagctttattgaaggttctttgggtaaatattagtctccctccatgacactgcagtattttttttaattaatacaagtaaaaagtttgaattttgctacat

SEQ ID NO: 18889 - protein, 403 aa, Homo sapiens
MTPPLLHHDLKTQNILLDNEFHVKIADFGLSKWRMMSLSQSRSSKSAPEGGTIIYMPPENYEPGQKSRASIKHDIYSYAVITWEVLSRKQPFEDVTNPLQIMYSVSQGHRPVINEESLPYDIPHRARMISLIESGWAQNPDERPSFLKCLIELEPVLRTFEEITFLEAVIQLKKTKLQSVSSAIHLCDKKKMELSLNIPVNHGPQEESCGSSQLHENSGSPETSRSLPAPQDNDFLSRKAQDCYFMKLHHCPGNHSWDSTISGSQRAAFCDHKTTPCSSAIINPLSTAGNSERLQPGIAQQWIQSKREDIVNQMTEACLNQSLDALLSRDLIMKEDYELVSTKPTRTSKVRQLLDTTDIQGEEFAKVIVQKLKDNKQMGLQPYPEILVVSRSPSLNLLQNKSM

SEQ ID NO: 18890 - DNA, 3046 bp, Homo sapiens
gtttggggagggaggagctcgggcggccggagctggtcgctgcgcgcgccggggggagggccggggctgcgagagaggaagctctttcgcggcgctaccgcgttggcaccagtctctagaaaagaagtcagctctggttcggagaagcagcggctggcgtgggccatccggggaatgggcgccctcgtgacctagtgttgcggggcaaaaagggtcttgccggcctcgctcgtgcaggggcgtatctgggcgcctgagcgcggcgtgggagccttgggagccgccgcagcagggggcacacccggaaccggcctgagcgcccgggaccatgaacggggaggccatctgcagcgccctgcccaccattccctaccacaaactcgccgacctgcgctacctgagccgcggcgcctctggcactgtgtcgtccgcccgccacgcagactggcgcgtccaggtggccgtgaagcacctgcacatccacactccgctgctcgacagtgaaagaaaggatgtcttaagagaagctgaaattttacacaaagctagatttagttacattcttccaattttgggaatttgcaatgagcctgaatttttgggaatagttactgaatacatgccaaatggatcattaaatgaactcctacataggaaaactgaatatcctgatgttgcttggccattgagatttcgcatcctgcatgaaattgcccttggtgtaaattacctgcacaatatgactcctcctttacttcatcatgacttgaagactcagaatatcttattggacaatgaatttcatgttaagattgcagattttggtttatcaaagtggcgcatgatgtccctctcacagtcacgaagtagcaaatctgcaccagaaggagggacaattatctatatgccacctgaaaactatgaacctggacaaaaatcaagggccagtatcaagcacgatatatatagctatgcagttatcacatgggaagtgttatccagaaaacagccttttgaagatgtcaccaatcctttgcagataatgtatagtgtgtcacaaggacatcgacctgttattaatgaagaaagtttgccatatgatatacctcaccgagcacgtatgatctctctaatagaaagtggatgggcacaaaatccagatgaaagaccatctttcttaaaatgtttaatagaacttgaaccagttttgagaacatttgaagagataacttttcttgaagctgttattcagctaaagaaaacaaagttacagagtgtttcaagtgccattcacctatgtgacaagaagaaaatggaattatctctgaacatacctgtaaatcatggtccacaagaggaatcatgtggatcctctcagctccatgaaaatagtggttctcctgaaacttcaaggtccctgccagctcctcaagacaatgattttttatctagaaaagctcaagactgttattttatgaagctgcatcactgtcctggaaatcacagttgggatagcaccatttctggatctcaaagggctgcattctgtgatcacaagaccactccatgctcttcagcaataataaatccactctcaactgcaggaaactcagaacgtctgcagcctggtatagcccagcagtggatccagagcaaaagggaagacattgtgaaccaaatgacagaagcctgccttaaccagtcgctagatgcccttctgtccagggacttgatcatgaaagaggactatgaacttgttagtaccaagcctacaaggacctcaaaagtcagacaattactagacactactgacatccaaggagaagaatttgccaaagttatagtacaaaaattgaaagataacaaacaaatgggtcttcagccttacccggaaatacttgtggtttctagatcaccatctttaaatttacttcaaaataaaagcatgtaagtgactgtttttcaagaagaaatgtgtttcataaaaggatatttatatctctgttgctttgactttttttatataaaatccgtgagtattaaagctttattgaaggttctttgggtaaatattagtctccctccatgacactgcagtattttttttaattaatacaagtaaaaagtttgaattttgctacatagttcaatttttatgtctcttttgttaacagaaaccacttttaaaggatagtaattattcttgtttataacagtgccttaaggtatgatgtatttctgatggaagccattttcacattcatgttcttcatggattatttgttacttgtctaagatgcaatttgattttatgaagtatataccctttacccaccagagacagtacagaatccctgccctaaaatcccaggcttaattgccctacaaagggttattaatttaaaactccattattaggattacattttaaagttttatttatgaattccctttaaaaatgatatttcaaaggtaaaacaatacaatataaagaaaaaaataaatatattaataccggcttcctgtccccatttttaacctcagccttccctactgtcaccaacaaccaagctaaataaagtcaacagcctgatgtgtatctttctgtccctttcttcctgcttatatttagaacatatgctcatttgagaaaggatctttctgcatattattattataattatacatcatactgcaacctgctttttgcatttaatagtacagccttccagatcagatatggctctaacttactctttttacttgctgcctaatacccacagtttttattttcttaacttgtccatatcaaatttagcccaaacaataaaagtacggtgtgagcacttttttggttaataggttatattactataggagaacttacaaggaataatagcccttttctgaaactgcgtagcgaagtcagcagaaagtgagatacagaataaatttgaaaagatgaactttcaagaagcaacagacccacaacctgaaaagtttgaataaaagaaattagatgccattgaggtaattaaatattaat

SEQ ID NO: 18891 - protein, 540 aa, Homo sapiens; identical to SEQ ID NO: 2304

SEQ ID NO: 18892 - DNA, 2892 bp, Homo sapiens
gtttggggagggaggagctcgggcggccggagctggtcgctgcgcgcgccggggggagggccggggctgcgagagaggaagctctttcgcggcgctaccgcgttggcaccagtctctagaaaagaagtcagctctggttcggagaagcagcggctggcgtgggccatccggggaatgggcgccctcgtgacctagtgttgcggggcaaaaagggtcttgccggcctcgctcgtgcaggggcgtatctgggcgcctgagcgcggcgtgggagccttgggagccgccgcagcagggggcacacccggaaccggcctgagcgcccgggaccatgaacggggaggccatctgcagcgccctgcccaccattccctaccacaaactcgccgacctgcgctacctgagccgcggcgcctctggcactgtgtcgtccgcccgccacgcagactggcgcgtccaggtggccgtgaagcacctgcacatccacactccgctgctcgacagaaaactgaatatcctgatgttgcttggccattgagatttcgcatcctgcatgaaattgcccttggtgtaaattacctgcacaatatgactcctcctttacttcatcatgacttgaagactcagaatatcttattggacaatgaatttcatgttaagattgcagattttggtttatcaaagtggcgcatgatgtccctctcacagtcacgaagtagcaaatctgcaccagaaggagggacaattatctatatgccacctgaaaactatgaacctggacaaaaatcaagggccagtatcaagcacgatatatatagctatgcagttatcacatgggaagtgttatccagaaaacagccttttgaagatgtcaccaatcctttgcagataatgtatagtgtgtcacaaggacatcgacctgttattaatgaagaaagtttgccatatgatatacctcaccgagcacgtatgatctctctaatagaaagtggatgggcacaaaatccagatgaaagaccatctttcttaaaatgtttaatagaacttgaaccagttttgagaacatttgaagagataacttttcttgaagctgttattcagctaaagaaaacaaagttacagagtgtttcaagtgccattcacctatgtgacaagaagaaaatggaattatctctgaacatacctgtaaatcatggtccacaagaggaatcatgtggatcctctcagctccatgaaaatagtggttctcctgaaacttcaaggtccctgccagctcctcaagacaatgattttttatctagaaaagctcaagactgttattttatgaagctgcatcactgtcctggaaatcacagttgggatagcaccatttctggatctcaaagggctgcattctgtgatcacaagaccactccatgctcttcagcaataataaatccactctcaactgcaggaaactcagaacgtctgcagcctggtatagcccagcagtggatccagagcaaaagggaagacattgtgaaccaaatgacagaagcctgccttaaccagtcgctagatgcccttctgtccagggacttgatcatgaaagaggactatgaacttgttagtaccaagcctacaaggacctcaaaagtcagacaattactagacactactgacatccaaggagaagaatttgccaaagttatagtacaaaaattgaaagataacaaacaaatgggtcttcagccttacccggaaatacttgtggtttctagatcaccatctttaaatttacttcaaaataaaagcatgtaagtgactgtttttcaagaagaaatgtgtttcataaaaggatatttatatctctgttgctttgactttttttatataaaatccgtgagtattaaagctttattgaaggttctttgggtaaatattagtctccctccatgacactgcagtattttttttaattaatacaagtaaaaagtttgaattttgctacatagttcaatttttatgtctcttttgttaacagaaaccacttttaaaggatagtaattattcttgtttataacagtgccttaaggtatgatgtatttctgatggaagccattttcacattcatgttcttcatggattatttgttacttgtctaagatgcaatttgattttatgaagtatataccctttacccaccagagacagtacagaatccctgccctaaaatcccaggcttaattgccctacaaagggttattaatttaaaactccattattaggattacattttaaagttttatttatgaattccctttaaaaatgatatttcaaaggtaaaacaatacaatataaagaaaaaaataaatatattaataccggcttcctgtccccatttttaacctcagccttccctactgtcaccaacaaccaagctaaataaagtcaacagcctgatgtgtatctttctgtccctttcttcctgcttatatttagaacatatgctcatttgagaaaggatctttctgcatattattattataattatacatcatactgcaacctgctttttgcatttaatagtacagccttccagatcagatatggctctaacttactctttttacttgctgcctaatacccacagtttttattttcttaacttgtccatatcaaatttagcccaaacaataaaagtacggtgtgagcacttttttggttaataggttatattactataggagaacttacaaggaataatagcccttttctgaaactgcgtagcgaagtcagcagaaagtgagatacagaataaatttgaaaagatgaactttcaagaagcaacagacccacaacctgaaaagtttgaataaaagaaattagatgccattgaggtaattaaatattaat

SEQ ID NO: 18893 - protein, 403 aa, Homo sapiens; identical to SEQ ID NO: 18889

SEQ ID NO: 18894 - DNA, 607 bp, Homo sapiens
aggacatcgacctgttattaatgaagaaagtttgccatatgcaataataaatccactctcaactgcaggaaactcagaacgtctgcagcctggtatagcccagcagtggatccagagcaaaagggaagacattgtgaaccaaatgacagaagcctgccttaaccagtcgctagatgcccttctgtccagggacttgatcatgaaagaggactatgaacttgttagtaccaagcctacaaggacctcaaaagtcagacaattactagacactactgacatccaaggagaagaatttgccaaagttatagtacaaaaattgaaagataacaaacaaatgggtcttcagccttacccggaaatacttgtggtttctagatcaccatctttaaatttacttcaaaataaaagcatgtaagtgactgtttttcaagaagaaatgtgtttcataaaaggatatttatatctctgttgctttgactttttttatataaaatccgtgagtattaaagctttattgaaggttctttgggtaaatattagtctccctccatgacactgcagtattttttttaattaatacaagtaaaaagtttgaattttgctacat

SEQ ID NO: 18895 - protein, 90 aa, Homo sapiens
MTEACLNQSLDALLSRDLIMKEDYELVSTKPTRTSKVRQLLDTTDIQGEEFAKVIVQKLKDNKQMGLQPYPEILVVSRSPSLNLLQNKSM

SEQ ID NO: 18896 - DNA, 1510 bp, Homo sapiens
aggacatcgacctgttattaatgaagaaagtttgccatatgcaataataaatccactctcaactgcaggaaactcagaacgtctgcagcctggtatagcccagcagtggatccagagcaaaagggaagacattgtgaaccaaatgacagaagcctgccttaaccagtcgctagatgcccttctgtccagggacttgatcatgaaagaggactatgaacttgttagtaccaagcctacaaggacctcaaaagtcagacaattactagacactactgacatccaaggagaagaatttgccaaagttatagtacaaaaattgaaagataacaaacaaatgggtcttcagccttacccggaaatacttgtggtttctagatcaccatctttaaatttacttcaaaataaaagcatgtaagtgactgtttttcaagaagaaatgtgtttcataaaaggatatttatatctctgttgctttgactttttttatataaaatccgtgagtattaaagctttattgaaggttctttgggtaaatattagtctccctccatgacactgcagtattttttttaattaatacaagtaaaaagtttgaattttgctacatagttcaatttttatgtctcttttgttaacagaaaccacttttaaaggatagtaattattcttgtttataacagtgccttaaggtatgatgtatttctgatggaagccattttcacattcatgttcttcatggattatttgttacttgtctaagatgcaatttgattttatgaagtatataccctttacccaccagagacagtacagaatccctgccctaaaatcccaggcttaattgccctacaaagggttattaatttaaaactccattattaggattacattttaaagttttatttatgaattccctttaaaaatgatatttcaaaggtaaaacaatacaatataaagaaaaaaataaatatattaataccggcttcctgtccccatttttaacctcagccttccctactgtcaccaacaaccaagctaaataaagtcaacagcctgatgtgtatctttctgtccctttcttcctgcttatatttagaacatatgctcatttgagaaaggatctttctgcatattattattataattatacatcatactgcaacctgctttttgcatttaatagtacagccttccagatcagatatggctctaacttactctttttacttgctgcctaatacccacagtttttattttcttaacttgtccatatcaaatttagcccaaacaataaaagtacggtgtgagcacttttttggttaataggttatattactataggagaacttacaaggaataatagcccttttctgaaactgcgtagcgaagtcagcagaaagtgagatacagaataaatttgaaaagatgaactttcaagaagcaacagacccacaacctgaaaagtttgaataaaagaaattagatgccattgaggtaattaaatattaat

SEQ ID NO: 18897 - protein, 90 aa, Homo sapiens; identical to SEQ ID NO: 18895

SEQ ID NO: 18898 - DNA, 418 bp, Homo sapiens
ataaatccactctcaactgcaggaaactcagaacgtctgcagcctggtatagcccagcagtggatccagagcaaaagggaagacattgtgaaccaaatgacagaagcctgccttaaccagtcgctagatgcccttctgtccagggacttgatcatgaaagaggactatgaacttgttagtaccaagcctacaaggacctcaaaagtcagacaattactagacactactgacatccaaggagaagaatttgccaaagttatagtacaaaaattgaaagataacaaacaaatgggtcttcagccttacccggaaatacttgtggtttctagatcaccatctttaaatttacttcaaaataaaagcatgtaagtgactgtttttcaagaagaaatgtgtttcataaaaggatatttatatc

SEQ ID NO: 18899 - protein, 90 aa, Homo sapiens; identical to SEQ ID NO: 18895

SEQ ID NO: 18900 - DNA, 475 bp, Homo sapiens
ataaatccactctcaactgcaggaaactcagaacgtctgcagcctggtatagcccagcagtggatccagagcaaaagggaagacattgtgaaccaaatgacagaagcctgccttaaccagtcgctagatgcccttctgtccagggacttgatcatgaaagaggactatgaacttgttagtaccaagcctacaaggacctcaaaagtcagacaattactagacactactgacatccaaggagaagaatttgccaaagttatagtacaaaaattgaaagataacaaacaaatgggtcttcagccttacccggaaatacttgtggtttctagatcaccatctttaaatttacttcaaaataaaagcatgtaagtgactgtttttcaagaagaaatgtgtttcataaaaggatatttatatctctgttgctttgactttttttatataaaatccgtgagtattaaagctttattgaagg

SEQ ID NO: 18901 - protein, 90 aa, Homo sapiens; identical to SEQ ID NO: 18895

SEQ ID NO: 18902 - DNA, 866 bp, Homo sapiens
ggcttggtgaaccctcaaaaaggctgtcaaacacccagaggccttggggatcaggaaggagctatcatgtggtctttcatctaagagagaattgtcctgcctgatgggcttcaaaccaccagaacatcagttcttcctggttctgcagtagtctccaaccttcagactcaaacttcagcacctgttcttcagattttggacttgcagcctctataatcacatgagccaattccttatataaatttatttatacatgctgacagttggttctgtttctctggataaccctgactgttagagctgttacctcaaatttgttttcttatatttggtgtctgttttggagtacttacaagtgcttaaaatgttctttttcaattaggtgagtctcagtctctaagataatttttttattgttctattttatagattacatgttaatgtcaattaagctataaacattttattgctgatacattatcaaaatgcttttcaaacagccatttccaacagtctattctttggcaaaaaaacaatgccattctcttgccatggccaaatgtgagtgctactaacaggtaaactcttaatttgtaagtgaggctgaaatcttaaaatgccttcctgaaacttatacatgattgattttgtttatttgtgtaatttctttgttctatggtttcagcttcaattgctgagaaaatgtcaagattatttcctgagaatttcctttgtggctaagacaaaggagaagttttaattttactagaaactgtgaaacgaggcttttaaaaagtttcattaaaaaaaaaattagggaagaataggcatattcagaaaacctactttcatttaggctggattgg

SEQ ID NO: 18903 - protein, 40 aa, Homo sapiens
MIDFVYLCNFFVLWFQLQLLRKCQDYFLRISFVAKTKEKF

SEQ ID NO: 18904 - DNA, 406 bp, Homo sapiens
agaggaattcagaattcagcgggggtacattctcagctgatggagatggtcaaggggttaccgccagtctgtttcttgcgctgataatttttctagacattaaatctcaccatttgttcccaacaaagaaagaaagacaggaccaccagactctacagggtgatctgacactaacaacttaacaaccattctactgagtcaacaaatttctcctctgtgtacagacttcaaccgaagaatctaatactactgtgaagtgctgctgggcaggacacacgttcaggagacacagtaggggaacagatgaggccagagtggcccacagccggggtgaagagcccccaattatttataaagtgtttgctgcctcatttatgaaaataaatagtgcaaagctgttacaagt

SEQ ID NO: 18905 - protein, 59 aa, Homo sapiens
RNSEFSGGTFSADGDGQGVTASLFLALIIFLDIKSHHLFPTKKERQDHQTLQGDLTLTT

SEQ ID NO: 18906 - DNA, 496 bp, Homo sapiens
aagttaagattgccacctggaaactttgggctcctcttacctttaaggcaacaggctaagaaaggagttacagtgttatctggggtgattgaccaggactgtgaagatgaaatcagtctactactccacaacggagatggagatggtcaaggggttaccgccagtctgtttcttgcgctgataatttttctagacattaaatctcaccatttgttcccaacaaagaaagaaagacaggaccaccagactctacagggtgatctgacactaacaacttaacaaccattctactgagtcaacaaatttctcctctgtgtacagacttcaaccgaagaatctaatactactgtgaagtgctgctgggcaggacacacgttcaggagacacagtaggggaacagatgaggccagagtggcccacagccggggtgaagagcccccaattatttataaagtgtttgctgcctcatttatgaaaataaatagtgcaaagctgt

SEQ ID NO: 18907 - protein, 92 aa, Homo sapiens
KLRLPPGNFGLLLPLRQQAKKGVTVLSGVIDQDCEDEISLLLHNGDGDGQGVTASLFLALIIFLDIKSHHLFPTKKERQDHQTLQGDLTLTT

SEQ ID NO: 18908 - DNA, 3421 bp, Homo sapiens
acatgcatttccctgctgctatgtgaaatgtgcgtcttctccttccgccatgattaagtaagcaaacattttcctctaattcagattctttaaacaaaagttgcaaatgaatgtagccttcatctattgtaaaattaaagatggagatggtcaaggggttaccgccagtctgtttcttgcgctgataatttttctagacattaaatctcaccatttgttcccaacaaagaaagaaagacaggaccaccagactctacagggaagccaagaggaagaagggaaggagcccagaaatggagagaagctggactctagggatggatctggggatgctccacaaagtgcagctgtggagaatgcagaagaagagttggctagtgggacattcccactgaggagcatggcagggggaatgtctaatattcactaagagaattcttgaaatgtaacatttagatgaaactcttcaagtttccttaaaatacaaattcatgactctctttctttctctctctctctttctctctctctttggtatgttaaagtaatcaaggaaagggattttgttttataactgggttacacaggggagagaccagaatagctgaaagctgtgagacatgaagaaaattcaagatttaggagacatgcagaacatcagtgtctaggcaaaatggcagactgaccaacccccacacactgaatccctagagatattaggacagggatattgagaaaaatttacctttaagttgtaaaggacaaggcaactcaacatattgaatgccttgttgacaaccaggggctaatatttgggatgcatattgggcatagatgcacagaaaataatttatcagtgacattaataatatgacatctctttgttgagaatttactgctgtcttaatatcacaactctaaggggtcaacatccagaataaacttcttatcttacatatttaaaattatttgctaggctacatttttcttagaaaaatgcatatctgaaacagaatattgatttttttcctgggtcatacataaagaccatcagaaattaattattgaaaaaacactgctatactcattagagatatattttaattagattaattttgcattaacagtccatgagaagttacaactaacttgcaacgagacattaacatgcatcatgtttgatataagtaaaaatggaaatgattagaagtatacaaatataaagtatgttgctagtatatgcaagcttaaaaaacttttacctgatagaattagcaagagcagctatgttgagcttctttcagttaaaagtcattttcggctatgtctccctaaggatagaaatatcactgcttttgatctcatttagaattctgctcacttttaggaaagtagggctgtttggaaatggtcagccatatccttactgaatttcctagggcttgactgcacctactctagttaacaagtaagatatagttatatattgtattataacttctcaaagcacttatattttgattttccttcttttatgttcattatcttcatttggactactccatgtgacaaaagcagttatttttcttctaccccctaaactggaccacatcgatgctcttaggtccaaatcatattctttaagaaacaagtgttcactgaatgatttactgcattatataataggtactatacaagacacctgaggccccccacaccgtgaaaacagatgtttcttcctggagcttgcccaataggagagaaatttttaatttaccctttctcagtaaaccattatacaaaacagaagtgaaattatggacccagtgaactcaatctggctgacttgcaacccctatgtgttcataaacccactgaaatatataatttgttgtttatattaaatatgcactgaagcatgattagataaacattgaaagtaaattttaattttaaccatcagtggaagtatatggggtgatttaagtcattcatattagtttatttttatcaggtgttcctccttgtccatagtgaaatacaatacagagattatagcctgtggcttgacaggacatcttatagttggtaacaggactacattaaaaggaaaaaacaataaataaggatgtctaattatacagataaagaaagcaagttcactcactcctccaggacagcaccagagacaacgttagaaccaagagtttcaaaacctcgccttgtatggtttgcctgatgccatgattaaagaaaagggggtggggaactaagagaggaagccaaagagaaagaattcagtaccaaacagcaatattcagatgttttattaaataataggaggtgttttgaccttgctggtgaacagaggtgatctcaaaacatttgacagatataattaaggccataaggcaataattgcaaaagtcaaggagcccttgccacctccaaagcatcacgtgtggatgcaggaaccatattaacaacatgggtagtcaaggagaaagcagatagaataaagctgtacccagcaatataaagggacatgcaagtgtgtgttgtgcttaagagtaaacttagggaaaaaagctccccataacctcgagaaacgtttctggatctgagatatccattagcacatttagaaggtacctatttccattattgtgaaggagttgtaaatgaaataaacaactttaaataatacctcccttggtcaaactgcattaagtattccctgatggaattcattcatcatcattcaaacagaatggtttgcaactcaacctgcctagtgtggggtctggaattcccaccacagtcactgtgccttaagcactgttgcagcagaaggacttgaagtaacacatgaatatataatgccaatttgcatgtcagcatggattgttgaaattgaagttagttaattgtcacattgtaacaggaaaagaatccaagttttggagctggttggaactgagttttcatcttctttctctgctacttaactgtgttatcctgaacaagatactcaacctccatgagacacagtgaccatgtgaaatatatatgtaaaatgtctggcaaacatctgattcatgtaggtacccaaaattagatcattttcattttcttttgcttccttggaagttcaaaacaaaattctgaggtaagtttcaattaaaatgggtcaggcagacagattccagcaaggtcaaagcatccttttttctttaataaaatatctgaatatctgaacaagaaacaacttctgtttctcaaggttgaaatgatgaattattgaacttctgttgctgtttgttttctctcttatctccttactactacatataaatgagatatcttgctatcccactgatatctcaaattcagtatttcccaaataaaacgtaatcttttc

SEQ ID NO: 18909 - protein, 107 aa, Homo sapiens; identical to SEQ ID NO: 2306

SEQ ID NO: 18910 - DNA, 350 bp, Homo sapiens
agctttcactatagaagtgcccacgagctcttccaaacatattttcctttttaaataagcacatcttctagatggagatggtcaaggggttaccgccagtctgtttcttgcgctgataatttttctagacattaaatctcaccatttgttcccaacaaagaaagaaagacaggaccaccagatctagggatggatctggggatgctccacaaagtgcagctgtggagaatgcagaagaagagttggctagtgggacattcccactgaggagcatggcagggggaatgtctaatattcactaagagaattcttgaaatgtaacatttagatgaaactcttcaagtttcctt

SEQ ID NO: 18911 - protein, 42 aa, Homo sapiens
AHLLDGDGQGVTASLFLALIIFLDIKSHHLFPTKKERQDHQI

SEQ ID NO: 18912 - DNA, 266 bp, Homo sapiens
gaagacagaaataaaactaaaagctaattctctctggacttggaaaggaaggagtatcagagaagcagagaagagaaaaaagcttagaaagcaggaaagaagctgaaagcatttggaagacatcgtgaactctttgaaggcagaaactaaatgaaattcaccttcatatttacagggaccagcacagcctctagaacagaatgggtgctcaaatcaatatttctttaaaagaataaatgaatgaataaataaatgaatgcaagtgg

SEQ ID NO: 18913 - protein, 35 aa, Homo sapiens
KLILSGLGKEGVSEKQRREKSLESRKEAESIWKTS

SEQ ID NO: 18914 - DNA, 436 bp, Homo sapiens
ctggggatgatggtgagtggtgtcacttccacttccatccctttaatcctggagccgtgagtcctggctatgggagaaacagtgccatatatgggatgctgattcagagcatacacagtcttctggagaactttaccccaggtctgcaaagtattgttacctagttggcattgtaattgtgacttcaaaaggccgttccatcattttatcaattcagctgcttcaggatgacagataacatgcagactacctggtcatgtggccacgttctcatggtgatgtcagagggaagagtgccagcagaagtactctgcttagatcacatcttctatcatccccttgtccaaaatgctattcttggttcctgatctggtgttgccatcaacatgctaattgttcctgtacacttgcaaactcattaaacctgagaaagaca

SEQ ID NO: 18915 - protein, 59 aa, Homo sapiens
MWPRSHGDVRGKSASRSTLLRSHLLSSPCPKCYSWFLIWCCHQHANCSCTLANSLNLRK

SEQ ID NO: 18916 - DNA, 3671 bp, Homo sapiens
agtttctggaggctgctcacattccttggcttatggcctccttcttccaacgtcaaagccagcaacattgcagcaatctgacttattttgttgtcatgtctcctgaccacatctggaagggttatctacttttgaagacacatccagataattcaggacaatctgtccattttgaggttcttcattgaatcatgtctgcaaagtcccttctgcaatctaagtaagaaaaatcaccaagaatattatttttggtatttggaattgaatttgccaggaatgcaagcactgctacctaactaaagaccttggctttggaaacatcttaccccttggcagctctccagagtttagacttggcagcatcaaagacacaacgcaaggtaaacaggattataaaaaaactaaacctattttacgagcaaccaaattaaaagcagaagcaaagaaaacagcaataggcataaaggaagttggccttgtacttgcagctatattggcactactactggctttctatgctttcttttatctcagactcaccacggatgttgaccctgatctggaccaagatgaagattagctaagcaacaatcaatgcatgaaagagaaataactttacgaaagcaccttttgggaccaaaactttcaatactgaaactgtaacatctttaattctttctgctaatattttcagtttgcagacatatgatttttgatagttgcataggatgtcaggaaaagaaccttacctagcaatgcagtatagtatgtgctactggatacttttatatatctttctgctttgacagccaccctatacatggtacatttagatgaaatgggaaccagatcctaaatttttcaaatgtcattgccaatttatgtgtataattccatcacttcctgatgagtaagtctatttttgttctatatacatcataagttagtatatattcttatttacagaaacatgctcaaatcacattcagaaagaacaaaaagtcatgggaaattttttattttacaacaaagccctgctttctttctggacgtattttacatcattagagagactatctgcacatacatctaccataatctttttccttctttgccaactgttcagtgcacatgtgctgcatcagaaatggcacctggatgacagaagctcaaagagtcacatatgtctctaaaatagagttcttttcctcttgggctgtctgaactggtgtaaatagaagctcagttgatcttggttttaattaacttattactctattaatataaccttggaattctattctaattatgttgttctggctgcttgtagtatcagttcgcccctcttgttagggagatatgtaacaatctgtcatttaattgagcagtctttttcacataacagtaatagcaaaaatcctacctactcagaatcatcttcttaggttgtctcctaaatctgaacaatacagttgttttataaaattacattttgtctcttgagatttaatcaattagaactctttagggagaaaataaataatagaagaaaatatatgcctcatatttcatatgtaattatctgttgatataatttttcaatgtattttgtatttgtgggagcataatgacctgtacattcaatatttttactggtaattcaatttttaaatatgtttttacaatgcttgaacacataaaccttagaaaactggaaaatacgtgtccacagaaagagttattagctactaccttatgtaaagatgcatagaaaatgaaattgttggaaacatgtgcacaaagtgttttatattatatacattgtatttatgaagaataaataaaatattaagattgttttcctgctagccaagagaagaaatccttgggaaatatctaaggagtatatggggctttataagcactgtttctaaaagatattctctggtacttttgcaaaaagtcgactgtgactgtgtagcattatgttctgtagaatttttttcaagtagcataatttatttcattggtgtgaaaacagccaaaggttccaatatcctcacaaatcatttatgccaaacatctgagggcaaaatttagccggtgttatttactagattcttccctttgaactcacagactcaagagacagaccaagagttcttatatactcaccacagcggaccaatccaagtggcatttttaggaaaggttgcagcatttaatgccatgtggtatgtctgttcgtcaagtgggtggcaagggaatatccaagctggcattttggatatgatgggccttttactttcctgagtgacatgccacatgtcaagaaatactgctccccacccccccactcccatcacatttacgtgaacaattttcatttagttatttcccgttccatatggtgttaaaacagtcgtattaaataaagattatttctagttttcagtggtaatttaaatgagaggatatgtaataattgcttattagatacttatccaaatgaaatataacagagtttacagtacttaaaatggctggttatggtcttggaaatgtttgaaaattcattatcctgaaaaaaactttaccattctgttttacccttgaggtattttttggggaaaaatgtttttgataactattaatctaaatatagtataattataggcaaatttcactgcctagttttattgatatcctgagtctacagctagtccattcgtatgactgattgatttatgatagctccagagaaccataaatttcaaaggctaaactctctgattttagtaaatagtaggtaaagtgacacaatatatgtttacacaacactgttttcatgaaatgcaaactttgcaaaactcacattaactgggaagcagccaaccctctgtagagaaatcccagattgggagtctggtttgaatctttgaagacagaaaggtgatatccggcctgctgttttaaagggaccacacttttgaatacctactggtgtttggcagaaatctgagactggcaccagacacaaattttagacatgggtatcttccctccagtaattcactgctcagagtaatttagaagacaaaaacagaaaaaattgtaatgattttttaagtgttagaatatgtttgttaacatactctgcaaaataaatttcaactaatgcaatagacttaaaatatagcctatggaatactgtgattgaagtttgaaggcttgctggttcttattttgcatgcaagtttagacagggtaaagaatgtataaatttatttgagatgagatacagtattgtaaaaatataacctcatctagaattgcttttaaaacaagcaaaagcctattttagtacaaatgtagggtgggtagttgttttaaggtagcaaaatacttcaagattttctatctttttaatttttcatgaagacagaagaaatactttcaccccaaccaatgactgtaagatcttgagagtatgttcttactcatttctgtaattgcagtagtgtagtcatctgcatataaatttaataaatgcatgttaaaatttaagttgatgccttttagtcctctcagagtctgtcacagtttctttgtgtaaatgataaaaaagtttgaatttaatcaataaaacttaaaaatcacaatatcaatca

SEQ ID NO: 18917 - protein, 63 aa, Homo sapiens
MLKSHSERTKSHGKFFILQQSPAFFLDVFYIIRETICTYIYHNLFPSLPTVQCTCAASEMAPG

SEQ ID NO: 18918 - DNA, 3932 bp, Homo sapiens
cgaggggattggggagaccctgcccgggaagctcggggtccgggaatgaaagcgggcgcacctctttagcgagccctaaagcgtttgggagacgatcgttccgtccctgggagcggcacttggtggggctgggcggagggaggctctgcaagagaaacccggagtccgggaaacccagtagtttctggaggctgctcacattccttggcttatggcctccttcttccaacgtcaaagccagcaacattgcagcaatctgacttattttgttgtcatgtctcctgaccacatctggaagggttatctacttttgaagacacatccagataattcaggacaatctgtccattttgaggttcttcattgaatcatgtctgcaaagtcccttctgcaatctaagtaagaaaaatcaccaagaatattatttttggtatttggaattgaatttgccaggaatgcaagcactgctacctaactaaagaccttggctttggaaacatcttaccccttggcagctctccagagtttagacttggcagcatcaaagacacaacgcaagcaggcattttggagatcaaagatgggtagaaaagatgctgctactataaaacttcctgttgatcagtacagaaaacaaattggtaaacaggattataaaaaaactaaacctattttacgagcaaccaaattaaaagcagaagcaaagaaaacagcaataggcataaaggaagttggccttgtacttgcagctatattggcactactactggctttctatgctttcttttatctcagactcaccacggatgttgaccctgatctggaccaagatgaagattagctaagcaacaatcaatgcatgaaagagaaataactttacgaaagcaccttttgggaccaaaactttcaatactgaaactgtaacatctttaattctttctgctaatattttcagtttgcagacatatgatttttgatagttgcataggatgtcaggaaaagaaccttacctagcaatgcagtatagtatgtgctactggatacttttatatatctttctgctttgacagccaccctatacatggtacatttagatgaaatgggaaccagatcctaaatttttcaaatgtcattgccaatttatgtgtataattccatcacttcctgatgagtaagtctatttttgttctatatacatcataagttagtatatattcttatttacagaaacatgctcaaatcacattcagaaagaacaaaaagtcatgggaaattttttattttacaacaaagccctgctttctttctggacgtattttacatcattagagagactatctgcacatacatctaccataatctttttccttctttgccaactgttcagtgcacatgtgctgcatcagaaatggcacctggatgacagaagctcaaagagtcacatatgtctctaaaatagagttcttttcctcttgggctgtctgaactggtgtaaatagaagctcagttgatcttggttttaattaacttattactctattaatataaccttggaattctattctaattatgttgttctggctgcttgtagtatcagttcgcccctcttgttagggagatatgtaacaatctgtcatttaattgagcagtctttttcacataacagtaatagcaaaaatcctacctactcagaatcatcttcttaggttgtctcctaaatctgaacaatacagttgttttataaaattacattttgtctcttgagatttaatcaattagaactctttagggagaaaataaataatagaagaaaatatatgcctcatatttcatatgtaattatctgttgatataatttttcaatgtattttgtatttgtgggagcataatgacctgtacattcaatatttttactggtaattcaatttttaaatatgtttttacaatgcttgaacacataaaccttagaaaactggaaaatacgtgtccacagaaagagttattagctactaccttatgtaaagatgcatagaaaatgaaattgttggaaacatgtgcacaaagtgttttatattatatacattgtatttatgaagaataaataaaatattaagattgttttcctgctagccaagagaagaaatccttgggaaatatctaaggagtatatggggctttataagcactgtttctaaaagatattctctggtacttttgcaaaaagtcgactgtgactgtgtagcattatgttctgtagaatttttttcaagtagcataatttatttcattggtgtgaaaacagccaaaggttccaatatcctcacaaatcatttatgccaaacatctgagggcaaaatttagccggtgttatttactagattcttccctttgaactcacagactcaagagacagaccaagagttcttatatactcaccacagcggaccaatccaagtggcatttttaggaaaggttgcagcatttaatgccatgtggtatgtctgttcgtcaagtgggtggcaagggaatatccaagctggcattttggatatgatgggccttttactttcctgagtgacatgccacatgtcaagaaatactgctccccacccccccactcccatcacatttacgtgaacaattttcatttagttatttcccgttccatatggtgttaaaacagtcgtattaaataaagattatttctagttttcagtggtaatttaaatgagaggatatgtaataattgcttattagatacttatccaaatgaaatataacagagtttacagtacttaaaatggctggttatggtcttggaaatgtttgaaaattcattatcctgaaaaaaactttaccattctgttttacccttgaggtattttttggggaaaaatgtttttgataactattaatctaaatatagtataattataggcaaatttcactgcctagttttattgatatcctgagtctacagctagtccattcgtatgactgattgatttatgatagctccagagaaccataaatttcaaaggctaaactctctgattttagtaaatagtaggtaaagtgacacaatatatgtttacacaacactgttttcatgaaatgcaaactttgcaaaactcacattaactgggaagcagccaaccctctgtagagaaatcccagattgggagtctggtttgaatctttgaagacagaaaggtgatatccggcctgctgttttaaagggaccacacttttgaatacctactggtgtttggcagaaatctgagactggcaccagacacaaattttagacatgggtatcttccctccagtaattcactgctcagagtaatttagaagacaaaaacagaaaaaattgtaatgattttttaagtgttagaatatgtttgttaacatactctgcaaaataaatttcaactaatgcaatagacttaaaatatagcctatggaatactgtgattgaagtttgaaggcttgctggttcttattttgcatgcaagtttagacagggtaaagaatgtataaatttatttgagatgagatacagtattgtaaaaatataacctcatctagaattgcttttaaaacaagcaaaagcctattttagtacaaatgtagggtgggtagttgttttaaggtagcaaaatacttcaagattttctatctttttaatttttcatgaagacagaagaaatactttcaccccaaccaatgactgtaagatcttgagagtatgttcttactcatttctgtaattgcagtagtgtagtcatctgcatataaatttaataaatgcatgttaaaatttaagttgatgccttttagtcctctcagagtctgtcacagtttctttgtgtaaatgataaaaaagtttgaatttaatcaataaaacttaaaaatcacaatatcaatca

SEQ ID NO: 18919 - protein, 86 aa, Homo sapiens; identical to SEQ ID NO: 4925

SEQ ID NO: 18920 - DNA, 3762 bp, Homo sapiens
gtttgtcggcccttgccttggcagagctgaggtgtgtgtccggcgagtgcgaggggattggggagaccctgcccgggaagctcggggtccgggaatgaaagcgggcgcacctctttagcgagccctaaagcgtttgggagacgatcgttccgtccctgggagcggcacttggtggggctgggcggagggaggctctgcaagagaaacccggagtccgggaaacccagtagtaagaaaaatcaccaagaatattatttttggtatttggaattgaatttgccaggaatgcaagcactgctacctaactaaagaccttggctttggaaacatcttaccccttggcagctctccagagtttagacttggcagcatcaaagacacaacgcaagcaggcattttggagatcaaagatgggtagaaaagatgctgctactataaaacttcctgttgatcagtacagaaaacaaattggtaaacaggattataaaaaaactaaacctattttacgagcaaccaaattaaaagcagaagcaaagaaaacagcaataggcataaaggaagttggccttgtacttgcagctatattggcactactactggctttctatgctttcttttatctcagactcaccacggatgttgaccctgatctggaccaagatgaagattagctaagcaacaatcaatgcatgaaagagaaataactttacgaaagcaccttttgggaccaaaactttcaatactgaaactgtaacatctttaattctttctgctaatattttcagtttgcagacatatgatttttgatagttgcataggatgtcaggaaaagaaccttacctagcaatgcagtatagtatgtgctactggatacttttatatatctttctgctttgacagccaccctatacatggtacatttagatgaaatgggaaccagatcctaaatttttcaaatgtcattgccaatttatgtgtataattccatcacttcctgatgagtaagtctatttttgttctatatacatcataagttagtatatattcttatttacagaaacatgctcaaatcacattcagaaagaacaaaaagtcatgggaaattttttattttacaacaaagccctgctttctttctggacgtattttacatcattagagagactatctgcacatacatctaccataatctttttccttctttgccaactgttcagtgcacatgtgctgcatcagaaatggcacctggatgacagaagctcaaagagtcacatatgtctctaaaatagagttcttttcctcttgggctgtctgaactggtgtaaatagaagctcagttgatcttggttttaattaacttattactctattaatataaccttggaattctattctaattatgttgttctggctgcttgtagtatcagttcgcccctcttgttagggagatatgtaacaatctgtcatttaattgagcagtctttttcacataacagtaatagcaaaaatcctacctactcagaatcatcttcttaggttgtctcctaaatctgaacaatacagttgttttataaaattacattttgtctcttgagatttaatcaattagaactctttagggagaaaataaataatagaagaaaatatatgcctcatatttcatatgtaattatctgttgatataatttttcaatgtattttgtatttgtgggagcataatgacctgtacattcaatatttttactggtaattcaatttttaaatatgtttttacaatgcttgaacacataaaccttagaaaactggaaaatacgtgtccacagaaagagttattagctactaccttatgtaaagatgcatagaaaatgaaattgttggaaacatgtgcacaaagtgttttatattatatacattgtatttatgaagaataaataaaatattaagattgttttcctgctagccaagagaagaaatccttgggaaatatctaaggagtatatggggctttataagcactgtttctaaaagatattctctggtacttttgcaaaaagtcgactgtgactgtgtagcattatgttctgtagaatttttttcaagtagcataatttatttcattggtgtgaaaacagccaaaggttccaatatcctcacaaatcatttatgccaaacatctgagggcaaaatttagccggtgttatttactagattcttccctttgaactcacagactcaagagacagaccaagagttcttatatactcaccacagcggaccaatccaagtggcatttttaggaaaggttgcagcatttaatgccatgtggtatgtctgttcgtcaagtgggtggcaagggaatatccaagctggcattttggatatgatgggccttttactttcctgagtgacatgccacatgtcaagaaatactgctccccacccccccactcccatcacatttacgtgaacaattttcatttagttatttcccgttccatatggtgttaaaacagtcgtattaaataaagattatttctagttttcagtggtaatttaaatgagaggatatgtaataattgcttattagatacttatccaaatgaaatataacagagtttacagtacttaaaatggctggttatggtcttggaaatgtttgaaaattcattatcctgaaaaaaactttaccattctgttttacccttgaggtattttttggggaaaaatgtttttgataactattaatctaaatatagtataattataggcaaatttcactgcctagttttattgatatcctgagtctacagctagtccattcgtatgactgattgatttatgatagctccagagaaccataaatttcaaaggctaaactctctgattttagtaaatagtaggtaaagtgacacaatatatgtttacacaacactgttttcatgaaatgcaaactttgcaaaactcacattaactgggaagcagccaaccctctgtagagaaatcccagattgggagtctggtttgaatctttgaagacagaaaggtgatatccggcctgctgttttaaagggaccacacttttgaatacctactggtgtttggcagaaatctgagactggcaccagacacaaattttagacatgggtatcttccctccagtaattcactgctcagagtaatttagaagacaaaaacagaaaaaattgtaatgattttttaagtgttagaatatgtttgttaacatactctgcaaaataaatttcaactaatgcaatagacttaaaatatagcctatggaatactgtgattgaagtttgaaggcttgctggttcttattttgcatgcaagtttagacagggtaaagaatgtataaatttatttgagatgagatacagtattgtaaaaatataacctcatctagaattgcttttaaaacaagcaaaagcctattttagtacaaatgtagggtgggtagttgttttaaggtagcaaaatacttcaagattttctatctttttaatttttcatgaagacagaagaaatactttcaccccaaccaatgactgtaagatcttgagagtatgttcttactcatttctgtaattgcagtagtgtagtcatctgcatataaatttaataaatgcatgttaaaatttaagttgatgccttttagtcctctcagagtctgtcacagtttctttgtgtaaatgataaaaaagtttgaatttaatcaataaaacttaaaaatcacaatatcaatca

SEQ ID NO: 18921 - protein, 86 aa, Homo sapiens; identical to SEQ ID NO: 4925

SEQ ID NO: 18922 - DNA, 3700 bp, Homo sapiens
gcccctgagtgacagaaccgtggacagcaacatttcccacaggacacgaagtttgtcggcccttgccttggcagagctgagtaagaaaaatcaccaagaatattatttttggtatttggaattgaatttgccaggaatgcaagcactgctacctaactaaagaccttggctttggaaacatcttaccccttggcagctctccagagtttagacttggcagcatcaaagacacaacgcaagcaatatgaaacagaaaaacaagttggttggatagctgtcctccatgcagtcattcatgatccaggctgtcatcatcttcatcactcatgttcagagttaccctagaggtcatctccatttcatccagataaatgagtatgcaaggaacgtttttataggcattttggagatcaaagatgggtagaaaagatgctgctactataaaacttcctgttgatcagtacagaaaacaaattggtaaacaggattataaaaaaactaaacctattttacgagcaaccaaattaaaagcagaagcaaagaaaacagcaataggcataaagactcaccacggatgttgaccctgatctggaccaagatgaagattagctaagcaacaatcaatgcatgaaagagaaataactttacgaaagcaccttttgggaccaaaactttcaatactgaaactgtaacatctttaattctttctgctaatattttcagtttgcagacatatgatttttgatagttgcataggatgtcaggaaaagaaccttacctagcaatgcagtatagtatgtgctactggatacttttatatatctttctgctttgacagccaccctatacatggtacatttagatgaaatgggaaccagatcctaaatttttcaaatgtcattgccaatttatgtgtataattccatcacttcctgatgagtaagtctatttttgttctatatacatcataagttagtatatattcttatttacagaaacatgctcaaatcacattcagaaagaacaaaaagtcatgggaaattttttattttacaacaaagccctgctttctttctggacgtattttacatcattagagagactatctgcacatacatctaccataatctttttccttctttgccaactgttcagtgcacatgtgctgcatcagaaatggcacctggatgacagaagctcaaagagtcacatatgtctctaaaatagagttcttttcctcttgggctgtctgaactggtgtaaatagaagctcagttgatcttggttttaattaacttattactctattaatataaccttggaattctattctaattatgttgttctggctgcttgtagtatcagttcgcccctcttgttagggagatatgtaacaatctgtcatttaattgagcagtctttttcacataacagtaatagcaaaaatcctacctactcagaatcatcttcttaggttgtctcctaaatctgaacaatacagttgttttataaaattacattttgtctcttgagatttaatcaattagaactctttagggagaaaataaataatagaagaaaatatatgcctcatatttcatatgtaattatctgttgatataatttttcaatgtattttgtatttgtgggagcataatgacctgtacattcaatatttttactggtaattcaatttttaaatatgtttttacaatgcttgaacacataaaccttagaaaactggaaaatacgtgtccacagaaagagttattagctactaccttatgtaaagatgcatagaaaatgaaattgttggaaacatgtgcacaaagtgttttatattatatacattgtatttatgaagaataaataaaatattaagattgttttcctgctagccaagagaagaaatccttgggaaatatctaaggagtatatggggctttataagcactgtttctaaaagatattctctggtacttttgcaaaaagtcgactgtgactgtgtagcattatgttctgtagaatttttttcaagtagcataatttatttcattggtgtgaaaacagccaaaggttccaatatcctcacaaatcatttatgccaaacatctgagggcaaaatttagccggtgttatttactagattcttccctttgaactcacagactcaagagacagaccaagagttcttatatactcaccacagcggaccaatccaagtggcatttttaggaaaggttgcagcatttaatgccatgtggtatgtctgttcgtcaagtgggtggcaagggaatatccaagctggcattttggatatgatgggccttttactttcctgagtgacatgccacatgtcaagaaatactgctccccacccccccactcccatcacatttacgtgaacaattttcatttagttatttcccgttccatatggtgttaaaacagtcgtattaaataaagattatttctagttttcagtggtaatttaaatgagaggatatgtaataattgcttattagatacttatccaaatgaaatataacagagtttacagtacttaaaatggctggttatggtcttggaaatgtttgaaaattcattatcctgaaaaaaactttaccattctgttttacccttgaggtattttttggggaaaaatgtttttgataactattaatctaaatatagtataattataggcaaatttcactgcctagttttattgatatcctgagtctacagctagtccattcgtatgactgattgatttatgatagctccagagaaccataaatttcaaaggctaaactctctgattttagtaaatagtaggtaaagtgacacaatatatgtttacacaacactgttttcatgaaatgcaaactttgcaaaactcacattaactgggaagcagccaaccctctgtagagaaatcccagattgggagtctggtttgaatctttgaagacagaaaggtgatatccggcctgctgttttaaagggaccacacttttgaatacctactggtgtttggcagaaatctgagactggcaccagacacaaattttagacatgggtatcttccctccagtaattcactgctcagagtaatttagaagacaaaaacagaaaaaattgtaatgattttttaagtgttagaatatgtttgttaacatactctgcaaaataaatttcaactaatgcaatagacttaaaatatagcctatggaatactgtgattgaagtttgaaggcttgctggttcttattttgcatgcaagtttagacagggtaaagaatgtataaatttatttgagatgagatacagtattgtaaaaatataacctcatctagaattgcttttaaaacaagcaaaagcctattttagtacaaatgtagggtgggtagttgttttaaggtagcaaaatacttcaagattttctatctttttaatttttcatgaagacagaagaaatactttcaccccaaccaatgactgtaagatcttgagagtatgttcttactcatttctgtaattgcagtagtgtagtcatctgcatataaatttaataaatgcatgttaaaatttaagttgatgccttttagtcctctcagagtctgtcacagtttctttgtgtaaatgataaaaaagtttgaatttaatcaataaaacttaaaaatcacaatatcaatca

SEQ ID NO: 18923 - protein, 54 aa, Homo sapiens; identical to SEQ ID NO: 4927

SEQ ID NO: 18924 - DNA, 3779 bp, Homo sapiens
gtcccgcccctgcccctgagtgacagaaccgtggacagcaacatttcccacaggacacgaagtttgtcggcccttgccttggcagagctgagtaagaaaaatcaccaagaatattatttttggtatttggaattgaatttgccaggaatgcaagcactgctacctaactaaagaccttggctttggaaacatcttaccccttggcagctctccagagtttagacttggcagcatcaaagacacaacgcaagcaatatgaaacagaaaaacaagttggttggatagctgtcctccatgcagtcattcatgatccaggctgtcatcatcttcatcactcatgttcagagttaccctagaggtcatctccatttcatccagataaatgagtatgcaaggaacgtttttataggcattttggagatcaaagatgggtagaaaagatgctgctactataaaacttcctgttgatcagtacagaaaacaaattggtaaacaggattataaaaaaactaaacctattttacgagcaaccaaattaaaagcagaagcaaagaaaacagcaataggcataaaggaagttggccttgtacttgcagctatattggcactactactggctttctatgctttcttttatctcagactcaccacggatgttgaccctgatctggaccaagatgaagattagctaagcaacaatcaatgcatgaaagagaaataactttacgaaagcaccttttgggaccaaaactttcaatactgaaactgtaacatctttaattctttctgctaatattttcagtttgcagacatatgatttttgatagttgcataggatgtcaggaaaagaaccttacctagcaatgcagtatagtatgtgctactggatacttttatatatctttctgctttgacagccaccctatacatggtacatttagatgaaatgggaaccagatcctaaatttttcaaatgtcattgccaatttatgtgtataattccatcacttcctgatgagtaagtctatttttgttctatatacatcataagttagtatatattcttatttacagaaacatgctcaaatcacattcagaaagaacaaaaagtcatgggaaattttttattttacaacaaagccctgctttctttctggacgtattttacatcattagagagactatctgcacatacatctaccataatctttttccttctttgccaactgttcagtgcacatgtgctgcatcagaaatggcacctggatgacagaagctcaaagagtcacatatgtctctaaaatagagttcttttcctcttgggctgtctgaactggtgtaaatagaagctcagttgatcttggttttaattaacttattactctattaatataaccttggaattctattctaattatgttgttctggctgcttgtagtatcagttcgcccctcttgttagggagatatgtaacaatctgtcatttaattgagcagtctttttcacataacagtaatagcaaaaatcctacctactcagaatcatcttcttaggttgtctcctaaatctgaacaatacagttgttttataaaattacattttgtctcttgagatttaatcaattagaactctttagggagaaaataaataatagaagaaaatatatgcctcatatttcatatgtaattatctgttgatataatttttcaatgtattttgtatttgtgggagcataatgacctgtacattcaatatttttactggtaattcaatttttaaatatgtttttacaatgcttgaacacataaaccttagaaaactggaaaatacgtgtccacagaaagagttattagctactaccttatgtaaagatgcatagaaaatgaaattgttggaaacatgtgcacaaagtgttttatattatatacattgtatttatgaagaataaataaaatattaagattgttttcctgctagccaagagaagaaatccttgggaaatatctaaggagtatatggggctttataagcactgtttctaaaagatattctctggtacttttgcaaaaagtcgactgtgactgtgtagcattatgttctgtagaatttttttcaagtagcataatttatttcattggtgtgaaaacagccaaaggttccaatatcctcacaaatcatttatgccaaacatctgagggcaaaatttagccggtgttatttactagattcttccctttgaactcacagactcaagagacagaccaagagttcttatatactcaccacagcggaccaatccaagtggcatttttaggaaaggttgcagcatttaatgccatgtggtatgtctgttcgtcaagtgggtggcaagggaatatccaagctggcattttggatatgatgggccttttactttcctgagtgacatgccacatgtcaagaaatactgctccccacccccccactcccatcacatttacgtgaacaattttcatttagttatttcccgttccatatggtgttaaaacagtcgtattaaataaagattatttctagttttcagtggtaatttaaatgagaggatatgtaataattgcttattagatacttatccaaatgaaatataacagagtttacagtacttaaaatggctggttatggtcttggaaatgtttgaaaattcattatcctgaaaaaaactttaccattctgttttacccttgaggtattttttggggaaaaatgtttttgataactattaatctaaatatagtataattataggcaaatttcactgcctagttttattgatatcctgagtctacagctagtccattcgtatgactgattgatttatgatagctccagagaaccataaatttcaaaggctaaactctctgattttagtaaatagtaggtaaagtgacacaatatatgtttacacaacactgttttcatgaaatgcaaactttgcaaaactcacattaactgggaagcagccaaccctctgtagagaaatcccagattgggagtctggtttgaatctttgaagacagaaaggtgatatccggcctgctgttttaaagggaccacacttttgaatacctactggtgtttggcagaaatctgagactggcaccagacacaaattttagacatgggtatcttccctccagtaattcactgctcagagtaatttagaagacaaaaacagaaaaaattgtaatgattttttaagtgttagaatatgtttgttaacatactctgcaaaataaatttcaactaatgcaatagacttaaaatatagcctatggaatactgtgattgaagtttgaaggcttgctggttcttattttgcatgcaagtttagacagggtaaagaatgtataaatttatttgagatgagatacagtattgtaaaaatataacctcatctagaattgcttttaaaacaagcaaaagcctattttagtacaaatgtagggtgggtagttgttttaaggtagcaaaatacttcaagattttctatctttttaatttttcatgaagacagaagaaatactttcaccccaaccaatgactgtaagatcttgagagtatgttcttactcatttctgtaattgcagtagtgtagtcatctgcatataaatttaataaatgcatgttaaaatttaagttgatgccttttagtcctctcagagtctgtcacagtttctttgtgtaaatgataaaaaagtttgaatttaatcaataaaacttaaaaatcacaatatcaatca

SEQ ID NO: 18925 - protein, 86 aa, Homo sapiens; identical to SEQ ID NO: 4925

SEQ ID NO: 18926 - DNA, 3567 bp, Homo sapiens
gcggctggcttgtcccgcccctgcccctgagtgacagaaccgtggacagcaacatttcccacaggacacgaagtttgtcggcccttgccttggcagagctgagtaagaaaaatcaccaagaatattatttttggtatttggaattgaatttgccaggaatgcaagcactgctacctaactaaagaccttggctttggaaacatcttaccccttggcagctctccagagtttagacttggcagcatcaaagacacaacgcaagcaggcattttggagatcaaagatgggtagaaaagatgctgctactataaaacttcctgttgatcagtacagaaaacaaattggtaaacaggattataaaaaaactaaacctattttacgagcaaccaaattaaaagcagaagcaaagaaaacagcaataggcataaagactcaccacggatgttgaccctgatctggaccaagatgaagattagctaagcaacaatcaatgcatgaaagagaaataactttacgaaagcaccttttgggaccaaaactttcaatactgaaactgtaacatctttaattctttctgctaatattttcagtttgcagacatatgatttttgatagttgcataggatgtcaggaaaagaaccttacctagcaatgcagtatagtatgtgctactggatacttttatatatctttctgctttgacagccaccctatacatggtacatttagatgaaatgggaaccagatcctaaatttttcaaatgtcattgccaatttatgtgtataattccatcacttcctgatgagtaagtctatttttgttctatatacatcataagttagtatatattcttatttacagaaacatgctcaaatcacattcagaaagaacaaaaagtcatgggaaattttttattttacaacaaagccctgctttctttctggacgtattttacatcattagagagactatctgcacatacatctaccataatctttttccttctttgccaactgttcagtgcacatgtgctgcatcagaaatggcacctggatgacagaagctcaaagagtcacatatgtctctaaaatagagttcttttcctcttgggctgtctgaactggtgtaaatagaagctcagttgatcttggttttaattaacttattactctattaatataaccttggaattctattctaattatgttgttctggctgcttgtagtatcagttcgcccctcttgttagggagatatgtaacaatctgtcatttaattgagcagtctttttcacataacagtaatagcaaaaatcctacctactcagaatcatcttcttaggttgtctcctaaatctgaacaatacagttgttttataaaattacattttgtctcttgagatttaatcaattagaactctttagggagaaaataaataatagaagaaaatatatgcctcatatttcatatgtaattatctgttgatataatttttcaatgtattttgtatttgtgggagcataatgacctgtacattcaatatttttactggtaattcaatttttaaatatgtttttacaatgcttgaacacataaaccttagaaaactggaaaatacgtgtccacagaaagagttattagctactaccttatgtaaagatgcatagaaaatgaaattgttggaaacatgtgcacaaagtgttttatattatatacattgtatttatgaagaataaataaaatattaagattgttttcctgctagccaagagaagaaatccttgggaaatatctaaggagtatatggggctttataagcactgtttctaaaagatattctctggtacttttgcaaaaagtcgactgtgactgtgtagcattatgttctgtagaatttttttcaagtagcataatttatttcattggtgtgaaaacagccaaaggttccaatatcctcacaaatcatttatgccaaacatctgagggcaaaatttagccggtgttatttactagattcttccctttgaactcacagactcaagagacagaccaagagttcttatatactcaccacagcggaccaatccaagtggcatttttaggaaaggttgcagcatttaatgccatgtggtatgtctgttcgtcaagtgggtggcaagggaatatccaagctggcattttggatatgatgggccttttactttcctgagtgacatgccacatgtcaagaaatactgctccccacccccccactcccatcacatttacgtgaacaattttcatttagttatttcccgttccatatggtgttaaaacagtcgtattaaataaagattatttctagttttcagtggtaatttaaatgagaggatatgtaataattgcttattagatacttatccaaatgaaatataacagagtttacagtacttaaaatggctggttatggtcttggaaatgtttgaaaattcattatcctgaaaaaaactttaccattctgttttacccttgaggtattttttggggaaaaatgtttttgataactattaatctaaatatagtataattataggcaaatttcactgcctagttttattgatatcctgagtctacagctagtccattcgtatgactgattgatttatgatagctccagagaaccataaatttcaaaggctaaactctctgattttagtaaatagtaggtaaagtgacacaatatatgtttacacaacactgttttcatgaaatgcaaactttgcaaaactcacattaactgggaagcagccaaccctctgtagagaaatcccagattgggagtctggtttgaatctttgaagacagaaaggtgatatccggcctgctgttttaaagggaccacacttttgaatacctactggtgtttggcagaaatctgagactggcaccagacacaaattttagacatgggtatcttccctccagtaattcactgctcagagtaatttagaagacaaaaacagaaaaaattgtaatgattttttaagtgttagaatatgtttgttaacatactctgcaaaataaatttcaactaatgcaatagacttaaaatatagcctatggaatactgtgattgaagtttgaaggcttgctggttcttattttgcatgcaagtttagacagggtaaagaatgtataaatttatttgagatgagatacagtattgtaaaaatataacctcatctagaattgcttttaaaacaagcaaaagcctattttagtacaaatgtagggtgggtagttgttttaaggtagcaaaatacttcaagattttctatctttttaatttttcatgaagacagaagaaatactttcaccccaaccaatgactgtaagatcttgagagtatgttcttactcatttctgtaattgcagtagtgtagtcatctgcatataaatttaataaatgcatgttaaaatttaagttgatgccttttagtcctctcagagtctgtcacagtttctttgtgtaaatgataaaaaagtttgaatttaatcaataaaacttaaaaatcacaatatcaatca

SEQ ID NO: 18927 - protein, 54 aa, Homo sapiens; identical to SEQ ID NO: 4927

SEQ ID NO: 18928 - DNA, 3633 bp, Homo sapiens
gtgcggctggcttgtcccgcccctgcccctgagtgacagaaccgtggacagcaacatttcccacaggacacgaagtttgtcggcccttgccttggcagagctgagcaatatgaaacagaaaaacaagttggttggatagctgtcctccatgcagtcattcatgatccaggctgtcatcatcttcatcactcatgttcagagttaccctagaggtcatctccatttcatccagataaatgagtatgcaaggaacgtttttataggcattttggagatcaaagatgggtagaaaagatgctgctactataaaacttcctgttgatcagtacagaaaacaaattggtaaacaggattataaaaaaactaaacctattttacgagcaaccaaattaaaagcagaagcaaagaaaacagcaataggcataaaggaagttggccttgtacttgcagctatattggcactactactggctttctatgctttcttttatctcagactcaccacggatgttgaccctgatctggaccaagatgaagattagctaagcaacaatcaatgcatgaaagagaaataactttacgaaagcaccttttgggaccaaaactttcaatactgaaactgtaacatctttaattctttctgctaatattttcagtttgcagacatatgatttttgatagttgcataggatgtcaggaaaagaaccttacctagcaatgcagtatagtatgtgctactggatacttttatatatctttctgctttgacagccaccctatacatggtacatttagatgaaatgggaaccagatcctaaatttttcaaatgtcattgccaatttatgtgtataattccatcacttcctgatgagtaagtctatttttgttctatatacatcataagttagtatatattcttatttacagaaacatgctcaaatcacattcagaaagaacaaaaagtcatgggaaattttttattttacaacaaagccctgctttctttctggacgtattttacatcattagagagactatctgcacatacatctaccataatctttttccttctttgccaactgttcagtgcacatgtgctgcatcagaaatggcacctggatgacagaagctcaaagagtcacatatgtctctaaaatagagttcttttcctcttgggctgtctgaactggtgtaaatagaagctcagttgatcttggttttaattaacttattactctattaatataaccttggaattctattctaattatgttgttctggctgcttgtagtatcagttcgcccctcttgttagggagatatgtaacaatctgtcatttaattgagcagtctttttcacataacagtaatagcaaaaatcctacctactcagaatcatcttcttaggttgtctcctaaatctgaacaatacagttgttttataaaattacattttgtctcttgagatttaatcaattagaactctttagggagaaaataaataatagaagaaaatatatgcctcatatttcatatgtaattatctgttgatataatttttcaatgtattttgtatttgtgggagcataatgacctgtacattcaatatttttactggtaattcaatttttaaatatgtttttacaatgcttgaacacataaaccttagaaaactggaaaatacgtgtccacagaaagagttattagctactaccttatgtaaagatgcatagaaaatgaaattgttggaaacatgtgcacaaagtgttttatattatatacattgtatttatgaagaataaataaaatattaagattgttttcctgctagccaagagaagaaatccttgggaaatatctaaggagtatatggggctttataagcactgtttctaaaagatattctctggtacttttgcaaaaagtcgactgtgactgtgtagcattatgttctgtagaatttttttcaagtagcataatttatttcattggtgtgaaaacagccaaaggttccaatatcctcacaaatcatttatgccaaacatctgagggcaaaatttagccggtgttatttactagattcttccctttgaactcacagactcaagagacagaccaagagttcttatatactcaccacagcggaccaatccaagtggcatttttaggaaaggttgcagcatttaatgccatgtggtatgtctgttcgtcaagtgggtggcaagggaatatccaagctggcattttggatatgatgggccttttactttcctgagtgacatgccacatgtcaagaaatactgctccccacccccccactcccatcacatttacgtgaacaattttcatttagttatttcccgttccatatggtgttaaaacagtcgtattaaataaagattatttctagttttcagtggtaatttaaatgagaggatatgtaataattgcttattagatacttatccaaatgaaatataacagagtttacagtacttaaaatggctggttatggtcttggaaatgtttgaaaattcattatcctgaaaaaaactttaccattctgttttacccttgaggtattttttggggaaaaatgtttttgataactattaatctaaatatagtataattataggcaaatttcactgcctagttttattgatatcctgagtctacagctagtccattcgtatgactgattgatttatgatagctccagagaaccataaatttcaaaggctaaactctctgattttagtaaatagtaggtaaagtgacacaatatatgtttacacaacactgttttcatgaaatgcaaactttgcaaaactcacattaactgggaagcagccaaccctctgtagagaaatcccagattgggagtctggtttgaatctttgaagacagaaaggtgatatccggcctgctgttttaaagggaccacacttttgaatacctactggtgtttggcagaaatctgagactggcaccagacacaaattttagacatgggtatcttccctccagtaattcactgctcagagtaatttagaagacaaaaacagaaaaaattgtaatgattttttaagtgttagaatatgtttgttaacatactctgcaaaataaatttcaactaatgcaatagacttaaaatatagcctatggaatactgtgattgaagtttgaaggcttgctggttcttattttgcatgcaagtttagacagggtaaagaatgtataaatttatttgagatgagatacagtattgtaaaaatataacctcatctagaattgcttttaaaacaagcaaaagcctattttagtacaaatgtagggtgggtagttgttttaaggtagcaaaatacttcaagattttctatctttttaatttttcatgaagacagaagaaatactttcaccccaaccaatgactgtaagatcttgagagtatgttcttactcatttctgtaattgcagtagtgtagtcatctgcatataaatttaataaatgcatgttaaaatttaagttgatgccttttagtcctctcagagtctgtcacagtttctttgtgtaaatgataaaaaagtttgaatttaatcaataaaacttaaaaatcacaatatcaatca

SEQ ID NO: 18929 - protein, 86 aa, Homo sapiens; identical to SEQ ID NO: 4925

SEQ ID NO: 18930 - DNA, 3414 bp, Homo sapiens
taggggtgtgcggctggcttgtcccgcccctgcccctgagtgacagaaccgtggacagcaacatttcccacaggacacgaagtttgtcggcccttgccttggcagagctgaggcattttggagatcaaagatgggtagaaaagatgctgctactataaaacttcctgttgatcagtacagaaaacaaattggtaaacaggattataaaaaaactaaacctattttacgagcaaccaaattaaaagcagaagcaaagaaaacagcaataggcataaagactcaccacggatgttgaccctgatctggaccaagatgaagattagctaagcaacaatcaatgcatgaaagagaaataactttacgaaagcaccttttgggaccaaaactttcaatactgaaactgtaacatctttaattctttctgctaatattttcagtttgcagacatatgatttttgatagttgcataggatgtcaggaaaagaaccttacctagcaatgcagtatagtatgtgctactggatacttttatatatctttctgctttgacagccaccctatacatggtacatttagatgaaatgggaaccagatcctaaatttttcaaatgtcattgccaatttatgtgtataattccatcacttcctgatgagtaagtctatttttgttctatatacatcataagttagtatatattcttatttacagaaacatgctcaaatcacattcagaaagaacaaaaagtcatgggaaattttttattttacaacaaagccctgctttctttctggacgtattttacatcattagagagactatctgcacatacatctaccataatctttttccttctttgccaactgttcagtgcacatgtgctgcatcagaaatggcacctggatgacagaagctcaaagagtcacatatgtctctaaaatagagttcttttcctcttgggctgtctgaactggtgtaaatagaagctcagttgatcttggttttaattaacttattactctattaatataaccttggaattctattctaattatgttgttctggctgcttgtagtatcagttcgcccctcttgttagggagatatgtaacaatctgtcatttaattgagcagtctttttcacataacagtaatagcaaaaatcctacctactcagaatcatcttcttaggttgtctcctaaatctgaacaatacagttgttttataaaattacattttgtctcttgagatttaatcaattagaactctttagggagaaaataaataatagaagaaaatatatgcctcatatttcatatgtaattatctgttgatataatttttcaatgtattttgtatttgtgggagcataatgacctgtacattcaatatttttactggtaattcaatttttaaatatgtttttacaatgcttgaacacataaaccttagaaaactggaaaatacgtgtccacagaaagagttattagctactaccttatgtaaagatgcatagaaaatgaaattgttggaaacatgtgcacaaagtgttttatattatatacattgtatttatgaagaataaataaaatattaagattgttttcctgctagccaagagaagaaatccttgggaaatatctaaggagtatatggggctttataagcactgtttctaaaagatattctctggtacttttgcaaaaagtcgactgtgactgtgtagcattatgttctgtagaatttttttcaagtagcataatttatttcattggtgtgaaaacagccaaaggttccaatatcctcacaaatcatttatgccaaacatctgagggcaaaatttagccggtgttatttactagattcttccctttgaactcacagactcaagagacagaccaagagttcttatatactcaccacagcggaccaatccaagtggcatttttaggaaaggttgcagcatttaatgccatgtggtatgtctgttcgtcaagtgggtggcaagggaatatccaagctggcattttggatatgatgggccttttactttcctgagtgacatgccacatgtcaagaaatactgctccccacccccccactcccatcacatttacgtgaacaattttcatttagttatttcccgttccatatggtgttaaaacagtcgtattaaataaagattatttctagttttcagtggtaatttaaatgagaggatatgtaataattgcttattagatacttatccaaatgaaatataacagagtttacagtacttaaaatggctggttatggtcttggaaatgtttgaaaattcattatcctgaaaaaaactttaccattctgttttacccttgaggtattttttggggaaaaatgtttttgataactattaatctaaatatagtataattataggcaaatttcactgcctagttttattgatatcctgagtctacagctagtccattcgtatgactgattgatttatgatagctccagagaaccataaatttcaaaggctaaactctctgattttagtaaatagtaggtaaagtgacacaatatatgtttacacaacactgttttcatgaaatgcaaactttgcaaaactcacattaactgggaagcagccaaccctctgtagagaaatcccagattgggagtctggtttgaatctttgaagacagaaaggtgatatccggcctgctgttttaaagggaccacacttttgaatacctactggtgtttggcagaaatctgagactggcaccagacacaaattttagacatgggtatcttccctccagtaattcactgctcagagtaatttagaagacaaaaacagaaaaaattgtaatgattttttaagtgttagaatatgtttgttaacatactctgcaaaataaatttcaactaatgcaatagacttaaaatatagcctatggaatactgtgattgaagtttgaaggcttgctggttcttattttgcatgcaagtttagacagggtaaagaatgtataaatttatttgagatgagatacagtattgtaaaaatataacctcatctagaattgcttttaaaacaagcaaaagcctattttagtacaaatgtagggtgggtagttgttttaaggtagcaaaatacttcaagattttctatctttttaatttttcatgaagacagaagaaatactttcaccccaaccaatgactgtaagatcttgagagtatgttcttactcatttctgtaattgcagtagtgtagtcatctgcatataaatttaataaatgcatgttaaaatttaagttgatgccttttagtcctctcagagtctgtcacagtttctttgtgtaaatgataaaaaagtttgaatttaatcaataaaacttaaaaatcacaatatcaatca

SEQ ID NO: 18931 - protein, 54 aa, Homo sapiens; identical to SEQ ID NO: 4927

SEQ ID NO: 18932 - DNA, 3573 bp, Homo sapiens
ccctttgggagtaggggtgtgcggctggcttgtcccgcccctgcccctgagtgacagaaccgtggacagcaacatttcccacaggacacgaagtttgtcggcccttgccttggcagagctgagtaagaaaaatcaccaagaatattatttttggtatttggaattgaatttgccaggaatgcaagcactgctacctaactaaagaccttggctttggaaacatcttaccccttggcagctctccagagtttagacttggcagcatcaaagacacaacgcaaggtaaacaggattataaaaaaactaaacctattttacgagcaaccaaattaaaagcagaagcaaagaaaacagcaataggcataaaggaagttggccttgtacttgcagctatattggcactactactggctttctatgctttcttttatctcagactcaccacggatgttgaccctgatctggaccaagatgaagattagctaagcaacaatcaatgcatgaaagagaaataactttacgaaagcaccttttgggaccaaaactttcaatactgaaactgtaacatctttaattctttctgctaatattttcagtttgcagacatatgatttttgatagttgcataggatgtcaggaaaagaaccttacctagcaatgcagtatagtatgtgctactggatacttttatatatctttctgctttgacagccaccctatacatggtacatttagatgaaatgggaaccagatcctaaatttttcaaatgtcattgccaatttatgtgtataattccatcacttcctgatgagtaagtctatttttgttctatatacatcataagttagtatatattcttatttacagaaacatgctcaaatcacattcagaaagaacaaaaagtcatgggaaattttttattttacaacaaagccctgctttctttctggacgtattttacatcattagagagactatctgcacatacatctaccataatctttttccttctttgccaactgttcagtgcacatgtgctgcatcagaaatggcacctggatgacagaagctcaaagagtcacatatgtctctaaaatagagttcttttcctcttgggctgtctgaactggtgtaaatagaagctcagttgatcttggttttaattaacttattactctattaatataaccttggaattctattctaattatgttgttctggctgcttgtagtatcagttcgcccctcttgttagggagatatgtaacaatctgtcatttaattgagcagtctttttcacataacagtaatagcaaaaatcctacctactcagaatcatcttcttaggttgtctcctaaatctgaacaatacagttgttttataaaattacattttgtctcttgagatttaatcaattagaactctttagggagaaaataaataatagaagaaaatatatgcctcatatttcatatgtaattatctgttgatataatttttcaatgtattttgtatttgtgggagcataatgacctgtacattcaatatttttactggtaattcaatttttaaatatgtttttacaatgcttgaacacataaaccttagaaaactggaaaatacgtgtccacagaaagagttattagctactaccttatgtaaagatgcatagaaaatgaaattgttggaaacatgtgcacaaagtgttttatattatatacattgtatttatgaagaataaataaaatattaagattgttttcctgctagccaagagaagaaatccttgggaaatatctaaggagtatatggggctttataagcactgtttctaaaagatattctctggtacttttgcaaaaagtcgactgtgactgtgtagcattatgttctgtagaatttttttcaagtagcataatttatttcattggtgtgaaaacagccaaaggttccaatatcctcacaaatcatttatgccaaacatctgagggcaaaatttagccggtgttatttactagattcttccctttgaactcacagactcaagagacagaccaagagttcttatatactcaccacagcggaccaatccaagtggcatttttaggaaaggttgcagcatttaatgccatgtggtatgtctgttcgtcaagtgggtggcaagggaatatccaagctggcattttggatatgatgggccttttactttcctgagtgacatgccacatgtcaagaaatactgctccccacccccccactcccatcacatttacgtgaacaattttcatttagttatttcccgttccatatggtgttaaaacagtcgtattaaataaagattatttctagttttcagtggtaatttaaatgagaggatatgtaataattgcttattagatacttatccaaatgaaatataacagagtttacagtacttaaaatggctggttatggtcttggaaatgtttgaaaattcattatcctgaaaaaaactttaccattctgttttacccttgaggtattttttggggaaaaatgtttttgataactattaatctaaatatagtataattataggcaaatttcactgcctagttttattgatatcctgagtctacagctagtccattcgtatgactgattgatttatgatagctccagagaaccataaatttcaaaggctaaactctctgattttagtaaatagtaggtaaagtgacacaatatatgtttacacaacactgttttcatgaaatgcaaactttgcaaaactcacattaactgggaagcagccaaccctctgtagagaaatcccagattgggagtctggtttgaatctttgaagacagaaaggtgatatccggcctgctgttttaaagggaccacacttttgaatacctactggtgtttggcagaaatctgagactggcaccagacacaaattttagacatgggtatcttccctccagtaattcactgctcagagtaatttagaagacaaaaacagaaaaaattgtaatgattttttaagtgttagaatatgtttgttaacatactctgcaaaataaatttcaactaatgcaatagacttaaaatatagcctatggaatactgtgattgaagtttgaaggcttgctggttcttattttgcatgcaagtttagacagggtaaagaatgtataaatttatttgagatgagatacagtattgtaaaaatataacctcatctagaattgcttttaaaacaagcaaaagcctattttagtacaaatgtagggtgggtagttgttttaaggtagcaaaatacttcaagattttctatctttttaatttttcatgaagacagaagaaatactttcaccccaaccaatgactgtaagatcttgagagtatgttcttactcatttctgtaattgcagtagtgtagtcatctgcatataaatttaataaatgcatgttaaaatttaagttgatgccttttagtcctctcagagtctgtcacagtttctttgtgtaaatgataaaaaagtttgaatttaatcaataaaacttaaaaatcacaatatcaatca

SEQ ID NO: 18933 - protein, 63 aa, Homo sapiens; identical to SEQ ID NO: 18917

SEQ ID NO: 18934 - DNA, 3670 bp, Homo sapiens
ctcttttccgcctcaccctttgggagtaggggtgtgcggctggcttgtcccgcccctgcccctgagtgacagaaccgtggacagcaacatttcccacaggacacgaagtttgtcggcccttgccttggcagagctgagtaagaaaaatcaccaagaatattatttttggtatttggaattgaatttgccaggaatgcaagcactgctacctaactaaagaccttggctttggaaacatcttaccccttggcagctctccagagtttagacttggcagcatcaaagacacaacgcaagcaggcattttggagatcaaagatgggtagaaaagatgctgctactataaaacttcctgttgatcagtacagaaaacaaattggtaaacaggattataaaaaaactaaacctattttacgagcaaccaaattaaaagcagaagcaaagaaaacagcaataggcataaaggaagttggccttgtacttgcagctatattggcactactactggctttctatgctttcttttatctcagactcaccacggatgttgaccctgatctggaccaagatgaagattagctaagcaacaatcaatgcatgaaagagaaataactttacgaaagcaccttttgggaccaaaactttcaatactgaaactgtaacatctttaattctttctgctaatattttcagtttgcagacatatgatttttgatagttgcataggatgtcaggaaaagaaccttacctagcaatgcagtatagtatgtgctactggatacttttatatatctttctgctttgacagccaccctatacatggtacatttagatgaaatgggaaccagatcctaaatttttcaaatgtcattgccaatttatgtgtataattccatcacttcctgatgagtaagtctatttttgttctatatacatcataagttagtatatattcttatttacagaaacatgctcaaatcacattcagaaagaacaaaaagtcatgggaaattttttattttacaacaaagccctgctttctttctggacgtattttacatcattagagagactatctgcacatacatctaccataatctttttccttctttgccaactgttcagtgcacatgtgctgcatcagaaatggcacctggatgacagaagctcaaagagtcacatatgtctctaaaatagagttcttttcctcttgggctgtctgaactggtgtaaatagaagctcagttgatcttggttttaattaacttattactctattaatataaccttggaattctattctaattatgttgttctggctgcttgtagtatcagttcgcccctcttgttagggagatatgtaacaatctgtcatttaattgagcagtctttttcacataacagtaatagcaaaaatcctacctactcagaatcatcttcttaggttgtctcctaaatctgaacaatacagttgttttataaaattacattttgtctcttgagatttaatcaattagaactctttagggagaaaataaataatagaagaaaatatatgcctcatatttcatatgtaattatctgttgatataatttttcaatgtattttgtatttgtgggagcataatgacctgtacattcaatatttttactggtaattcaatttttaaatatgtttttacaatgcttgaacacataaaccttagaaaactggaaaatacgtgtccacagaaagagttattagctactaccttatgtaaagatgcatagaaaatgaaattgttggaaacatgtgcacaaagtgttttatattatatacattgtatttatgaagaataaataaaatattaagattgttttcctgctagccaagagaagaaatccttgggaaatatctaaggagtatatggggctttataagcactgtttctaaaagatattctctggtacttttgcaaaaagtcgactgtgactgtgtagcattatgttctgtagaatttttttcaagtagcataatttatttcattggtgtgaaaacagccaaaggttccaatatcctcacaaatcatttatgccaaacatctgagggcaaaatttagccggtgttatttactagattcttccctttgaactcacagactcaagagacagaccaagagttcttatatactcaccacagcggaccaatccaagtggcatttttaggaaaggttgcagcatttaatgccatgtggtatgtctgttcgtcaagtgggtggcaagggaatatccaagctggcattttggatatgatgggccttttactttcctgagtgacatgccacatgtcaagaaatactgctccccacccccccactcccatcacatttacgtgaacaattttcatttagttatttcccgttccatatggtgttaaaacagtcgtattaaataaagattatttctagttttcagtggtaatttaaatgagaggatatgtaataattgcttattagatacttatccaaatgaaatataacagagtttacagtacttaaaatggctggttatggtcttggaaatgtttgaaaattcattatcctgaaaaaaactttaccattctgttttacccttgaggtattttttggggaaaaatgtttttgataactattaatctaaatatagtataattataggcaaatttcactgcctagttttattgatatcctgagtctacagctagtccattcgtatgactgattgatttatgatagctccagagaaccataaatttcaaaggctaaactctctgattttagtaaatagtaggtaaagtgacacaatatatgtttacacaacactgttttcatgaaatgcaaactttgcaaaactcacattaactgggaagcagccaaccctctgtagagaaatcccagattgggagtctggtttgaatctttgaagacagaaaggtgatatccggcctgctgttttaaagggaccacacttttgaatacctactggtgtttggcagaaatctgagactggcaccagacacaaattttagacatgggtatcttccctccagtaattcactgctcagagtaatttagaagacaaaaacagaaaaaattgtaatgattttttaagtgttagaatatgtttgttaacatactctgcaaaataaatttcaactaatgcaatagacttaaaatatagcctatggaatactgtgattgaagtttgaaggcttgctggttcttattttgcatgcaagtttagacagggtaaagaatgtataaatttatttgagatgagatacagtattgtaaaaatataacctcatctagaattgcttttaaaacaagcaaaagcctattttagtacaaatgtagggtgggtagttgttttaaggtagcaaaatacttcaagattttctatctttttaatttttcatgaagacagaagaaatactttcaccccaaccaatgactgtaagatcttgagagtatgttcttactcatttctgtaattgcagtagtgtagtcatctgcatataaatttaataaatgcatgttaaaatttaagttgatgccttttagtcctctcagagtctgtcacagtttctttgtgtaaatgataaaaaagtttgaatttaatcaataaaacttaaaaatcacaatatcaatca

SEQ ID NO: 18935 - protein, 86 aa, Homo sapiens; identical to SEQ ID NO: 4925

SEQ ID NO: 18936 - DNA, 3571 bp, Homo sapiens
agtttctggaggctgctcacattccttggcttatggcctccttcttccaacgtcaaagccagcaacattgcagcaatctgacttattttgttgtcatgtctcctgaccacatctggaagggttatctacttttgaagacacatccagataattcaggacaatctgtccattttgaggttcttcattgaatcatgtctgcaaagtcccttctgcaatctaagtaagaaaaatcaccaagaatattatttttggtatttggaattgaatttgccaggaatgcaagcactgctacctaactaaagaccttggctttggaaacatcttaccccttggcagctctccagagtttagacttggcagcatcaaagacacaacgcaaggtaaacaggattataaaaaaactaaacctattttacgagcaaccaaattaaaagcagaagcaaagaaaacagcaataggcataaaggaagttggccttgtacttgcagctatattggcactactactggctttctatgctttcttttatctcagactcaccacggatgttgaccctgatctggaccaagatgaagattagctaagcaacaatcaatgcatgaaagagaaataactttacgaaagcaccttttgggaccaaaactttcaatactgaaactgtaacatctttaattctttctgctaatattttcagtttgcagacatatgatttttgatagttgcataggatgtcaggaaaagaaccttacctagcaatgcagtatagtatgtgctactggatacttttatatatctttctgctttgacagccaccctatacatggtacatttagatgaaatgggaaccagatcctaaatttttcaaatgtcattgccaatttatgtgtataattccatcacttcctgatgagtaagtctatttttgttctatatacatcataagttagtatatattcttatttacagaaacatgctcaaatcacattcagaaagaacaaaaagtcatgggaaattttttattttacaacaaagccctgctttctttctggacgtattttacatcattagagagactatctgcacatacatctaccataatctttttccttctttgccaactgttcagtgcacatgtgctgcatcagaaatggcacctggatgacagaagctcaaagagtcacatatgtctctaaaatagagttcttttcctcttgggctgtctgaactggtgtaaatagaagctcagttgatcttggttttaattaacttattactctattaatataaccttggaattctattctaattatgttgttctggctgcttgtagtatcagttcgcccctcttgttagggagatatgtaacaatctgtcatttaattgagcagtctttttcacataacagtaatagcaaaaatcctacctactcagaatcatcttcttaggttgtctcctaaatctgaacaatacagttgttttataaaattacattttgtctcttgagatttaatcaattagaactctttagggagaaaataaataatagaagaaaatatatgcctcatatttcatatgtaattatctgttgatataatttttcaatgtattttgtatttgtgggagcataatgacctgtacattcaatatttttactggtaattcaatttttaaatatgtttttacaatgcttgaacacataaaccttagaaaactggaaaatacgtgtccacagaaagagttattagctactaccttatgtaaagatgcatagaaaatgaaattgttggaaacatgtgcacaaagtgttttatattatatacattgtatttatgaagaataaataaaatattaagattgttttcctgctagccaagagaagaaatccttgggaaatatctaaggagtatatggggctttataagcactgtttctaaaagatattctctggtacttttgcaaaaagtcgactgtgactgtgtagcattatgttctgtagaatttttttcaagtagcataatttatttcattggtgtgaaaacagccaaaggttccaatatcctcacaaatcatttatgccaaacatctgagggcaaaatttagccggtgttatttactagattcttccctttgaactcacagactcaagagacagaccaagagttcttatatactcaccacagcggaccaatccaagtggcatttttaggaaaggttgcagcatttaatgccatgtggtatgtctgttcgtcaagtgggtggcaagggaatatccaagctggcattttggatatgatgggccttttactttcctgagtgacatgccacatgtcaagaaatactgctccccacccccccactcccatcacatttacgtgaacaattttcatttagttatttcccgttccatatggtgttaaaacagtcgtattaaataaagattatttctagttttcagtggtaatttaaatgagaggatatgtaataattgcttattagatacttatccaaatgaaatataacagagtttacagtacttaaaatggctggttatggtcttggaaatgtttgaaaattcattatcctgaaaaaaactttaccattctgttttacccttgaggtattttttggggaaaaatgtttttgataactattaatctaaatatagtataattataggcaaatttcactgcctagttttattgatatcctgagtctacagctagtccattcgtatgactgattgatttatgatagctccagagaaccataaatttcaaaggctaaactctctgattttagtaaatagtaggtaaagtgacacaatatatgtttacacaacactgttttcatgaaatgcaaactttgcaaaactcacattaactgggaagcagccaaccctctgtagagaaatcccagattgggagtctggtttgaatctttgaagacagaaaggtgatatccggcctgctgttttaaagggaccacacttttgaatacctactggtgtttggcagaaatctgagactggcaccagacacaaattttagacatgggtatcttccctccagtaattcactgctcagagtaatttagaagacaaaaacagaaaaaattgtaatgattttttaagtgttagaatatgtttgttaacatactctgcaaaataaatttcaactaatgcaatagacttaaaatatagcctatggaatactgtgattgaagtttgaaggcttgctggttcttattttgcatgcaagtttagacagggtaaagaatgtataaatttatttgagatgagatacagtattgtaaaaatataacctcatctagaattgcttttaaaacaagcaaaagcctattttagtacaaatgtagggtgggtagttgttttaaggtagcaaaatacttcaagattttctatctttttaatttttcatgaagacagaagaaatactttcaccccaaccaatgactgtaagatcttgagagtatgttcttactcatttctgtaattgcagtagtgtagtcatctgcatataaatttaataaatgcatgttaaaatttaagttg

SEQ ID NO: 18937 - protein, 63 aa, Homo sapiens; identical to SEQ ID NO: 18917

SEQ ID NO: 18938 - DNA, 3832 bp, Homo sapiens
cgaggggattggggagaccctgcccgggaagctcggggtccgggaatgaaagcgggcgcacctctttagcgagccctaaagcgtttgggagacgatcgttccgtccctgggagcggcacttggtggggctgggcggagggaggctctgcaagagaaacccggagtccgggaaacccagtagtttctggaggctgctcacattccttggcttatggcctccttcttccaacgtcaaagccagcaacattgcagcaatctgacttattttgttgtcatgtctcctgaccacatctggaagggttatctacttttgaagacacatccagataattcaggacaatctgtccattttgaggttcttcattgaatcatgtctgcaaagtcccttctgcaatctaagtaagaaaaatcaccaagaatattatttttggtatttggaattgaatttgccaggaatgcaagcactgctacctaactaaagaccttggctttggaaacatcttaccccttggcagctctccagagtttagacttggcagcatcaaagacacaacgcaagcaggcattttggagatcaaagatgggtagaaaagatgctgctactataaaacttcctgttgatcagtacagaaaacaaattggtaaacaggattataaaaaaactaaacctattttacgagcaaccaaattaaaagcagaagcaaagaaaacagcaataggcataaaggaagttggccttgtacttgcagctatattggcactactactggctttctatgctttcttttatctcagactcaccacggatgttgaccctgatctggaccaagatgaagattagctaagcaacaatcaatgcatgaaagagaaataactttacgaaagcaccttttgggaccaaaactttcaatactgaaactgtaacatctttaattctttctgctaatattttcagtttgcagacatatgatttttgatagttgcataggatgtcaggaaaagaaccttacctagcaatgcagtatagtatgtgctactggatacttttatatatctttctgctttgacagccaccctatacatggtacatttagatgaaatgggaaccagatcctaaatttttcaaatgtcattgccaatttatgtgtataattccatcacttcctgatgagtaagtctatttttgttctatatacatcataagttagtatatattcttatttacagaaacatgctcaaatcacattcagaaagaacaaaaagtcatgggaaattttttattttacaacaaagccctgctttctttctggacgtattttacatcattagagagactatctgcacatacatctaccataatctttttccttctttgccaactgttcagtgcacatgtgctgcatcagaaatggcacctggatgacagaagctcaaagagtcacatatgtctctaaaatagagttcttttcctcttgggctgtctgaactggtgtaaatagaagctcagttgatcttggttttaattaacttattactctattaatataaccttggaattctattctaattatgttgttctggctgcttgtagtatcagttcgcccctcttgttagggagatatgtaacaatctgtcatttaattgagcagtctttttcacataacagtaatagcaaaaatcctacctactcagaatcatcttcttaggttgtctcctaaatctgaacaatacagttgttttataaaattacattttgtctcttgagatttaatcaattagaactctttagggagaaaataaataatagaagaaaatatatgcctcatatttcatatgtaattatctgttgatataatttttcaatgtattttgtatttgtgggagcataatgacctgtacattcaatatttttactggtaattcaatttttaaatatgtttttacaatgcttgaacacataaaccttagaaaactggaaaatacgtgtccacagaaagagttattagctactaccttatgtaaagatgcatagaaaatgaaattgttggaaacatgtgcacaaagtgttttatattatatacattgtatttatgaagaataaataaaatattaagattgttttcctgctagccaagagaagaaatccttgggaaatatctaaggagtatatggggctttataagcactgtttctaaaagatattctctggtacttttgcaaaaagtcgactgtgactgtgtagcattatgttctgtagaatttttttcaagtagcataatttatttcattggtgtgaaaacagccaaaggttccaatatcctcacaaatcatttatgccaaacatctgagggcaaaatttagccggtgttatttactagattcttccctttgaactcacagactcaagagacagaccaagagttcttatatactcaccacagcggaccaatccaagtggcatttttaggaaaggttgcagcatttaatgccatgtggtatgtctgttcgtcaagtgggtggcaagggaatatccaagctggcattttggatatgatgggccttttactttcctgagtgacatgccacatgtcaagaaatactgctccccacccccccactcccatcacatttacgtgaacaattttcatttagttatttcccgttccatatggtgttaaaacagtcgtattaaataaagattatttctagttttcagtggtaatttaaatgagaggatatgtaataattgcttattagatacttatccaaatgaaatataacagagtttacagtacttaaaatggctggttatggtcttggaaatgtttgaaaattcattatcctgaaaaaaactttaccattctgttttacccttgaggtattttttggggaaaaatgtttttgataactattaatctaaatatagtataattataggcaaatttcactgcctagttttattgatatcctgagtctacagctagtccattcgtatgactgattgatttatgatagctccagagaaccataaatttcaaaggctaaactctctgattttagtaaatagtaggtaaagtgacacaatatatgtttacacaacactgttttcatgaaatgcaaactttgcaaaactcacattaactgggaagcagccaaccctctgtagagaaatcccagattgggagtctggtttgaatctttgaagacagaaaggtgatatccggcctgctgttttaaagggaccacacttttgaatacctactggtgtttggcagaaatctgagactggcaccagacacaaattttagacatgggtatcttccctccagtaattcactgctcagagtaatttagaagacaaaaacagaaaaaattgtaatgattttttaagtgttagaatatgtttgttaacatactctgcaaaataaatttcaactaatgcaatagacttaaaatatagcctatggaatactgtgattgaagtttgaaggcttgctggttcttattttgcatgcaagtttagacagggtaaagaatgtataaatttatttgagatgagatacagtattgtaaaaatataacctcatctagaattgcttttaaaacaagcaaaagcctattttagtacaaatgtagggtgggtagttgttttaaggtagcaaaatacttcaagattttctatctttttaatttttcatgaagacagaagaaatactttcaccccaaccaatgactgtaagatcttgagagtatgttcttactcatttctgtaattgcagtagtgtagtcatctgcatataaatttaataaatgcatgttaaaatttaagttg

SEQ ID NO: 18939 - protein, 86 aa, Homo sapiens; identical to SEQ ID NO: 4925

SEQ ID NO: 18940 - DNA, 3662 bp, Homo sapiens
gtttgtcggcccttgccttggcagagctgaggtgtgtgtccggcgagtgcgaggggattggggagaccctgcccgggaagctcggggtccgggaatgaaagcgggcgcacctctttagcgagccctaaagcgtttgggagacgatcgttccgtccctgggagcggcacttggtggggctgggcggagggaggctctgcaagagaaacccggagtccgggaaacccagtagtaagaaaaatcaccaagaatattatttttggtatttggaattgaatttgccaggaatgcaagcactgctacctaactaaagaccttggctttggaaacatcttaccccttggcagctctccagagtttagacttggcagcatcaaagacacaacgcaagcaggcattttggagatcaaagatgggtagaaaagatgctgctactataaaacttcctgttgatcagtacagaaaacaaattggtaaacaggattataaaaaaactaaacctattttacgagcaaccaaattaaaagcagaagcaaagaaaacagcaataggcataaaggaagttggccttgtacttgcagctatattggcactactactggctttctatgctttcttttatctcagactcaccacggatgttgaccctgatctggaccaagatgaagattagctaagcaacaatcaatgcatgaaagagaaataactttacgaaagcaccttttgggaccaaaactttcaatactgaaactgtaacatctttaattctttctgctaatattttcagtttgcagacatatgatttttgatagttgcataggatgtcaggaaaagaaccttacctagcaatgcagtatagtatgtgctactggatacttttatatatctttctgctttgacagccaccctatacatggtacatttagatgaaatgggaaccagatcctaaatttttcaaatgtcattgccaatttatgtgtataattccatcacttcctgatgagtaagtctatttttgttctatatacatcataagttagtatatattcttatttacagaaacatgctcaaatcacattcagaaagaacaaaaagtcatgggaaattttttattttacaacaaagccctgctttctttctggacgtattttacatcattagagagactatctgcacatacatctaccataatctttttccttctttgccaactgttcagtgcacatgtgctgcatcagaaatggcacctggatgacagaagctcaaagagtcacatatgtctctaaaatagagttcttttcctcttgggctgtctgaactggtgtaaatagaagctcagttgatcttggttttaattaacttattactctattaatataaccttggaattctattctaattatgttgttctggctgcttgtagtatcagttcgcccctcttgttagggagatatgtaacaatctgtcatttaattgagcagtctttttcacataacagtaatagcaaaaatcctacctactcagaatcatcttcttaggttgtctcctaaatctgaacaatacagttgttttataaaattacattttgtctcttgagatttaatcaattagaactctttagggagaaaataaataatagaagaaaatatatgcctcatatttcatatgtaattatctgttgatataatttttcaatgtattttgtatttgtgggagcataatgacctgtacattcaatatttttactggtaattcaatttttaaatatgtttttacaatgcttgaacacataaaccttagaaaactggaaaatacgtgtccacagaaagagttattagctactaccttatgtaaagatgcatagaaaatgaaattgttggaaacatgtgcacaaagtgttttatattatatacattgtatttatgaagaataaataaaatattaagattgttttcctgctagccaagagaagaaatccttgggaaatatctaaggagtatatggggctttataagcactgtttctaaaagatattctctggtacttttgcaaaaagtcgactgtgactgtgtagcattatgttctgtagaatttttttcaagtagcataatttatttcattggtgtgaaaacagccaaaggttccaatatcctcacaaatcatttatgccaaacatctgagggcaaaatttagccggtgttatttactagattcttccctttgaactcacagactcaagagacagaccaagagttcttatatactcaccacagcggaccaatccaagtggcatttttaggaaaggttgcagcatttaatgccatgtggtatgtctgttcgtcaagtgggtggcaagggaatatccaagctggcattttggatatgatgggccttttactttcctgagtgacatgccacatgtcaagaaatactgctccccacccccccactcccatcacatttacgtgaacaattttcatttagttatttcccgttccatatggtgttaaaacagtcgtattaaataaagattatttctagttttcagtggtaatttaaatgagaggatatgtaataattgcttattagatacttatccaaatgaaatataacagagtttacagtacttaaaatggctggttatggtcttggaaatgtttgaaaattcattatcctgaaaaaaactttaccattctgttttacccttgaggtattttttggggaaaaatgtttttgataactattaatctaaatatagtataattataggcaaatttcactgcctagttttattgatatcctgagtctacagctagtccattcgtatgactgattgatttatgatagctccagagaaccataaatttcaaaggctaaactctctgattttagtaaatagtaggtaaagtgacacaatatatgtttacacaacactgttttcatgaaatgcaaactttgcaaaactcacattaactgggaagcagccaaccctctgtagagaaatcccagattgggagtctggtttgaatctttgaagacagaaaggtgatatccggcctgctgttttaaagggaccacacttttgaatacctactggtgtttggcagaaatctgagactggcaccagacacaaattttagacatgggtatcttccctccagtaattcactgctcagagtaatttagaagacaaaaacagaaaaaattgtaatgattttttaagtgttagaatatgtttgttaacatactctgcaaaataaatttcaactaatgcaatagacttaaaatatagcctatggaatactgtgattgaagtttgaaggcttgctggttcttattttgcatgcaagtttagacagggtaaagaatgtataaatttatttgagatgagatacagtattgtaaaaatataacctcatctagaattgcttttaaaacaagcaaaagcctattttagtacaaatgtagggtgggtagttgttttaaggtagcaaaatacttcaagattttctatctttttaatttttcatgaagacagaagaaatactttcaccccaaccaatgactgtaagatcttgagagtatgttcttactcatttctgtaattgcagtagtgtagtcatctgcatataaatttaataaatgcatgttaaaatttaagttg

SEQ ID NO: 18941 - protein, 86 aa, Homo sapiens; identical to SEQ ID NO: 4925

SEQ ID NO: 18942 - DNA, 3600 bp, Homo sapiens
gcccctgagtgacagaaccgtggacagcaacatttcccacaggacacgaagtttgtcggcccttgccttggcagagctgagtaagaaaaatcaccaagaatattatttttggtatttggaattgaatttgccaggaatgcaagcactgctacctaactaaagaccttggctttggaaacatcttaccccttggcagctctccagagtttagacttggcagcatcaaagacacaacgcaagcaatatgaaacagaaaaacaagttggttggatagctgtcctccatgcagtcattcatgatccaggctgtcatcatcttcatcactcatgttcagagttaccctagaggtcatctccatttcatccagataaatgagtatgcaaggaacgtttttataggcattttggagatcaaagatgggtagaaaagatgctgctactataaaacttcctgttgatcagtacagaaaacaaattggtaaacaggattataaaaaaactaaacctattttacgagcaaccaaattaaaagcagaagcaaagaaaacagcaataggcataaagactcaccacggatgttgaccctgatctggaccaagatgaagattagctaagcaacaatcaatgcatgaaagagaaataactttacgaaagcaccttttgggaccaaaactttcaatactgaaactgtaacatctttaattctttctgctaatattttcagtttgcagacatatgatttttgatagttgcataggatgtcaggaaaagaaccttacctagcaatgcagtatagtatgtgctactggatacttttatatatctttctgctttgacagccaccctatacatggtacatttagatgaaatgggaaccagatcctaaatttttcaaatgtcattgccaatttatgtgtataattccatcacttcctgatgagtaagtctatttttgttctatatacatcataagttagtatatattcttatttacagaaacatgctcaaatcacattcagaaagaacaaaaagtcatgggaaattttttattttacaacaaagccctgctttctttctggacgtattttacatcattagagagactatctgcacatacatctaccataatctttttccttctttgccaactgttcagtgcacatgtgctgcatcagaaatggcacctggatgacagaagctcaaagagtcacatatgtctctaaaatagagttcttttcctcttgggctgtctgaactggtgtaaatagaagctcagttgatcttggttttaattaacttattactctattaatataaccttggaattctattctaattatgttgttctggctgcttgtagtatcagttcgcccctcttgttagggagatatgtaacaatctgtcatttaattgagcagtctttttcacataacagtaatagcaaaaatcctacctactcagaatcatcttcttaggttgtctcctaaatctgaacaatacagttgttttataaaattacattttgtctcttgagatttaatcaattagaactctttagggagaaaataaataatagaagaaaatatatgcctcatatttcatatgtaattatctgttgatataatttttcaatgtattttgtatttgtgggagcataatgacctgtacattcaatatttttactggtaattcaatttttaaatatgtttttacaatgcttgaacacataaaccttagaaaactggaaaatacgtgtccacagaaagagttattagctactaccttatgtaaagatgcatagaaaatgaaattgttggaaacatgtgcacaaagtgttttatattatatacattgtatttatgaagaataaataaaatattaagattgttttcctgctagccaagagaagaaatccttgggaaatatctaaggagtatatggggctttataagcactgtttctaaaagatattctctggtacttttgcaaaaagtcgactgtgactgtgtagcattatgttctgtagaatttttttcaagtagcataatttatttcattggtgtgaaaacagccaaaggttccaatatcctcacaaatcatttatgccaaacatctgagggcaaaatttagccggtgttatttactagattcttccctttgaactcacagactcaagagacagaccaagagttcttatatactcaccacagcggaccaatccaagtggcatttttaggaaaggttgcagcatttaatgccatgtggtatgtctgttcgtcaagtgggtggcaagggaatatccaagctggcattttggatatgatgggccttttactttcctgagtgacatgccacatgtcaagaaatactgctccccacccccccactcccatcacatttacgtgaacaattttcatttagttatttcccgttccatatggtgttaaaacagtcgtattaaataaagattatttctagttttcagtggtaatttaaatgagaggatatgtaataattgcttattagatacttatccaaatgaaatataacagagtttacagtacttaaaatggctggttatggtcttggaaatgtttgaaaattcattatcctgaaaaaaactttaccattctgttttacccttgaggtattttttggggaaaaatgtttttgataactattaatctaaatatagtataattataggcaaatttcactgcctagttttattgatatcctgagtctacagctagtccattcgtatgactgattgatttatgatagctccagagaaccataaatttcaaaggctaaactctctgattttagtaaatagtaggtaaagtgacacaatatatgtttacacaacactgttttcatgaaatgcaaactttgcaaaactcacattaactgggaagcagccaaccctctgtagagaaatcccagattgggagtctggtttgaatctttgaagacagaaaggtgatatccggcctgctgttttaaagggaccacacttttgaatacctactggtgtttggcagaaatctgagactggcaccagacacaaattttagacatgggtatcttccctccagtaattcactgctcagagtaatttagaagacaaaaacagaaaaaattgtaatgattttttaagtgttagaatatgtttgttaacatactctgcaaaataaatttcaactaatgcaatagacttaaaatatagcctatggaatactgtgattgaagtttgaaggcttgctggttcttattttgcatgcaagtttagacagggtaaagaatgtataaatttatttgagatgagatacagtattgtaaaaatataacctcatctagaattgcttttaaaacaagcaaaagcctattttagtacaaatgtagggtgggtagttgttttaaggtagcaaaatacttcaagattttctatctttttaatttttcatgaagacagaagaaatactttcaccccaaccaatgactgtaagatcttgagagtatgttcttactcatttctgtaattgcagtagtgtagtcatctgcatataaatttaataaatgcatgttaaaatttaagttg

SEQ ID NO: 18943 - protein, 54 aa, Homo sapiens; identical to SEQ ID NO: 4927

SEQ ID NO: 18944 - DNA, 3679 bp, Homo sapiens
gtcccgcccctgcccctgagtgacagaaccgtggacagcaacatttcccacaggacacgaagtttgtcggcccttgccttggcagagctgagtaagaaaaatcaccaagaatattatttttggtatttggaattgaatttgccaggaatgcaagcactgctacctaactaaagaccttggctttggaaacatcttaccccttggcagctctccagagtttagacttggcagcatcaaagacacaacgcaagcaatatgaaacagaaaaacaagttggttggatagctgtcctccatgcagtcattcatgatccaggctgtcatcatcttcatcactcatgttcagagttaccctagaggtcatctccatttcatccagataaatgagtatgcaaggaacgtttttataggcattttggagatcaaagatgggtagaaaagatgctgctactataaaacttcctgttgatcagtacagaaaacaaattggtaaacaggattataaaaaaactaaacctattttacgagcaaccaaattaaaagcagaagcaaagaaaacagcaataggcataaaggaagttggccttgtacttgcagctatattggcactactactggctttctatgctttcttttatctcagactcaccacggatgttgaccctgatctggaccaagatgaagattagctaagcaacaatcaatgcatgaaagagaaataactttacgaaagcaccttttgggaccaaaactttcaatactgaaactgtaacatctttaattctttctgctaatattttcagtttgcagacatatgatttttgatagttgcataggatgtcaggaaaagaaccttacctagcaatgcagtatagtatgtgctactggatacttttatatatctttctgctttgacagccaccctatacatggtacatttagatgaaatgggaaccagatcctaaatttttcaaatgtcattgccaatttatgtgtataattccatcacttcctgatgagtaagtctatttttgttctatatacatcataagttagtatatattcttatttacagaaacatgctcaaatcacattcagaaagaacaaaaagtcatgggaaattttttattttacaacaaagccctgctttctttctggacgtattttacatcattagagagactatctgcacatacatctaccataatctttttccttctttgccaactgttcagtgcacatgtgctgcatcagaaatggcacctggatgacagaagctcaaagagtcacatatgtctctaaaatagagttcttttcctcttgggctgtctgaactggtgtaaatagaagctcagttgatcttggttttaattaacttattactctattaatataaccttggaattctattctaattatgttgttctggctgcttgtagtatcagttcgcccctcttgttagggagatatgtaacaatctgtcatttaattgagcagtctttttcacataacagtaatagcaaaaatcctacctactcagaatcatcttcttaggttgtctcctaaatctgaacaatacagttgttttataaaattacattttgtctcttgagatttaatcaattagaactctttagggagaaaataaataatagaagaaaatatatgcctcatatttcatatgtaattatctgttgatataatttttcaatgtattttgtatttgtgggagcataatgacctgtacattcaatatttttactggtaattcaatttttaaatatgtttttacaatgcttgaacacataaaccttagaaaactggaaaatacgtgtccacagaaagagttattagctactaccttatgtaaagatgcatagaaaatgaaattgttggaaacatgtgcacaaagtgttttatattatatacattgtatttatgaagaataaataaaatattaagattgttttcctgctagccaagagaagaaatccttgggaaatatctaaggagtatatggggctttataagcactgtttctaaaagatattctctggtacttttgcaaaaagtcgactgtgactgtgtagcattatgttctgtagaatttttttcaagtagcataatttatttcattggtgtgaaaacagccaaaggttccaatatcctcacaaatcatttatgccaaacatctgagggcaaaatttagccggtgttatttactagattcttccctttgaactcacagactcaagagacagaccaagagttcttatatactcaccacagcggaccaatccaagtggcatttttaggaaaggttgcagcatttaatgccatgtggtatgtctgttcgtcaagtgggtggcaagggaatatccaagctggcattttggatatgatgggccttttactttcctgagtgacatgccacatgtcaagaaatactgctccccacccccccactcccatcacatttacgtgaacaattttcatttagttatttcccgttccatatggtgttaaaacagtcgtattaaataaagattatttctagttttcagtggtaatttaaatgagaggatatgtaataattgcttattagatacttatccaaatgaaatataacagagtttacagtacttaaaatggctggttatggtcttggaaatgtttgaaaattcattatcctgaaaaaaactttaccattctgttttacccttgaggtattttttggggaaaaatgtttttgataactattaatctaaatatagtataattataggcaaatttcactgcctagttttattgatatcctgagtctacagctagtccattcgtatgactgattgatttatgatagctccagagaaccataaatttcaaaggctaaactctctgattttagtaaatagtaggtaaagtgacacaatatatgtttacacaacactgttttcatgaaatgcaaactttgcaaaactcacattaactgggaagcagccaaccctctgtagagaaatcccagattgggagtctggtttgaatctttgaagacagaaaggtgatatccggcctgctgttttaaagggaccacacttttgaatacctactggtgtttggcagaaatctgagactggcaccagacacaaattttagacatgggtatcttccctccagtaattcactgctcagagtaatttagaagacaaaaacagaaaaaattgtaatgattttttaagtgttagaatatgtttgttaacatactctgcaaaataaatttcaactaatgcaatagacttaaaatatagcctatggaatactgtgattgaagtttgaaggcttgctggttcttattttgcatgcaagtttagacagggtaaagaatgtataaatttatttgagatgagatacagtattgtaaaaatataacctcatctagaattgcttttaaaacaagcaaaagcctattttagtacaaatgtagggtgggtagttgttttaaggtagcaaaatacttcaagattttctatctttttaatttttcatgaagacagaagaaatactttcaccccaaccaatgactgtaagatcttgagagtatgttcttactcatttctgtaattgcagtagtgtagtcatctgcatataaatttaataaatgcatgttaaaatttaagttg

SEQ ID NO: 18945 - protein, 86 aa, Homo sapiens; identical to SEQ ID NO: 4925

SEQ ID NO: 18946 - DNA, 3467 bp, Homo sapiens
gcggctggcttgtcccgcccctgcccctgagtgacagaaccgtggacagcaacatttcccacaggacacgaagtttgtcggcccttgccttggcagagctgagtaagaaaaatcaccaagaatattatttttggtatttggaattgaatttgccaggaatgcaagcactgctacctaactaaagaccttggctttggaaacatcttaccccttggcagctctccagagtttagacttggcagcatcaaagacacaacgcaagcaggcattttggagatcaaagatgggtagaaaagatgctgctactataaaacttcctgttgatcagtacagaaaacaaattggtaaacaggattataaaaaaactaaacctattttacgagcaaccaaattaaaagcagaagcaaagaaaacagcaataggcataaagactcaccacggatgttgaccctgatctggaccaagatgaagattagctaagcaacaatcaatgcatgaaagagaaataactttacgaaagcaccttttgggaccaaaactttcaatactgaaactgtaacatctttaattctttctgctaatattttcagtttgcagacatatgatttttgatagttgcataggatgtcaggaaaagaaccttacctagcaatgcagtatagtatgtgctactggatacttttatatatctttctgctttgacagccaccctatacatggtacatttagatgaaatgggaaccagatcctaaatttttcaaatgtcattgccaatttatgtgtataattccatcacttcctgatgagtaagtctatttttgttctatatacatcataagttagtatatattcttatttacagaaacatgctcaaatcacattcagaaagaacaaaaagtcatgggaaattttttattttacaacaaagccctgctttctttctggacgtattttacatcattagagagactatctgcacatacatctaccataatctttttccttctttgccaactgttcagtgcacatgtgctgcatcagaaatggcacctggatgacagaagctcaaagagtcacatatgtctctaaaatagagttcttttcctcttgggctgtctgaactggtgtaaatagaagctcagttgatcttggttttaattaacttattactctattaatataaccttggaattctattctaattatgttgttctggctgcttgtagtatcagttcgcccctcttgttagggagatatgtaacaatctgtcatttaattgagcagtctttttcacataacagtaatagcaaaaatcctacctactcagaatcatcttcttaggttgtctcctaaatctgaacaatacagttgttttataaaattacattttgtctcttgagatttaatcaattagaactctttagggagaaaataaataatagaagaaaatatatgcctcatatttcatatgtaattatctgttgatataatttttcaatgtattttgtatttgtgggagcataatgacctgtacattcaatatttttactggtaattcaatttttaaatatgtttttacaatgcttgaacacataaaccttagaaaactggaaaatacgtgtccacagaaagagttattagctactaccttatgtaaagatgcatagaaaatgaaattgttggaaacatgtgcacaaagtgttttatattatatacattgtatttatgaagaataaataaaatattaagattgttttcctgctagccaagagaagaaatccttgggaaatatctaaggagtatatggggctttataagcactgtttctaaaagatattctctggtacttttgcaaaaagtcgactgtgactgtgtagcattatgttctgtagaatttttttcaagtagcataatttatttcattggtgtgaaaacagccaaaggttccaatatcctcacaaatcatttatgccaaacatctgagggcaaaatttagccggtgttatttactagattcttccctttgaactcacagactcaagagacagaccaagagttcttatatactcaccacagcggaccaatccaagtggcatttttaggaaaggttgcagcatttaatgccatgtggtatgtctgttcgtcaagtgggtggcaagggaatatccaagctggcattttggatatgatgggccttttactttcctgagtgacatgccacatgtcaagaaatactgctccccacccccccactcccatcacatttacgtgaacaattttcatttagttatttcccgttccatatggtgttaaaacagtcgtattaaataaagattatttctagttttcagtggtaatttaaatgagaggatatgtaataattgcttattagatacttatccaaatgaaatataacagagtttacagtacttaaaatggctggttatggtcttggaaatgtttgaaaattcattatcctgaaaaaaactttaccattctgttttacccttgaggtattttttggggaaaaatgtttttgataactattaatctaaatatagtataattataggcaaatttcactgcctagttttattgatatcctgagtctacagctagtccattcgtatgactgattgatttatgatagctccagagaaccataaatttcaaaggctaaactctctgattttagtaaatagtaggtaaagtgacacaatatatgtttacacaacactgttttcatgaaatgcaaactttgcaaaactcacattaactgggaagcagccaaccctctgtagagaaatcccagattgggagtctggtttgaatctttgaagacagaaaggtgatatccggcctgctgttttaaagggaccacacttttgaatacctactggtgtttggcagaaatctgagactggcaccagacacaaattttagacatgggtatcttccctccagtaattcactgctcagagtaatttagaagacaaaaacagaaaaaattgtaatgattttttaagtgttagaatatgtttgttaacatactctgcaaaataaatttcaactaatgcaatagacttaaaatatagcctatggaatactgtgattgaagtttgaaggcttgctggttcttattttgcatgcaagtttagacagggtaaagaatgtataaatttatttgagatgagatacagtattgtaaaaatataacctcatctagaattgcttttaaaacaagcaaaagcctattttagtacaaatgtagggtgggtagttgttttaaggtagcaaaatacttcaagattttctatctttttaatttttcatgaagacagaagaaatactttcaccccaaccaatgactgtaagatcttgagagtatgttcttactcatttctgtaattgcagtagtgtagtcatctgcatataaatttaataaatgcatgttaaaatttaagttg

SEQ ID NO: 18947 - protein, 54 aa, Homo sapiens; identical to SEQ ID NO: 4927

SEQ ID NO: 18948 - DNA, 3533 bp, Homo sapiens
gtgcggctggcttgtcccgcccctgcccctgagtgacagaaccgtggacagcaacatttcccacaggacacgaagtttgtcggcccttgccttggcagagctgagcaatatgaaacagaaaaacaagttggttggatagctgtcctccatgcagtcattcatgatccaggctgtcatcatcttcatcactcatgttcagagttaccctagaggtcatctccatttcatccagataaatgagtatgcaaggaacgtttttataggcattttggagatcaaagatgggtagaaaagatgctgctactataaaacttcctgttgatcagtacagaaaacaaattggtaaacaggattataaaaaaactaaacctattttacgagcaaccaaattaaaagcagaagcaaagaaaacagcaataggcataaaggaagttggccttgtacttgcagctatattggcactactactggctttctatgctttcttttatctcagactcaccacggatgttgaccctgatctggaccaagatgaagattagctaagcaacaatcaatgcatgaaagagaaataactttacgaaagcaccttttgggaccaaaactttcaatactgaaactgtaacatctttaattctttctgctaatattttcagtttgcagacatatgatttttgatagttgcataggatgtcaggaaaagaaccttacctagcaatgcagtatagtatgtgctactggatacttttatatatctttctgctttgacagccaccctatacatggtacatttagatgaaatgggaaccagatcctaaatttttcaaatgtcattgccaatttatgtgtataattccatcacttcctgatgagtaagtctatttttgttctatatacatcataagttagtatatattcttatttacagaaacatgctcaaatcacattcagaaagaacaaaaagtcatgggaaattttttattttacaacaaagccctgctttctttctggacgtattttacatcattagagagactatctgcacatacatctaccataatctttttccttctttgccaactgttcagtgcacatgtgctgcatcagaaatggcacctggatgacagaagctcaaagagtcacatatgtctctaaaatagagttcttttcctcttgggctgtctgaactggtgtaaatagaagctcagttgatcttggttttaattaacttattactctattaatataaccttggaattctattctaattatgttgttctggctgcttgtagtatcagttcgcccctcttgttagggagatatgtaacaatctgtcatttaattgagcagtctttttcacataacagtaatagcaaaaatcctacctactcagaatcatcttcttaggttgtctcctaaatctgaacaatacagttgttttataaaattacattttgtctcttgagatttaatcaattagaactctttagggagaaaataaataatagaagaaaatatatgcctcatatttcatatgtaattatctgttgatataatttttcaatgtattttgtatttgtgggagcataatgacctgtacattcaatatttttactggtaattcaatttttaaatatgtttttacaatgcttgaacacataaaccttagaaaactggaaaatacgtgtccacagaaagagttattagctactaccttatgtaaagatgcatagaaaatgaaattgttggaaacatgtgcacaaagtgttttatattatatacattgtatttatgaagaataaataaaatattaagattgttttcctgctagccaagagaagaaatccttgggaaatatctaaggagtatatggggctttataagcactgtttctaaaagatattctctggtacttttgcaaaaagtcgactgtgactgtgtagcattatgttctgtagaatttttttcaagtagcataatttatttcattggtgtgaaaacagccaaaggttccaatatcctcacaaatcatttatgccaaacatctgagggcaaaatttagccggtgttatttactagattcttccctttgaactcacagactcaagagacagaccaagagttcttatatactcaccacagcggaccaatccaagtggcatttttaggaaaggttgcagcatttaatgccatgtggtatgtctgttcgtcaagtgggtggcaagggaatatccaagctggcattttggatatgatgggccttttactttcctgagtgacatgccacatgtcaagaaatactgctccccacccccccactcccatcacatttacgtgaacaattttcatttagttatttcccgttccatatggtgttaaaacagtcgtattaaataaagattatttctagttttcagtggtaatttaaatgagaggatatgtaataattgcttattagatacttatccaaatgaaatataacagagtttacagtacttaaaatggctggttatggtcttggaaatgtttgaaaattcattatcctgaaaaaaactttaccattctgttttacccttgaggtattttttggggaaaaatgtttttgataactattaatctaaatatagtataattataggcaaatttcactgcctagttttattgatatcctgagtctacagctagtccattcgtatgactgattgatttatgatagctccagagaaccataaatttcaaaggctaaactctctgattttagtaaatagtaggtaaagtgacacaatatatgtttacacaacactgttttcatgaaatgcaaactttgcaaaactcacattaactgggaagcagccaaccctctgtagagaaatcccagattgggagtctggtttgaatctttgaagacagaaaggtgatatccggcctgctgttttaaagggaccacacttttgaatacctactggtgtttggcagaaatctgagactggcaccagacacaaattttagacatgggtatcttccctccagtaattcactgctcagagtaatttagaagacaaaaacagaaaaaattgtaatgattttttaagtgttagaatatgtttgttaacatactctgcaaaataaatttcaactaatgcaatagacttaaaatatagcctatggaatactgtgattgaagtttgaaggcttgctggttcttattttgcatgcaagtttagacagggtaaagaatgtataaatttatttgagatgagatacagtattgtaaaaatataacctcatctagaattgcttttaaaacaagcaaaagcctattttagtacaaatgtagggtgggtagttgttttaaggtagcaaaatacttcaagattttctatctttttaatttttcatgaagacagaagaaatactttcaccccaaccaatgactgtaagatcttgagagtatgttcttactcatttctgtaattgcagtagtgtagtcatctgcatataaatttaataaatgcatgttaaaatttaagttg

SEQ ID NO: 18949 - protein, 86 aa, Homo sapiens; identical to SEQ ID NO: 4925

SEQ ID NO: 18950 - DNA, 3314 bp, Homo sapiens
taggggtgtgcggctggcttgtcccgcccctgcccctgagtgacagaaccgtggacagcaacatttcccacaggacacgaagtttgtcggcccttgccttggcagagctgaggcattttggagatcaaagatgggtagaaaagatgctgctactataaaacttcctgttgatcagtacagaaaacaaattggtaaacaggattataaaaaaactaaacctattttacgagcaaccaaattaaaagcagaagcaaagaaaacagcaataggcataaagactcaccacggatgttgaccctgatctggaccaagatgaagattagctaagcaacaatcaatgcatgaaagagaaataactttacgaaagcaccttttgggaccaaaactttcaatactgaaactgtaacatctttaattctttctgctaatattttcagtttgcagacatatgatttttgatagttgcataggatgtcaggaaaagaaccttacctagcaatgcagtatagtatgtgctactggatacttttatatatctttctgctttgacagccaccctatacatggtacatttagatgaaatgggaaccagatcctaaatttttcaaatgtcattgccaatttatgtgtataattccatcacttcctgatgagtaagtctatttttgttctatatacatcataagttagtatatattcttatttacagaaacatgctcaaatcacattcagaaagaacaaaaagtcatgggaaattttttattttacaacaaagccctgctttctttctggacgtattttacatcattagagagactatctgcacatacatctaccataatctttttccttctttgccaactgttcagtgcacatgtgctgcatcagaaatggcacctggatgacagaagctcaaagagtcacatatgtctctaaaatagagttcttttcctcttgggctgtctgaactggtgtaaatagaagctcagttgatcttggttttaattaacttattactctattaatataaccttggaattctattctaattatgttgttctggctgcttgtagtatcagttcgcccctcttgttagggagatatgtaacaatctgtcatttaattgagcagtctttttcacataacagtaatagcaaaaatcctacctactcagaatcatcttcttaggttgtctcctaaatctgaacaatacagttgttttataaaattacattttgtctcttgagatttaatcaattagaactctttagggagaaaataaataatagaagaaaatatatgcctcatatttcatatgtaattatctgttgatataatttttcaatgtattttgtatttgtgggagcataatgacctgtacattcaatatttttactggtaattcaatttttaaatatgtttttacaatgcttgaacacataaaccttagaaaactggaaaatacgtgtccacagaaagagttattagctactaccttatgtaaagatgcatagaaaatgaaattgttggaaacatgtgcacaaagtgttttatattatatacattgtatttatgaagaataaataaaatattaagattgttttcctgctagccaagagaagaaatccttgggaaatatctaaggagtatatggggctttataagcactgtttctaaaagatattctctggtacttttgcaaaaagtcgactgtgactgtgtagcattatgttctgtagaatttttttcaagtagcataatttatttcattggtgtgaaaacagccaaaggttccaatatcctcacaaatcatttatgccaaacatctgagggcaaaatttagccggtgttatttactagattcttccctttgaactcacagactcaagagacagaccaagagttcttatatactcaccacagcggaccaatccaagtggcatttttaggaaaggttgcagcatttaatgccatgtggtatgtctgttcgtcaagtgggtggcaagggaatatccaagctggcattttggatatgatgggccttttactttcctgagtgacatgccacatgtcaagaaatactgctccccacccccccactcccatcacatttacgtgaacaattttcatttagttatttcccgttccatatggtgttaaaacagtcgtattaaataaagattatttctagttttcagtggtaatttaaatgagaggatatgtaataattgcttattagatacttatccaaatgaaatataacagagtttacagtacttaaaatggctggttatggtcttggaaatgtttgaaaattcattatcctgaaaaaaactttaccattctgttttacccttgaggtattttttggggaaaaatgtttttgataactattaatctaaatatagtataattataggcaaatttcactgcctagttttattgatatcctgagtctacagctagtccattcgtatgactgattgatttatgatagctccagagaaccataaatttcaaaggctaaactctctgattttagtaaatagtaggtaaagtgacacaatatatgtttacacaacactgttttcatgaaatgcaaactttgcaaaactcacattaactgggaagcagccaaccctctgtagagaaatcccagattgggagtctggtttgaatctttgaagacagaaaggtgatatccggcctgctgttttaaagggaccacacttttgaatacctactggtgtttggcagaaatctgagactggcaccagacacaaattttagacatgggtatcttccctccagtaattcactgctcagagtaatttagaagacaaaaacagaaaaaattgtaatgattttttaagtgttagaatatgtttgttaacatactctgcaaaataaatttcaactaatgcaatagacttaaaatatagcctatggaatactgtgattgaagtttgaaggcttgctggttcttattttgcatgcaagtttagacagggtaaagaatgtataaatttatttgagatgagatacagtattgtaaaaatataacctcatctagaattgcttttaaaacaagcaaaagcctattttagtacaaatgtagggtgggtagttgttttaaggtagcaaaatacttcaagattttctatctttttaatttttcatgaagacagaagaaatactttcaccccaaccaatgactgtaagatcttgagagtatgttcttactcatttctgtaattgcagtagtgtagtcatctgcatataaatttaataaatgcatgttaaaatttaagttg

SEQ ID NO: 18951 - protein, 54 aa, Homo sapiens; identical to SEQ ID NO: 4927

SEQ ID NO: 18952 - DNA, 3473 bp, Homo sapiens
ccctttgggagtaggggtgtgcggctggcttgtcccgcccctgcccctgagtgacagaaccgtggacagcaacatttcccacaggacacgaagtttgtcggcccttgccttggcagagctgagtaagaaaaatcaccaagaatattatttttggtatttggaattgaatttgccaggaatgcaagcactgctacctaactaaagaccttggctttggaaacatcttaccccttggcagctctccagagtttagacttggcagcatcaaagacacaacgcaaggtaaacaggattataaaaaaactaaacctattttacgagcaaccaaattaaaagcagaagcaaagaaaacagcaataggcataaaggaagttggccttgtacttgcagctatattggcactactactggctttctatgctttcttttatctcagactcaccacggatgttgaccctgatctggaccaagatgaagattagctaagcaacaatcaatgcatgaaagagaaataactttacgaaagcaccttttgggaccaaaactttcaatactgaaactgtaacatctttaattctttctgctaatattttcagtttgcagacatatgatttttgatagttgcataggatgtcaggaaaagaaccttacctagcaatgcagtatagtatgtgctactggatacttttatatatctttctgctttgacagccaccctatacatggtacatttagatgaaatgggaaccagatcctaaatttttcaaatgtcattgccaatttatgtgtataattccatcacttcctgatgagtaagtctatttttgttctatatacatcataagttagtatatattcttatttacagaaacatgctcaaatcacattcagaaagaacaaaaagtcatgggaaattttttattttacaacaaagccctgctttctttctggacgtattttacatcattagagagactatctgcacatacatctaccataatctttttccttctttgccaactgttcagtgcacatgtgctgcatcagaaatggcacctggatgacagaagctcaaagagtcacatatgtctctaaaatagagttcttttcctcttgggctgtctgaactggtgtaaatagaagctcagttgatcttggttttaattaacttattactctattaatataaccttggaattctattctaattatgttgttctggctgcttgtagtatcagttcgcccctcttgttagggagatatgtaacaatctgtcatttaattgagcagtctttttcacataacagtaatagcaaaaatcctacctactcagaatcatcttcttaggttgtctcctaaatctgaacaatacagttgttttataaaattacattttgtctcttgagatttaatcaattagaactctttagggagaaaataaataatagaagaaaatatatgcctcatatttcatatgtaattatctgttgatataatttttcaatgtattttgtatttgtgggagcataatgacctgtacattcaatatttttactggtaattcaatttttaaatatgtttttacaatgcttgaacacataaaccttagaaaactggaaaatacgtgtccacagaaagagttattagctactaccttatgtaaagatgcatagaaaatgaaattgttggaaacatgtgcacaaagtgttttatattatatacattgtatttatgaagaataaataaaatattaagattgttttcctgctagccaagagaagaaatccttgggaaatatctaaggagtatatggggctttataagcactgtttctaaaagatattctctggtacttttgcaaaaagtcgactgtgactgtgtagcattatgttctgtagaatttttttcaagtagcataatttatttcattggtgtgaaaacagccaaaggttccaatatcctcacaaatcatttatgccaaacatctgagggcaaaatttagccggtgttatttactagattcttccctttgaactcacagactcaagagacagaccaagagttcttatatactcaccacagcggaccaatccaagtggcatttttaggaaaggttgcagcatttaatgccatgtggtatgtctgttcgtcaagtgggtggcaagggaatatccaagctggcattttggatatgatgggccttttactttcctgagtgacatgccacatgtcaagaaatactgctccccacccccccactcccatcacatttacgtgaacaattttcatttagttatttcccgttccatatggtgttaaaacagtcgtattaaataaagattatttctagttttcagtggtaatttaaatgagaggatatgtaataattgcttattagatacttatccaaatgaaatataacagagtttacagtacttaaaatggctggttatggtcttggaaatgtttgaaaattcattatcctgaaaaaaactttaccattctgttttacccttgaggtattttttggggaaaaatgtttttgataactattaatctaaatatagtataattataggcaaatttcactgcctagttttattgatatcctgagtctacagctagtccattcgtatgactgattgatttatgatagctccagagaaccataaatttcaaaggctaaactctctgattttagtaaatagtaggtaaagtgacacaatatatgtttacacaacactgttttcatgaaatgcaaactttgcaaaactcacattaactgggaagcagccaaccctctgtagagaaatcccagattgggagtctggtttgaatctttgaagacagaaaggtgatatccggcctgctgttttaaagggaccacacttttgaatacctactggtgtttggcagaaatctgagactggcaccagacacaaattttagacatgggtatcttccctccagtaattcactgctcagagtaatttagaagacaaaaacagaaaaaattgtaatgattttttaagtgttagaatatgtttgttaacatactctgcaaaataaatttcaactaatgcaatagacttaaaatatagcctatggaatactgtgattgaagtttgaaggcttgctggttcttattttgcatgcaagtttagacagggtaaagaatgtataaatttatttgagatgagatacagtattgtaaaaatataacctcatctagaattgcttttaaaacaagcaaaagcctattttagtacaaatgtagggtgggtagttgttttaaggtagcaaaatacttcaagattttctatctttttaatttttcatgaagacagaagaaatactttcaccccaaccaatgactgtaagatcttgagagtatgttcttactcatttctgtaattgcagtagtgtagtcatctgcatataaatttaataaatgcatgttaaaatttaagttg

SEQ ID NO: 18953 - protein, 63 aa, Homo sapiens; identical to SEQ ID NO: 18917

SEQ ID NO: 18954 - DNA, 3570 bp, Homo sapiens
ctcttttccgcctcaccctttgggagtaggggtgtgcggctggcttgtcccgcccctgcccctgagtgacagaaccgtggacagcaacatttcccacaggacacgaagtttgtcggcccttgccttggcagagctgagtaagaaaaatcaccaagaatattatttttggtatttggaattgaatttgccaggaatgcaagcactgctacctaactaaagaccttggctttggaaacatcttaccccttggcagctctccagagtttagacttggcagcatcaaagacacaacgcaagcaggcattttggagatcaaagatgggtagaaaagatgctgctactataaaacttcctgttgatcagtacagaaaacaaattggtaaacaggattataaaaaaactaaacctattttacgagcaaccaaattaaaagcagaagcaaagaaaacagcaataggcataaaggaagttggccttgtacttgcagctatattggcactactactggctttctatgctttcttttatctcagactcaccacggatgttgaccctgatctggaccaagatgaagattagctaagcaacaatcaatgcatgaaagagaaataactttacgaaagcaccttttgggaccaaaactttcaatactgaaactgtaacatctttaattctttctgctaatattttcagtttgcagacatatgatttttgatagttgcataggatgtcaggaaaagaaccttacctagcaatgcagtatagtatgtgctactggatacttttatatatctttctgctttgacagccaccctatacatggtacatttagatgaaatgggaaccagatcctaaatttttcaaatgtcattgccaatttatgtgtataattccatcacttcctgatgagtaagtctatttttgttctatatacatcataagttagtatatattcttatttacagaaacatgctcaaatcacattcagaaagaacaaaaagtcatgggaaattttttattttacaacaaagccctgctttctttctggacgtattttacatcattagagagactatctgcacatacatctaccataatctttttccttctttgccaactgttcagtgcacatgtgctgcatcagaaatggcacctggatgacagaagctcaaagagtcacatatgtctctaaaatagagttcttttcctcttgggctgtctgaactggtgtaaatagaagctcagttgatcttggttttaattaacttattactctattaatataaccttggaattctattctaattatgttgttctggctgcttgtagtatcagttcgcccctcttgttagggagatatgtaacaatctgtcatttaattgagcagtctttttcacataacagtaatagcaaaaatcctacctactcagaatcatcttcttaggttgtctcctaaatctgaacaatacagttgttttataaaattacattttgtctcttgagatttaatcaattagaactctttagggagaaaataaataatagaagaaaatatatgcctcatatttcatatgtaattatctgttgatataatttttcaatgtattttgtatttgtgggagcataatgacctgtacattcaatatttttactggtaattcaatttttaaatatgtttttacaatgcttgaacacataaaccttagaaaactggaaaatacgtgtccacagaaagagttattagctactaccttatgtaaagatgcatagaaaatgaaattgttggaaacatgtgcacaaagtgttttatattatatacattgtatttatgaagaataaataaaatattaagattgttttcctgctagccaagagaagaaatccttgggaaatatctaaggagtatatggggctttataagcactgtttctaaaagatattctctggtacttttgcaaaaagtcgactgtgactgtgtagcattatgttctgtagaatttttttcaagtagcataatttatttcattggtgtgaaaacagccaaaggttccaatatcctcacaaatcatttatgccaaacatctgagggcaaaatttagccggtgttatttactagattcttccctttgaactcacagactcaagagacagaccaagagttcttatatactcaccacagcggaccaatccaagtggcatttttaggaaaggttgcagcatttaatgccatgtggtatgtctgttcgtcaagtgggtggcaagggaatatccaagctggcattttggatatgatgggccttttactttcctgagtgacatgccacatgtcaagaaatactgctccccacccccccactcccatcacatttacgtgaacaattttcatttagttatttcccgttccatatggtgttaaaacagtcgtattaaataaagattatttctagttttcagtggtaatttaaatgagaggatatgtaataattgcttattagatacttatccaaatgaaatataacagagtttacagtacttaaaatggctggttatggtcttggaaatgtttgaaaattcattatcctgaaaaaaactttaccattctgttttacccttgaggtattttttggggaaaaatgtttttgataactattaatctaaatatagtataattataggcaaatttcactgcctagttttattgatatcctgagtctacagctagtccattcgtatgactgattgatttatgatagctccagagaaccataaatttcaaaggctaaactctctgattttagtaaatagtaggtaaagtgacacaatatatgtttacacaacactgttttcatgaaatgcaaactttgcaaaactcacattaactgggaagcagccaaccctctgtagagaaatcccagattgggagtctggtttgaatctttgaagacagaaaggtgatatccggcctgctgttttaaagggaccacacttttgaatacctactggtgtttggcagaaatctgagactggcaccagacacaaattttagacatgggtatcttccctccagtaattcactgctcagagtaatttagaagacaaaaacagaaaaaattgtaatgattttttaagtgttagaatatgtttgttaacatactctgcaaaataaatttcaactaatgcaatagacttaaaatatagcctatggaatactgtgattgaagtttgaaggcttgctggttcttattttgcatgcaagtttagacagggtaaagaatgtataaatttatttgagatgagatacagtattgtaaaaatataacctcatctagaattgcttttaaaacaagcaaaagcctattttagtacaaatgtagggtgggtagttgttttaaggtagcaaaatacttcaagattttctatctttttaatttttcatgaagacagaagaaatactttcaccccaaccaatgactgtaagatcttgagagtatgttcttactcatttctgtaattgcagtagtgtagtcatctgcatataaatttaataaatgcatgttaaaatttaagttg

SEQ ID NO: 18955 - protein, 86 aa, Homo sapiens; identical to SEQ ID NO: 4925

SEQ ID NO: 18956 - DNA, 1867 bp, Homo sapiens
agtttctggaggctgctcacattccttggcttatggcctccttcttccaacgtcaaagccagcaacattgcagcaatctgacttattttgttgtcatgtctcctgaccacatctggaagggttatctacttttgaagacacatccagataattcaggacaatctgtccattttgaggttcttcattgaatcatgtctgcaaagtcccttctgcaatctaagtaagaaaaatcaccaagaatattatttttggtatttggaattgaatttgccaggaatgcaagcactgctacctaactaaagaccttggctttggaaacatcttaccccttggcagctctccagagtttagacttggcagcatcaaagacacaacgcaaggtaaacaggattataaaaaaactaaacctattttacgagcaaccaaattaaaagcagaagcaaagaaaacagcaataggcataaaggaagttggccttgtacttgcagctatattggcactactactggctttctatgctttcttttatctcagactcaccacggatgttgaccctgatctggaccaagatgaagattagctaagcaacaatcaatgcatgaaagagaaataactttacgaaagcaccttttgggaccaaaactttcaatactgaaactgtaacatctttaattctttctgctaatattttcagtttgcagacatatgatttttgatagttgcataggatgtcaggaaaagaaccttacctagcaatgcagtatagtatgtgctactggatacttttatatatctttctgctttgacagccaccctatacatggtacatttagatgaaatgggaaccagatcctaaatttttcaaatgtcattgccaatttatgtgtataattccatcacttcctgatgagtaagtctatttttgttctatatacatcataagttagtatatattcttatttacagaaacatgctcaaatcacattcagaaagaacaaaaagtcatgggaaattttttattttacaacaaagccctgctttctttctggacgtattttacatcattagagagactatctgcacatacatctaccataatctttttccttctttgccaactgttcagtgcacatgtgctgcatcagaaatggcacctggatgacagaagctcaaagagtcacatatgtctctaaaatagagttcttttcctcttgggctgtctgaactggtgtaaatagaagctcagttgatcttggttttaattaacttattactctattaatataaccttggaattctattctaattatgttgttctggctgcttgtagtatcagttcgcccctcttgttagggagatatgtaacaatctgtcatttaattgagcagtctttttcacataacagtaatagcaaaaatcctacctactcagaatcatcttcttaggttgtctcctaaatctgaacaatacagttgttttataaaattacattttgtctcttgagatttaatcaattagaactctttagggagaaaataaataatagaagaaaatatatgcctcatatttcatatgtaattatctgttgatataatttttcaatgtattttgtatttgtgggagcataatgacctgtacattcaatatttttactggtaattcaatttttaaatatgtttttacaatgcttgaacacataaaccttagaaaactggaaaatacgtgtccacagaaagagttattagctactaccttatgtaaagatgcatagaaaatgaaattgttggaaacatgtgcacaaagtgttttatattatatacattgtatttatgaagaataaataaaatattaagattgttttcctgct

SEQ ID NO: 18957 - protein, 63 aa, Homo sapiens; identical to SEQ ID NO: 18917

SEQ ID NO: 18958 - DNA, 2128 bp, Homo sapiens
cgaggggattggggagaccctgcccgggaagctcggggtccgggaatgaaagcgggcgcacctctttagcgagccctaaagcgtttgggagacgatcgttccgtccctgggagcggcacttggtggggctgggcggagggaggctctgcaagagaaacccggagtccgggaaacccagtagtttctggaggctgctcacattccttggcttatggcctccttcttccaacgtcaaagccagcaacattgcagcaatctgacttattttgttgtcatgtctcctgaccacatctggaagggttatctacttttgaagacacatccagataattcaggacaatctgtccattttgaggttcttcattgaatcatgtctgcaaagtcccttctgcaatctaagtaagaaaaatcaccaagaatattatttttggtatttggaattgaatttgccaggaatgcaagcactgctacctaactaaagaccttggctttggaaacatcttaccccttggcagctctccagagtttagacttggcagcatcaaagacacaacgcaagcaggcattttggagatcaaagatgggtagaaaagatgctgctactataaaacttcctgttgatcagtacagaaaacaaattggtaaacaggattataaaaaaactaaacctattttacgagcaaccaaattaaaagcagaagcaaagaaaacagcaataggcataaaggaagttggccttgtacttgcagctatattggcactactactggctttctatgctttcttttatctcagactcaccacggatgttgaccctgatctggaccaagatgaagattagctaagcaacaatcaatgcatgaaagagaaataactttacgaaagcaccttttgggaccaaaactttcaatactgaaactgtaacatctttaattctttctgctaatattttcagtttgcagacatatgatttttgatagttgcataggatgtcaggaaaagaaccttacctagcaatgcagtatagtatgtgctactggatacttttatatatctttctgctttgacagccaccctatacatggtacatttagatgaaatgggaaccagatcctaaatttttcaaatgtcattgccaatttatgtgtataattccatcacttcctgatgagtaagtctatttttgttctatatacatcataagttagtatatattcttatttacagaaacatgctcaaatcacattcagaaagaacaaaaagtcatgggaaattttttattttacaacaaagccctgctttctttctggacgtattttacatcattagagagactatctgcacatacatctaccataatctttttccttctttgccaactgttcagtgcacatgtgctgcatcagaaatggcacctggatgacagaagctcaaagagtcacatatgtctctaaaatagagttcttttcctcttgggctgtctgaactggtgtaaatagaagctcagttgatcttggttttaattaacttattactctattaatataaccttggaattctattctaattatgttgttctggctgcttgtagtatcagttcgcccctcttgttagggagatatgtaacaatctgtcatttaattgagcagtctttttcacataacagtaatagcaaaaatcctacctactcagaatcatcttcttaggttgtctcctaaatctgaacaatacagttgttttataaaattacattttgtctcttgagatttaatcaattagaactctttagggagaaaataaataatagaagaaaatatatgcctcatatttcatatgtaattatctgttgatataatttttcaatgtattttgtatttgtgggagcataatgacctgtacattcaatatttttactggtaattcaatttttaaatatgtttttacaatgcttgaacacataaaccttagaaaactggaaaatacgtgtccacagaaagagttattagctactaccttatgtaaagatgcatagaaaatgaaattgttggaaacatgtgcacaaagtgttttatattatatacattgtatttatgaagaataaataaaatattaagattgttttcctgct

SEQ ID NO: 18959 - protein, 86 aa, Homo sapiens; identical to SEQ ID NO: 4925

SEQ ID NO: 18960 - DNA, 1958 bp, Homo sapiens
gtttgtcggcccttgccttggcagagctgaggtgtgtgtccggcgagtgcgaggggattggggagaccctgcccgggaagctcggggtccgggaatgaaagcgggcgcacctctttagcgagccctaaagcgtttgggagacgatcgttccgtccctgggagcggcacttggtggggctgggcggagggaggctctgcaagagaaacccggagtccgggaaacccagtagtaagaaaaatcaccaagaatattatttttggtatttggaattgaatttgccaggaatgcaagcactgctacctaactaaagaccttggctttggaaacatcttaccccttggcagctctccagagtttagacttggcagcatcaaagacacaacgcaagcaggcattttggagatcaaagatgggtagaaaagatgctgctactataaaacttcctgttgatcagtacagaaaacaaattggtaaacaggattataaaaaaactaaacctattttacgagcaaccaaattaaaagcagaagcaaagaaaacagcaataggcataaaggaagttggccttgtacttgcagctatattggcactactactggctttctatgctttcttttatctcagactcaccacggatgttgaccctgatctggaccaagatgaagattagctaagcaacaatcaatgcatgaaagagaaataactttacgaaagcaccttttgggaccaaaactttcaatactgaaactgtaacatctttaattctttctgctaatattttcagtttgcagacatatgatttttgatagttgcataggatgtcaggaaaagaaccttacctagcaatgcagtatagtatgtgctactggatacttttatatatctttctgctttgacagccaccctatacatggtacatttagatgaaatgggaaccagatcctaaatttttcaaatgtcattgccaatttatgtgtataattccatcacttcctgatgagtaagtctatttttgttctatatacatcataagttagtatatattcttatttacagaaacatgctcaaatcacattcagaaagaacaaaaagtcatgggaaattttttattttacaacaaagccctgctttctttctggacgtattttacatcattagagagactatctgcacatacatctaccataatctttttccttctttgccaactgttcagtgcacatgtgctgcatcagaaatggcacctggatgacagaagctcaaagagtcacatatgtctctaaaatagagttcttttcctcttgggctgtctgaactggtgtaaatagaagctcagttgatcttggttttaattaacttattactctattaatataaccttggaattctattctaattatgttgttctggctgcttgtagtatcagttcgcccctcttgttagggagatatgtaacaatctgtcatttaattgagcagtctttttcacataacagtaatagcaaaaatcctacctactcagaatcatcttcttaggttgtctcctaaatctgaacaatacagttgttttataaaattacattttgtctcttgagatttaatcaattagaactctttagggagaaaataaataatagaagaaaatatatgcctcatatttcatatgtaattatctgttgatataatttttcaatgtattttgtatttgtgggagcataatgacctgtacattcaatatttttactggtaattcaatttttaaatatgtttttacaatgcttgaacacataaaccttagaaaactggaaaatacgtgtccacagaaagagttattagctactaccttatgtaaagatgcatagaaaatgaaattgttggaaacatgtgcacaaagtgttttatattatatacattgtatttatgaagaataaataaaatattaagattgttttcctgct

SEQ ID NO: 18961 - protein, 86 aa, Homo sapiens; identical to SEQ ID NO: 4925

SEQ ID NO: 18962 - DNA, 1896 bp, Homo sapiens
gcccctgagtgacagaaccgtggacagcaacatttcccacaggacacgaagtttgtcggcccttgccttggcagagctgagtaagaaaaatcaccaagaatattatttttggtatttggaattgaatttgccaggaatgcaagcactgctacctaactaaagaccttggctttggaaacatcttaccccttggcagctctccagagtttagacttggcagcatcaaagacacaacgcaagcaatatgaaacagaaaaacaagttggttggatagctgtcctccatgcagtcattcatgatccaggctgtcatcatcttcatcactcatgttcagagttaccctagaggtcatctccatttcatccagataaatgagtatgcaaggaacgtttttataggcattttggagatcaaagatgggtagaaaagatgctgctactataaaacttcctgttgatcagtacagaaaacaaattggtaaacaggattataaaaaaactaaacctattttacgagcaaccaaattaaaagcagaagcaaagaaaacagcaataggcataaagactcaccacggatgttgaccctgatctggaccaagatgaagattagctaagcaacaatcaatgcatgaaagagaaataactttacgaaagcaccttttgggaccaaaactttcaatactgaaactgtaacatctttaattctttctgctaatattttcagtttgcagacatatgatttttgatagttgcataggatgtcaggaaaagaaccttacctagcaatgcagtatagtatgtgctactggatacttttatatatctttctgctttgacagccaccctatacatggtacatttagatgaaatgggaaccagatcctaaatttttcaaatgtcattgccaatttatgtgtataattccatcacttcctgatgagtaagtctatttttgttctatatacatcataagttagtatatattcttatttacagaaacatgctcaaatcacattcagaaagaacaaaaagtcatgggaaattttttattttacaacaaagccctgctttctttctggacgtattttacatcattagagagactatctgcacatacatctaccataatctttttccttctttgccaactgttcagtgcacatgtgctgcatcagaaatggcacctggatgacagaagctcaaagagtcacatatgtctctaaaatagagttcttttcctcttgggctgtctgaactggtgtaaatagaagctcagttgatcttggttttaattaacttattactctattaatataaccttggaattctattctaattatgttgttctggctgcttgtagtatcagttcgcccctcttgttagggagatatgtaacaatctgtcatttaattgagcagtctttttcacataacagtaatagcaaaaatcctacctactcagaatcatcttcttaggttgtctcctaaatctgaacaatacagttgttttataaaattacattttgtctcttgagatttaatcaattagaactctttagggagaaaataaataatagaagaaaatatatgcctcatatttcatatgtaattatctgttgatataatttttcaatgtattttgtatttgtgggagcataatgacctgtacattcaatatttttactggtaattcaatttttaaatatgtttttacaatgcttgaacacataaaccttagaaaactggaaaatacgtgtccacagaaagagttattagctactaccttatgtaaagatgcatagaaaatgaaattgttggaaacatgtgcacaaagtgttttatattatatacattgtatttatgaagaataaataaaatattaagattgttttcctgct

SEQ ID NO: 18963 - protein, 54 aa, Homo sapiens; identical to SEQ ID NO: 4927

SEQ ID NO: 18964 - DNA, 1975 bp, Homo sapiens
gtcccgcccctgcccctgagtgacagaaccgtggacagcaacatttcccacaggacacgaagtttgtcggcccttgccttggcagagctgagtaagaaaaatcaccaagaatattatttttggtatttggaattgaatttgccaggaatgcaagcactgctacctaactaaagaccttggctttggaaacatcttaccccttggcagctctccagagtttagacttggcagcatcaaagacacaacgcaagcaatatgaaacagaaaaacaagttggttggatagctgtcctccatgcagtcattcatgatccaggctgtcatcatcttcatcactcatgttcagagttaccctagaggtcatctccatttcatccagataaatgagtatgcaaggaacgtttttataggcattttggagatcaaagatgggtagaaaagatgctgctactataaaacttcctgttgatcagtacagaaaacaaattggtaaacaggattataaaaaaactaaacctattttacgagcaaccaaattaaaagcagaagcaaagaaaacagcaataggcataaaggaagttggccttgtacttgcagctatattggcactactactggctttctatgctttcttttatctcagactcaccacggatgttgaccctgatctggaccaagatgaagattagctaagcaacaatcaatgcatgaaagagaaataactttacgaaagcaccttttgggaccaaaactttcaatactgaaactgtaacatctttaattctttctgctaatattttcagtttgcagacatatgatttttgatagttgcataggatgtcaggaaaagaaccttacctagcaatgcagtatagtatgtgctactggatacttttatatatctttctgctttgacagccaccctatacatggtacatttagatgaaatgggaaccagatcctaaatttttcaaatgtcattgccaatttatgtgtataattccatcacttcctgatgagtaagtctatttttgttctatatacatcataagttagtatatattcttatttacagaaacatgctcaaatcacattcagaaagaacaaaaagtcatgggaaattttttattttacaacaaagccctgctttctttctggacgtattttacatcattagagagactatctgcacatacatctaccataatctttttccttctttgccaactgttcagtgcacatgtgctgcatcagaaatggcacctggatgacagaagctcaaagagtcacatatgtctctaaaatagagttcttttcctcttgggctgtctgaactggtgtaaatagaagctcagttgatcttggttttaattaacttattactctattaatataaccttggaattctattctaattatgttgttctggctgcttgtagtatcagttcgcccctcttgttagggagatatgtaacaatctgtcatttaattgagcagtctttttcacataacagtaatagcaaaaatcctacctactcagaatcatcttcttaggttgtctcctaaatctgaacaatacagttgttttataaaattacattttgtctcttgagatttaatcaattagaactctttagggagaaaataaataatagaagaaaatatatgcctcatatttcatatgtaattatctgttgatataatttttcaatgtattttgtatttgtgggagcataatgacctgtacattcaatatttttactggtaattcaatttttaaatatgtttttacaatgcttgaacacataaaccttagaaaactggaaaatacgtgtccacagaaagagttattagctactaccttatgtaaagatgcatagaaaatgaaattgttggaaacatgtgcacaaagtgttttatattatatacattgtatttatgaagaataaataaaatattaagattgttttcctgct

SEQ ID NO: 18965 - protein, 86 aa, Homo sapiens; identical to SEQ ID NO: 4925

SEQ ID NO: 18966 - DNA, 1763 bp, Homo sapiens
gcggctggcttgtcccgcccctgcccctgagtgacagaaccgtggacagcaacatttcccacaggacacgaagtttgtcggcccttgccttggcagagctgagtaagaaaaatcaccaagaatattatttttggtatttggaattgaatttgccaggaatgcaagcactgctacctaactaaagaccttggctttggaaacatcttaccccttggcagctctccagagtttagacttggcagcatcaaagacacaacgcaagcaggcattttggagatcaaagatgggtagaaaagatgctgctactataaaacttcctgttgatcagtacagaaaacaaattggtaaacaggattataaaaaaactaaacctattttacgagcaaccaaattaaaagcagaagcaaagaaaacagcaataggcataaagactcaccacggatgttgaccctgatctggaccaagatgaagattagctaagcaacaatcaatgcatgaaagagaaataactttacgaaagcaccttttgggaccaaaactttcaatactgaaactgtaacatctttaattctttctgctaatattttcagtttgcagacatatgatttttgatagttgcataggatgtcaggaaaagaaccttacctagcaatgcagtatagtatgtgctactggatacttttatatatctttctgctttgacagccaccctatacatggtacatttagatgaaatgggaaccagatcctaaatttttcaaatgtcattgccaatttatgtgtataattccatcacttcctgatgagtaagtctatttttgttctatatacatcataagttagtatatattcttatttacagaaacatgctcaaatcacattcagaaagaacaaaaagtcatgggaaattttttattttacaacaaagccctgctttctttctggacgtattttacatcattagagagactatctgcacatacatctaccataatctttttccttctttgccaactgttcagtgcacatgtgctgcatcagaaatggcacctggatgacagaagctcaaagagtcacatatgtctctaaaatagagttcttttcctcttgggctgtctgaactggtgtaaatagaagctcagttgatcttggttttaattaacttattactctattaatataaccttggaattctattctaattatgttgttctggctgcttgtagtatcagttcgcccctcttgttagggagatatgtaacaatctgtcatttaattgagcagtctttttcacataacagtaatagcaaaaatcctacctactcagaatcatcttcttaggttgtctcctaaatctgaacaatacagttgttttataaaattacattttgtctcttgagatttaatcaattagaactctttagggagaaaataaataatagaagaaaatatatgcctcatatttcatatgtaattatctgttgatataatttttcaatgtattttgtatttgtgggagcataatgacctgtacattcaatatttttactggtaattcaatttttaaatatgtttttacaatgcttgaacacataaaccttagaaaactggaaaatacgtgtccacagaaagagttattagctactaccttatgtaaagatgcatagaaaatgaaattgttggaaacatgtgcacaaagtgttttatattatatacattgtatttatgaagaataaataaaatattaagattgttttcctgct

SEQ ID NO: 18967 - protein, 54 aa, Homo sapiens; identical to SEQ ID NO: 4927

SEQ ID NO: 18968 - DNA, 1829 bp, Homo sapiens
gtgcggctggcttgtcccgcccctgcccctgagtgacagaaccgtggacagcaacatttcccacaggacacgaagtttgtcggcccttgccttggcagagctgagcaatatgaaacagaaaaacaagttggttggatagctgtcctccatgcagtcattcatgatccaggctgtcatcatcttcatcactcatgttcagagttaccctagaggtcatctccatttcatccagataaatgagtatgcaaggaacgtttttataggcattttggagatcaaagatgggtagaaaagatgctgctactataaaacttcctgttgatcagtacagaaaacaaattggtaaacaggattataaaaaaactaaacctattttacgagcaaccaaattaaaagcagaagcaaagaaaacagcaataggcataaaggaagttggccttgtacttgcagctatattggcactactactggctttctatgctttcttttatctcagactcaccacggatgttgaccctgatctggaccaagatgaagattagctaagcaacaatcaatgcatgaaagagaaataactttacgaaagcaccttttgggaccaaaactttcaatactgaaactgtaacatctttaattctttctgctaatattttcagtttgcagacatatgatttttgatagttgcataggatgtcaggaaaagaaccttacctagcaatgcagtatagtatgtgctactggatacttttatatatctttctgctttgacagccaccctatacatggtacatttagatgaaatgggaaccagatcctaaatttttcaaatgtcattgccaatttatgtgtataattccatcacttcctgatgagtaagtctatttttgttctatatacatcataagttagtatatattcttatttacagaaacatgctcaaatcacattcagaaagaacaaaaagtcatgggaaattttttattttacaacaaagccctgctttctttctggacgtattttacatcattagagagactatctgcacatacatctaccataatctttttccttctttgccaactgttcagtgcacatgtgctgcatcagaaatggcacctggatgacagaagctcaaagagtcacatatgtctctaaaatagagttcttttcctcttgggctgtctgaactggtgtaaatagaagctcagttgatcttggttttaattaacttattactctattaatataaccttggaattctattctaattatgttgttctggctgcttgtagtatcagttcgcccctcttgttagggagatatgtaacaatctgtcatttaattgagcagtctttttcacataacagtaatagcaaaaatcctacctactcagaatcatcttcttaggttgtctcctaaatctgaacaatacagttgttttataaaattacattttgtctcttgagatttaatcaattagaactctttagggagaaaataaataatagaagaaaatatatgcctcatatttcatatgtaattatctgttgatataatttttcaatgtattttgtatttgtgggagcataatgacctgtacattcaatatttttactggtaattcaatttttaaatatgtttttacaatgcttgaacacataaaccttagaaaactggaaaatacgtgtccacagaaagagttattagctactaccttatgtaaagatgcatagaaaatgaaattgttggaaacatgtgcacaaagtgttttatattatatacattgtatttatgaagaataaataaaatattaagattgttttcctgct

SEQ ID NO: 18969 - protein, 86 aa, Homo sapiens; identical to SEQ ID NO: 4925

SEQ ID NO: 18970 - DNA, 1610 bp, Homo sapiens
taggggtgtgcggctggcttgtcccgcccctgcccctgagtgacagaaccgtggacagcaacatttcccacaggacacgaagtttgtcggcccttgccttggcagagctgaggcattttggagatcaaagatgggtagaaaagatgctgctactataaaacttcctgttgatcagtacagaaaacaaattggtaaacaggattataaaaaaactaaacctattttacgagcaaccaaattaaaagcagaagcaaagaaaacagcaataggcataaagactcaccacggatgttgaccctgatctggaccaagatgaagattagctaagcaacaatcaatgcatgaaagagaaataactttacgaaagcaccttttgggaccaaaactttcaatactgaaactgtaacatctttaattctttctgctaatattttcagtttgcagacatatgatttttgatagttgcataggatgtcaggaaaagaaccttacctagcaatgcagtatagtatgtgctactggatacttttatatatctttctgctttgacagccaccctatacatggtacatttagatgaaatgggaaccagatcctaaatttttcaaatgtcattgccaatttatgtgtataattccatcacttcctgatgagtaagtctatttttgttctatatacatcataagttagtatatattcttatttacagaaacatgctcaaatcacattcagaaagaacaaaaagtcatgggaaattttttattttacaacaaagccctgctttctttctggacgtattttacatcattagagagactatctgcacatacatctaccataatctttttccttctttgccaactgttcagtgcacatgtgctgcatcagaaatggcacctggatgacagaagctcaaagagtcacatatgtctctaaaatagagttcttttcctcttgggctgtctgaactggtgtaaatagaagctcagttgatcttggttttaattaacttattactctattaatataaccttggaattctattctaattatgttgttctggctgcttgtagtatcagttcgcccctcttgttagggagatatgtaacaatctgtcatttaattgagcagtctttttcacataacagtaatagcaaaaatcctacctactcagaatcatcttcttaggttgtctcctaaatctgaacaatacagttgttttataaaattacattttgtctcttgagatttaatcaattagaactctttagggagaaaataaataatagaagaaaatatatgcctcatatttcatatgtaattatctgttgatataatttttcaatgtattttgtatttgtgggagcataatgacctgtacattcaatatttttactggtaattcaatttttaaatatgtttttacaatgcttgaacacataaaccttagaaaactggaaaatacgtgtccacagaaagagttattagctactaccttatgtaaagatgcatagaaaatgaaattgttggaaacatgtgcacaaagtgttttatattatatacattgtatttatgaagaataaataaaatattaagattgttttcctgct

SEQ ID NO: 18971 - protein, 54 aa, Homo sapiens; identical to SEQ ID NO: 4927

SEQ ID NO: 18972 - DNA, 1769 bp, Homo sapiens
ccctttgggagtaggggtgtgcggctggcttgtcccgcccctgcccctgagtgacagaaccgtggacagcaacatttcccacaggacacgaagtttgtcggcccttgccttggcagagctgagtaagaaaaatcaccaagaatattatttttggtatttggaattgaatttgccaggaatgcaagcactgctacctaactaaagaccttggctttggaaacatcttaccccttggcagctctccagagtttagacttggcagcatcaaagacacaacgcaaggtaaacaggattataaaaaaactaaacctattttacgagcaaccaaattaaaagcagaagcaaagaaaacagcaataggcataaaggaagttggccttgtacttgcagctatattggcactactactggctttctatgctttcttttatctcagactcaccacggatgttgaccctgatctggaccaagatgaagattagctaagcaacaatcaatgcatgaaagagaaataactttacgaaagcaccttttgggaccaaaactttcaatactgaaactgtaacatctttaattctttctgctaatattttcagtttgcagacatatgatttttgatagttgcataggatgtcaggaaaagaaccttacctagcaatgcagtatagtatgtgctactggatacttttatatatctttctgctttgacagccaccctatacatggtacatttagatgaaatgggaaccagatcctaaatttttcaaatgtcattgccaatttatgtgtataattccatcacttcctgatgagtaagtctatttttgttctatatacatcataagttagtatatattcttatttacagaaacatgctcaaatcacattcagaaagaacaaaaagtcatgggaaattttttattttacaacaaagccctgctttctttctggacgtattttacatcattagagagactatctgcacatacatctaccataatctttttccttctttgccaactgttcagtgcacatgtgctgcatcagaaatggcacctggatgacagaagctcaaagagtcacatatgtctctaaaatagagttcttttcctcttgggctgtctgaactggtgtaaatagaagctcagttgatcttggttttaattaacttattactctattaatataaccttggaattctattctaattatgttgttctggctgcttgtagtatcagttcgcccctcttgttagggagatatgtaacaatctgtcatttaattgagcagtctttttcacataacagtaatagcaaaaatcctacctactcagaatcatcttcttaggttgtctcctaaatctgaacaatacagttgttttataaaattacattttgtctcttgagatttaatcaattagaactctttagggagaaaataaataatagaagaaaatatatgcctcatatttcatatgtaattatctgttgatataatttttcaatgtattttgtatttgtgggagcataatgacctgtacattcaatatttttactggtaattcaatttttaaatatgtttttacaatgcttgaacacataaaccttagaaaactggaaaatacgtgtccacagaaagagttattagctactaccttatgtaaagatgcatagaaaatgaaattgttggaaacatgtgcacaaagtgttttatattatatacattgtatttatgaagaataaataaaatattaagattgttttcctgct

SEQ ID NO: 18973 - protein, 63 aa, Homo sapiens; identical to SEQ ID NO: 18917

SEQ ID NO: 18974 - DNA, 1866 bp, Homo sapiens
ctcttttccgcctcaccctttgggagtaggggtgtgcggctggcttgtcccgcccctgcccctgagtgacagaaccgtggacagcaacatttcccacaggacacgaagtttgtcggcccttgccttggcagagctgagtaagaaaaatcaccaagaatattatttttggtatttggaattgaatttgccaggaatgcaagcactgctacctaactaaagaccttggctttggaaacatcttaccccttggcagctctccagagtttagacttggcagcatcaaagacacaacgcaagcaggcattttggagatcaaagatgggtagaaaagatgctgctactataaaacttcctgttgatcagtacagaaaacaaattggtaaacaggattataaaaaaactaaacctattttacgagcaaccaaattaaaagcagaagcaaagaaaacagcaataggcataaaggaagttggccttgtacttgcagctatattggcactactactggctttctatgctttcttttatctcagactcaccacggatgttgaccctgatctggaccaagatgaagattagctaagcaacaatcaatgcatgaaagagaaataactttacgaaagcaccttttgggaccaaaactttcaatactgaaactgtaacatctttaattctttctgctaatattttcagtttgcagacatatgatttttgatagttgcataggatgtcaggaaaagaaccttacctagcaatgcagtatagtatgtgctactggatacttttatatatctttctgctttgacagccaccctatacatggtacatttagatgaaatgggaaccagatcctaaatttttcaaatgtcattgccaatttatgtgtataattccatcacttcctgatgagtaagtctatttttgttctatatacatcataagttagtatatattcttatttacagaaacatgctcaaatcacattcagaaagaacaaaaagtcatgggaaattttttattttacaacaaagccctgctttctttctggacgtattttacatcattagagagactatctgcacatacatctaccataatctttttccttctttgccaactgttcagtgcacatgtgctgcatcagaaatggcacctggatgacagaagctcaaagagtcacatatgtctctaaaatagagttcttttcctcttgggctgtctgaactggtgtaaatagaagctcagttgatcttggttttaattaacttattactctattaatataaccttggaattctattctaattatgttgttctggctgcttgtagtatcagttcgcccctcttgttagggagatatgtaacaatctgtcatttaattgagcagtctttttcacataacagtaatagcaaaaatcctacctactcagaatcatcttcttaggttgtctcctaaatctgaacaatacagttgttttataaaattacattttgtctcttgagatttaatcaattagaactctttagggagaaaataaataatagaagaaaatatatgcctcatatttcatatgtaattatctgttgatataatttttcaatgtattttgtatttgtgggagcataatgacctgtacattcaatatttttactggtaattcaatttttaaatatgtttttacaatgcttgaacacataaaccttagaaaactggaaaatacgtgtccacagaaagagttattagctactaccttatgtaaagatgcatagaaaatgaaattgttggaaacatgtgcacaaagtgttttatattatatacattgtatttatgaagaataaataaaatattaagattgttttcctgct

SEQ ID NO: 18975 - protein, 86 aa, Homo sapiens; identical to SEQ ID NO: 4925

SEQ ID NO: 18976 - DNA, 639 bp, Homo sapiens
ccgcctcaccctttgggagtaggggtgtgcggctggcttgtcccgcccctgcccctgagtgacagaaccgtggacagcaacatttcccacaggacacgaagtttgtcggcccttgccttggcagagctgagtaagaaaaatcaccaagaatattatttttggtatttggaattgaatttgccaggaatgcaagcactgctacctaactaaagaccttggctttggaaacatcttaccccttggcagctctccagagtttagacttggcagcatcaaagacacaacgcaaggtagtgaatgaataaagtattgacttctgaagtgttatctctgctgggatgttggcttaaatgactagaaaggaattgggggaagcataatgagtaaccattttggcagatagcctcagtgatttgctttaagaaaaaattaagcatagtctgtaaaggcaaaaaacaaaactaaattgaaaagggaataatatcttgagtgtttattcatttaatccaacttctctcctaaaatggagtggtatcttccctagccacacacaattaagattaaaataacttgattcctatttacaattaataaatgcaaaatactatgcaaataggattgctatatgaataaattata

SEQ ID NO: 18977 - protein, 41 aa, Homo sapiens
ICQECKHCYLTKDLGFGNILPLGSSPEFRLGSIKDTTQGSE

SEQ ID NO: 18978 - DNA, 1868 bp, Homo sapiens
cctgcttcctcttattaatgaacgagtatttgcataccaaaacatttgcagagaagagattcagacaggattaggtggctttatcggtggtggtgaggttgtggggcgggggtatttttcttggagcttggtgtattcctgaatccatcagatgttggtgtccgcgtggatgactaggaaaaggggattggagattaggtttcttctacttggagttctctgctgcttgtttgagcttaataagcctcctgaagaagttgaagcaatttattgctagaggagccccaatgtataatctccctttcattctctactgtggagaggtgtgctaaacctgtagagctgtttttgcttcactcggctcatacttaatgatcaacaagtatggtgtgagatggtaacctcagataaccattttaaatctgcctttgtttgctcatatactctgtctcctaatgattcagcacaacaaacattccagagagaaaaaacaaaagagtttctggaggctgctcacattccttggcttatggcctccttcttccaacgtcaaagccagcaacattgcagcaatctgacttattttgttgtcatgtctcctgaccacatctggaagggttatctacttttgaagacacatccagataattcaggacaatctgtccattttgaggttcttcattgaatcatgtctgcaaagtcccttctgcaatctaagtaagaaaaatcaccaagaatattatttttggtatttggaattgaatttgccaggaatgcaagcactgctacctaactaaagaccttggctttggaaacatcttaccccttggcagctctccagagtttagacttggcagcatcaaagacacaacgcaaggtgtgtttatttgatttaacattttgcaaaaggtgttttgatttgtggtttgttttctttcactttgtacttattgctttgggttgtttttttctggcaatgaacctgggttccaagcataggtttttcttatggaaggcagttttacaataaggaaatgtttttacttgtatttattttgtgatatttcagcaaatccaaataaatgtagtaacatttataaagctatacatttataactgatttatttgttaaatatttagtattatcaattgtctgttaaagatttgttgctacattaaatgcttggtctgtcttgatgttcagtacattattatactttggtatattgcaatattttgataattatgtattggttttagtcactgttcctgcatattaagtaataaacagattaatatcatcataaaatatcatttactcagcaatatttcttagtaaattgatacatccatttttcttatgtattgtggagagaggaaatatgacataaaatggaagaatatgggcctctgtttatctctgacctcatcgcttactgttctttcccactcctcactctactcaaagcctttaaatagctctccattttactcaacatcaaatctaaataaagctcttaaactggtctaaatgtctctacagtacttgaacctttgttatttctctaatttcatcttcaactctgctcatcgttattctcttgccctgggcatactgcctccctttttgttctctgaacgtgccaggcattttctcatctcagaatttttgcacttgctattctttctactgaattgctcttcatccatatatagcaattgtatgaccaatttccttacttttcttttggtcgttattaaaatttcaccttctaaatggagtcttacctgatgaccatccaaagctttatattctttctttgctctataatttttatcactatctattaaactatatatttacactt

SEQ ID NO: 18979 - protein, 96 aa, Homo sapiens
MVTSDNHFKSAFVCSYTLSPNDSAQQTFQREKTKEFLEAAHIPWLMASFFQRQSQQHCSNLTYFVVMSPDHIWKGYLLLKTHPDNSGQSVHFEVLH

SEQ ID NO: 18980 - DNA, 380 bp, Homo sapiens
gaagaatcatatcttattcagtacttcaatttagacagcaaatcctccctcttcttcccaagcaatgagcctgaggggagaaaccttgactctccagttgaccactgtgtctctcgacacacggcatatggtgaaacggtgtgatgagaggcatggaaggccattacctcattcacaggaatctcagcatggctctgcaacttcaaagaaggcagttcggggaacagcagacacagctcctttggaaagaatatctgccgcccgaggatgggctctgcctatggaggcaacagtgagtgtcttcagagcccatcagtggcagtggaattaatgaagaaagcaatggcaggaaaagttgaataaagcagacccttcatggt

SEQ ID NO: 18981 - protein, 88 aa, Homo sapiens
MSLRGETLTLQLTTVSLDTRHMVKRCDERHGRPLPHSQESQHGSATSKKAVRGTADTAPLERISAARGWALPMEATVSVFRAHQWQWN

SEQ ID NO: 18982 - DNA, 438 bp, Homo sapiens
atcaaagcaacaagaagctagggcagaggatttagagggcaagcaagcatgggccaggactttgacagcattcatccagcagcatgcgaactccaaagagaacccgatctccaaagacaaaagtgagcctgaggggagaaaccttgactctccagttgaccactgtgtctctcgacacacggcatatggtgaaacggtgtgatgagaggcatggaaggccattacctcattcacaggaatctcagcatggctctgcaacttcaaagaaggcagttcggggaacagcagacacagctcctttggaaagaatatctgccgcccgaggatgggctctgcctatggaggcaacagtgagtgtcttcagagcccatcagtggcagtggaattaatgaagaaagcaatggcaggaaaagttgaataaagcagacccttcatggt

SEQ ID NO: 18983 - protein, 101 aa, Homo sapiens; identical to SEQ ID NO: 2308

SEQ ID NO: 18984 - DNA, 441 bp, Homo sapiens
ggttgcagtgagctgagatcatgccactgcactccagcctgggtgacagagcaagactgcatctcaaaaacaaaaaggtggggaaggaaaggagtgaagagtactagtgccttaggtctgtggggtggggcaattgggattaatggtgggtatggtgatgttctccacatgattatggctgcaacagaaccagatggtaagggtggcctttgaccaacaaggctgatacacaacgcttatgcattccacacctcagattttattgcccttttccttctctcttcttgtcacatacttttggttgcttctctcccccaccttcttttctgtccctttctcttgatttttcttctttttaaaaaattttttatttttatttttgagactgagtcttactctgttgcccaggtccagcctgggaaacaggagccaaactccatc

SEQ ID NO: 18985 - protein, 34 aa, Homo sapiens
MHSTPQILLPFSFSLLVTYFWLLLSPTFFSVPFS

SEQ ID NO: 18986 - DNA, 3758 bp, Homo sapiens
atacaaaaagggcaggcctcctgcgccctccttcccaccccccttcctgccctgggcgtggagcaccgaccaggtgtgggcttgggtggttggttaccgccttttgcactagcagtagcaaggaaggggggtgggcgctctttctttttctcttagaagagggtttagcacaggttttttcgttctcacttccacaccaccttaccgcctcccgaccccccctctccccctccccacctatcgtcatgacggcctctccggattacttggtggtgctttttgggatcactgctggggccaccggggccaagctaggctcggatgagaaggagttgatcctgctgttctggaaagtcgtggatctggccaacaagaaggtgggacagttgcacgaagtgctagttagaccggatcagttggaactgacggaggactgcaaagaagaaactaaaatagacgtcgaaagcctgtcctcggcgtcgcagctggaccaagccctccgacagtttaaccagtcagtgagcaatgaactgaatattggagtagggacttccttctgtctctgtactgatgggcagcttcatgtcaggcaaatcctgcatcctgaggcttccaagaagaatgtactattacctgaatgcttctattccttttttgatcttcgaaaagaattcaagaaatgttgccctggttcacctgatattgacaaactggacgttgccacaatgacagagtatttaaattttgagaagagtagttcagtctctcgatatggagcctctcaagttgaagatatggggaatataattttagcaatgatttcagagccttataatcacaggttttcagatccagagagagtgaattacaagtttgaaagtggaacttgcagcaagatggaacttattgatgataacaccgtagtcagggcacgaggtttaccatggcagtcttcagatcaagatattgcaagattcttcaaaggactcaatattgccaagggaggtgcagcactttgtctgaatgctcagggtcgaaggaacggagaagctctggttaggtttgtaagtgaggagcaccgagacctagcactacagaggcacaaacatcacatggggacccggtatattgaggtttacaaagcaacaggtgaagatttccttaaaattgctggtggtacttccaatgaggtagcccagtttctctccaaggaaaatcaagtcattgtccgcatgcgggggctccctttcacggccacagctgaagaagtggtggccttctttggacagcattgccctattactgggggaaaggaaggcatcctctttgtcacctacccagatggtaggccaacaggggacgcttttgtcctctttgcctgtgaggaatatgcacagaatgcgttgaggaagcataaagacttgttgggtaaaagatacattgaactcttcaggagcacagcagctgaagttcagcaggtgctgaatcgattctcctcggcccctctcattccacttccaacccctcccattattccagtactacctcagcaatttgtgccccctacaaatgttagagactgtatacgccttcgaggtcttccctatgcagccacaattgaggacatcctggatttcctgggggagttcgccacagatattcgtactcatggggttcacatggttttgaatcaccagggccgcccatcaggagatgcctttatccagatgaagtctgcggacagagcatttatggctgcacagaagtgtcataaaaaaaacatgaaggacagatatgttgaagtctttcagtgttcagctgaggagatgaactttgtgttaatggggggcactttaaatcgaaatggcttatccccaccgccatgtaagttaccatgcctgtctcctccctcctacacatttccagctcctgctgcagttattcctacagaagctgccatttaccagccctctgtgattttgaatccacgagcactgcagccctccacagcgtactacccagcaggcactcagctcttcatgaattacacagcgtactatcccagccccccaggttcgcctaatagtcttggctacttccctacagctgctaatcttagcggtgtccctccacagcctggcacggtggtcagaatgcagggcctggcctacaatactggagttaaggaaattcttaacttcttccaaggttaccagtgtttgaaagatgtatggtgatcttgaaacctccagacacaagaaaacttctagcaaattcaggggaagtttgtctacactcaggctgcagtattttcagcaaacttgattggacaaacgggcctgtgccttatcttttggtggagtgaaaaaatttgagctagtgaagccaaatcgtaacttacagcaagcagcatgcagcatacctggctctttgctgattgcaaataggcatttaaaatgtgaatttggaatcagatgtctccattacttccagttaaagtggcatcataggtgtttcctaagttttaagtcttggataaaaactccaccagtgtctaccatctccaccatgaactctgttaaggaagcttcatttttgtatattcccgctcttttctcttcatttccctgtcttctgcataatcatgccttcttgctaagtaattcaagcataagatcttggaataataaaatcacaatcttaggagaaagaataaaattgttattttcccagtctcttggccatgatgatatcttatgattaaaaacaaattaaattttaaaacacctgaagataaattagaagaaattgtgcaccctccacaaaacatacaaagtttaaaagtttggatctttttctcagcaggtatcagttgtaaataatgaattaggggccaaaatgcaaaacgaaaaatgaagcagctacatgtagttagtaatttctagtttgaactgtaattgaatattgtggcttcatatgtattattttatattgtacttttttcattattgatggtttggactttaataagagaaattccatagtttttaatatcccagaagtgagacaatttgaacagtgtattctagaaaacaatacactaactgaacagaagtgaatgcttatatatattatgatagccttaaacctttttcctctaatgccttaactgtcaaataattataaccttttaaagcataggactatagtcagcatgctagactgagaggtaaacactgatgcaattagaacaggtactgatgctgtcagtgtttaacactatgtttagctgtgtttatgctataaaagtgcaatattagacactagctagtactgctgcctcatgtaactccaaagaaaacaggatttcattaagtgcattgaatgtggatatttctctaagttactcatattgtcctttgcttgaatgcaatgccgtgcagatttatgaggctgctatttttattttctgtgcattactttaacaccttaaagggagaagcaaacatttccttcttcagctgactggcaatggccctttaactgcaataggaagaaaaaaaaaaaggtttgtgtgaaaattggtgataactggcacttaagatcgaaaagaaatttctgtatacttgatgccttaagatgcccaaagctgcccaaagctctgaaagactttaagataggcagtaatgcttactacaatactactgagtttttgtagagttaacatttgataataaaacttgcctgtttaatctcaa

SEQ ID NO: 18987 - protein, 663 aa, Homo sapiens
MTASPDYLVVLFGITAGATGAKLGSDEKELILLFWKVVDLANKKVGQLHEVLVRPDQLELTEDCKEETKIDVESLSSASQLDQALRQFNQSVSNELNIGVGTSFCLCTDGQLHVRQILHPEASKKNVLLPECFYSFFDLRKEFKKCCPGSPDIDKLDVATMTEYLNFEKSSSVSRYGASQVEDMGNIILAMISEPYNHRFSDPERVNYKFESGTCSKMELIDDNTVVRARGLPWQSSDQDIARFFKGLNIAKGGAALCLNAQGRRNGEALVRFVSEEHRDLALQRHKHHMGTRYIEVYKATGEDFLKIAGGTSNEVAQFLSKENQVIVRMRGLPFTATAEEVVAFFGQHCPITGGKEGILFVTYPDGRPTGDAFVLFACEEYAQNALRKHKDLLGKRYIELFRSTAAEVQQVLNRFSSAPLIPLPTPPIIPVLPQQFVPPTNVRDCIRLRGLPYAATIEDILDFLGEFATDIRTHGVHMVLNHQGRPSGDAFIQMKSADRAFMAAQKCHKKNMKDRYVEVFQCSAEEMNFVLMGGTLNRNGLSPPPCKLPCLSPPSYTFPAPAAVIPTEAAIYQPSVILNPRALQPSTAYYPAGTQLFMNYTAYYPSPPGSPNSLGYFPTAANLSGVPPQPGTVVRMQGLAYNTGVKEILNFFQGYQCLKDVW

SEQ ID NO: 18988 - DNA, 2484 bp, Homo sapiens
cttttgcactagcagtagcaaggaaggggggtgggcgctctttctttttctcttagaagagggtttagcacaggttttttcgttctcacttccacaccaccttaccgcctcccgaccccccctctccccctccccacctatcgtcatgacggcctctccggattacttggtggtgctttttgggatcactgctggggccaccggggccaagctaggctcggatgagaaggagttgatcctgctgttctggaaagtcgtggatctggccaacaagaaggtgggacagttgcacgaagtgctagttagaccggatcagttggaactgacggaggactgcaaagaagaaactaaaatagacgtcgaaagcctgtcctcggcgtcgcagctggaccaagccctccgacagtttaaccagtcagtgagcaatgaactgaatattggagtagggacttccttctgtctctgtactgatgggcagcttcatgtcaggcaaatcctgcatcctgaggcttccaagaagaatgtactattacctgaatgcttctattccttttttgatcttcgaaaagaattcaagaaatgttgccctggttcacctgatattgacaaactggacgttgccacaatgacagagtatttaaattttgagaagagtagttcagtctctcgatatggagcctctcaagttgaagatatggggaatataattttagcaatgatttcagagccttataatcacaggttttcagatccagagagagtgaattacaagtttgaaagtggaacttgcagcaagatggaacttattgatgataacaccgtagtcagggcacgaggtttaccatggcagtcttcagatcaagatattgcaagattcttcaaaggactcaatattgccaagggaggtgcagcactttgtctgaatgctcagggtcgaaggaacggagaagctctggttaggtttgtaagtgaggagcaccgagacctagcactacagaggcacaaacatcacatggggacccggtatattgaggtttacaaagcaacaggtgaagatttccttaaaattgctggtggtacttccaatgaggtagcccagtttctctccaaggaaaatcaagtcattgtccgcatgcgggggctccctttcacggccacagctgaagaagtggtggccttctttggacagcattgccctattactgggggaaaggaaggcatcctctttgtcacctacccagatggtaggccaacaggggacgcttttgtcctctttgcctgtgaggaatatgcacagaatgcgttgaggaagcataaagacttgttgggtaaaagatacattgaactcttcaggagcacagcagctgaagttcagcaggtgctgaatcgattctcctcggcccctctcattccacttccaacccctcccattattccagtactacctcagcaatttgtgccccctacaaatgttagagactgtatacgccttcgaggtcttccctatgcagccacaattgaggacatcctggatttcctgggggagttcgccacagatattcgtactcatggggttcacatggttttgaatcaccagggccgcccatcaggagatgcctttatccagatgaagtctgcggacagagcatttatggctgcacagaagtgtcataaaaaaaacatgaaggacagatatgttgaagtctttcagtgttcagctgaggagatgaactttgtgttaatggggggcactttaaatcgaaatggcttatccccaccgccatgtaagttaccatgcctgtctcctccctcctacacatttccagctcctgctgcagttattcctacagaagctgccatttaccagccctctgtgattttgaatccacgagcactgcagccctccacagcgtactacccagcaggcactcagctcttcatgaattacacagcgtactatcccagtgtttgaaagatgtatggtgatcttgaaacctccagacacaagaaaacttctagcaaattcaggggaagtttgtctacactcaggctgcagtattttcagcaaacttgattggacaaacgggcctgtgccttatcttttggtggagtgaaaaaatttgagctagtgaagccaaatcgtaacttacagcaagcagcatgcagcatacctggctctttgctgattgcaaataggcatttaaaatgtgaatttggaatcagatgtctccattacttccagttaaagtggcatcataggtgtttcctaagttttaagtcttggataaaaactccaccagtgtctaccatctccaccatgaactctgttaaggaagcttcatttttgtatattcccgctcttttctcttcatttccctgtcttctgcataatcatgccttcttgctaagtaattcaagcataagatcttggaataataaaatcacaatcttaggagaaagaataaaattgttattttcccagtc

SEQ ID NO: 18989 - protein, 608 aa, Homo sapiens
MTASPDYLVVLFGITAGATGAKLGSDEKELILLFWKVVDLANKKVGQLHEVLVRPDQLELTEDCKEETKIDVESLSSASQLDQALRQFNQSVSNELNIGVGTSFCLCTDGQLHVRQILHPEASKKNVLLPECFYSFFDLRKEFKKCCPGSPDIDKLDVATMTEYLNFEKSSSVSRYGASQVEDMGNIILAMISEPYNHRFSDPERVNYKFESGTCSKMELIDDNTVVRARGLPWQSSDQDIARFFKGLNIAKGGAALCLNAQGRRNGEALVRFVSEEHRDLALQRHKHHMGTRYIEVYKATGEDFLKIAGGTSNEVAQFLSKENQVIVRMRGLPFTATAEEVVAFFGQHCPITGGKEGILFVTYPDGRPTGDAFVLFACEEYAQNALRKHKDLLGKRYIELFRSTAAEVQQVLNRFSSAPLIPLPTPPIIPVLPQQFVPPTNVRDCIRLRGLPYAATIEDILDFLGEFATDIRTHGVHMVLNHQGRPSGDAFIQMKSADRAFMAAQKCHKKNMKDRYVEVFQCSAEEMNFVLMGGTLNRNGLSPPPCKLPCLSPPSYTFPAPAAVIPTEAAIYQPSVILNPRALQPSTAYYPAGTQLFMNYTAYYPSV

SEQ ID NO: 18990 - DNA, 2745 bp, Homo sapiens
cttttgcactagcagtagcaaggaaggggggtgggcgctctttctttttctcttagaagagggtttagcacaggttttttcgttctcacttccacaccaccttaccgcctcccgaccccccctctccccctccccacctatcgtcatgacggcctctccggattacttggtggtgctttttgggatcactgctggggccaccggggccaagctaggctcggatgagaaggagttgatcctgctgttctggaaagtcgtggatctggccaacaagaaggtgggacagttgcacgaagtgctagttagaccggatcagttggaactgacggaggactgcaaagaagaaactaaaatagacgtcgaaagcctgtcctcggcgtcgcagctggaccaagccctccgacagtttaaccagtcagtgagcaatgaactgaatattggagtagggacttccttctgtctctgtactgatgggcagcttcatgtcaggcaaatcctgcatcctgaggcttccaagaagaatgtactattacctgaatgcttctattccttttttgatcttcgaaaagaattcaagaaatgttgccctggttcacctgatattgacaaactggacgttgccacaatgacagagtatttaaattttgagaagagtagttcagtctctcgatatggagcctctcaagttgaagatatggggaatataattttagcaatgatttcagagccttataatcacaggttttcagatccagagagagtgaattacaagtttgaaagtggaacttgcagcaagatggaacttattgatgataacaccgtagtcagggcacgaggtttaccatggcagtcttcagatcaagatattgcaagattcttcaaaggactcaatattgccaagggaggtgcagcactttgtctgaatgctcagggtcgaaggaacggagaagctctggttaggtttgtaagtgaggagcaccgagacctagcactacagaggcacaaacatcacatggggacccggtatattgaggtttacaaagcaacaggtgaagatttccttaaaattgctggtggtacttccaatgaggtagcccagtttctctccaaggaaaatcaagtcattgtccgcatgcgggggctccctttcacggccacagctgaagaagtggtggccttctttggacagcattgccctattactgggggaaaggaaggcatcctctttgtcacctacccagatggtaggccaacaggggacgcttttgtcctctttgcctgtgaggaatatgcacagaatgcgttgaggaagcataaagacttgttgggtaaaagatacattgaactcttcaggagcacagcagctgaagttcagcaggtgctgaatcgattctcctcggcccctctcattccacttccaacccctcccattattccagtactacctcagcaatttgtgccccctacaaatgttagagactgtatacgccttcgaggtcttccctatgcagccacaattgaggacatcctggatttcctgggggagttcgccacagatattcgtactcatggggttcacatggttttgaatcaccagggccgcccatcaggagatgcctttatccagatgaagtctgcggacagagcatttatggctgcacagaagtgtcataaaaaaaacatgaaggacagatatgttgaagtctttcagtgttcagctgaggagatgaactttgtgttaatggggggcactttaaatcgaaatggcttatccccaccgccatgtaagttaccatgcctgtctcctccctcctacacatttccagctcctgctgcagttattcctacagaagctgccatttaccagccctctgtgattttgaatccacgagcactgcagccctccacagcgtactacccagcaggcactcagctcttcatgaattacacagcgtactatcccagccccccaggttcgcctaatagtcttggctacttccctacagctgctaatcttagcggtgtccctccacagcctggcacggtggtcagaatgcagggcctggcctacaatactggagttaaggaaattcttaacttcttccaaggttaccagtatgcaaccgaggatggacttatacacacaaatgaccaggccaggactctacccaaagaatgggtttgtatttaagggccccagcagttagaacatcctcagaaaagaagtgtttgaaagatgtatggtgatcttgaaacctccagacacaagaaaacttctagcaaattcaggggaagtttgtctacactcaggctgcagtattttcagcaaacttgattggacaaacgggcctgtgccttatcttttggtggagtgaaaaaatttgagctagtgaagccaaatcgtaacttacagcaagcagcatgcagcatacctggctctttgctgattgcaaataggcatttaaaatgtgaatttggaatcagatgtctccattacttccagttaaagtggcatcataggtgtttcctaagttttaagtcttggataaaaactccaccagtgtctaccatctccaccatgaactctgttaaggaagcttcatttttgtatattcccgctcttttctcttcatttccctgtcttctgcataatcatgccttcttgctaagtaattcaagcataagatcttggaataataaaatcacaatcttaggagaaagaataaaattgttattttcccagtc

SEQ ID NO: 18991 - protein, 681 aa, Homo sapiens; identical to SEQ ID NO: 2312

SEQ ID NO: 18992 - DNA, 2690 bp, Homo sapiens
cttttgcactagcagtagcaaggaaggggggtgggcgctctttctttttctcttagaagagggtttagcacaggttttttcgttctcacttccacaccaccttaccgcctcccgaccccccctctccccctccccacctatcgtcatgacggcctctccggattacttggtggtgctttttgggatcactgctggggccaccggggccaagctaggctcggatgagaaggagttgatcctgctgttctggaaagtcgtggatctggccaacaagaaggtgggacagttgcacgaagtgctagttagaccggatcagttggaactgacggaggactgcaaagaagaaactaaaatagacgtcgaaagcctgtcctcggcgtcgcagctggaccaagccctccgacagtttaaccagtcagtgagcaatgaactgaatattggagtagggacttccttctgtctctgtactgatgggcagcttcatgtcaggcaaatcctgcatcctgaggcttccaagaagaatgtactattacctgaatgcttctattccttttttgatcttcgaaaagaattcaagaaatgttgccctggttcacctgatattgacaaactggacgttgccacaatgacagagtatttaaattttgagaagagtagttcagtctctcgatatggagcctctcaagttgaagatatggggaatataattttagcaatgatttcagagccttataatcacaggttttcagatccagagagagtgaattacaagtttgaaagtggaacttgcagcaagatggaacttattgatgataacaccgtagtcagggcacgaggtttaccatggcagtcttcagatcaagatattgcaagattcttcaaaggactcaatattgccaagggaggtgcagcactttgtctgaatgctcagggtcgaaggaacggagaagctctggttaggtttgtaagtgaggagcaccgagacctagcactacagaggcacaaacatcacatggggacccggtatattgaggtttacaaagcaacaggtgaagatttccttaaaattgctggtggtacttccaatgaggtagcccagtttctctccaaggaaaatcaagtcattgtccgcatgcgggggctccctttcacggccacagctgaagaagtggtggccttctttggacagcattgccctattactgggggaaaggaaggcatcctctttgtcacctacccagatggtaggccaacaggggacgcttttgtcctctttgcctgtgaggaatatgcacagaatgcgttgaggaagcataaagacttgttgggtaaaagatacattgaactcttcaggagcacagcagctgaagttcagcaggtgctgaatcgattctcctcggcccctctcattccacttccaacccctcccattattccagtactacctcagcaatttgtgccccctacaaatgttagagactgtatacgccttcgaggtcttccctatgcagccacaattgaggacatcctggatttcctgggggagttcgccacagatattcgtactcatggggttcacatggttttgaatcaccagggccgcccatcaggagatgcctttatccagatgaagtctgcggacagagcatttatggctgcacagaagtgtcataaaaaaaacatgaaggacagatatgttgaagtctttcagtgttcagctgaggagatgaactttgtgttaatggggggcactttaaatcgaaatggcttatccccaccgccatgtaagttaccatgcctgtctcctccctcctacacatttccagctcctgctgcagttattcctacagaagctgccatttaccagccctctgtgattttgaatccacgagcactgcagccctccacagcgtactacccagcaggcactcagctcttcatgaattacacagcgtactatcccagccccccaggttcgcctaatagtcttggctacttccctacagctgctaatcttagcggtgtccctccacagcctggcacggtggtcagaatgcagggcctggcctacaatactggagttaaggaaattcttaacttcttccaaggttaccagtgtttgaaagatgtatggtgatcttgaaacctccagacacaagaaaacttctagcaaattcaggggaagtttgtctacactcaggctgcagtattttcagcaaacttgattggacaaacgggcctgtgccttatcttttggtggagtgaaaaaatttgagctagtgaagccaaatcgtaacttacagcaagcagcatgcagcatacctggctctttgctgattgcaaataggcatttaaaatgtgaatttggaatcagatgtctccattacttccagttaaagtggcatcataggtgtttcctaagttttaagtcttggataaaaactccaccagtgtctaccatctccaccatgaactctgttaaggaagcttcatttttgtatattcccgctcttttctcttcatttccctgtcttctgcataatcatgccttcttgctaagtaattcaagcataagatcttggaataataaaatcacaatcttaggagaaagaataaaattgttattttcccagtctcttggccatgatgatatcttatgattaaaaacaaattaaattttaaaacacctg

SEQ ID NO: 18993 - protein, 663 aa, Homo sapiens; identical to SEQ ID NO: 18987

SEQ ID NO: 18994 - DNA, 3507 bp, Homo sapiens
cttttgcactagcagtagcaaggaaggggggtgggcgctctttctttttctcttagaagagggtttagcacaggttttttcgttctcacttccacaccaccttaccgcctcccgaccccccctctccccctccccacctatcgtcatgacggcctctccggattacttggtggtgctttttgggatcactgctggggccaccggggccaagctaggctcggatgagaaggagttgatcctgctgttctggaaagtcgtggatctggccaacaagaaggtgggacagttgcacgaagtgctagttagaccggatcagttggaactgacggaggactgcaaagaagaaactaaaatagacgtcgaaagcctgtcctcggcgtcgcagctggaccaagccctccgacagtttaaccagtcagtgagcaatgaactgaatattggagtagggacttccttctgtctctgtactgatgggcagcttcatgtcaggcaaatcctgcatcctgaggcttccaagaagaatgtactattacctgaatgcttctattccttttttgatcttcgaaaagaattcaagaaatgttgccctggttcacctgatattgacaaactggacgttgccacaatgacagagtatttaaattttgagaagagtagttcagtctctcgatatggagcctctcaagttgaagatatggggaatataattttagcaatgatttcagagccttataatcacaggttttcagatccagagagagtgaattacaagtttgaaagtggaacttgcagcaagatggaacttattgatgataacaccgtagtcagggcacgaggtttaccatggcagtcttcagatcaagatattgcaagattcttcaaaggactcaatattgccaagggaggtgcagcactttgtctgaatgctcagggtcgaaggaacggagaagctctggttaggtttgtaagtgaggagcaccgagacctagcactacagaggcacaaacatcacatggggacccggtatattgaggtttacaaagcaacaggtgaagatttccttaaaattgctggtggtacttccaatgaggtagcccagtttctctccaaggaaaatcaagtcattgtccgcatgcgggggctccctttcacggccacagctgaagaagtggtggccttctttggacagcattgccctattactgggggaaaggaaggcatcctctttgtcacctacccagatggtaggccaacaggggacgcttttgtcctctttgcctgtgaggaatatgcacagaatgcgttgaggaagcataaagacttgttgggtaaaagatacattgaactcttcaggagcacagcagctgaagttcagcaggtgctgaatcgattctcctcggcccctctcattccacttccaacccctcccattattccagtactacctcagcaatttgtgccccctacaaatgttagagactgtatacgccttcgaggtcttccctatgcagccacaattgaggacatcctggatttcctgggggagttcgccacagatattcgtactcatggggttcacatggttttgaatcaccagggccgcccatcaggagatgcctttatccagatgaagtctgcggacagagcatttatggctgcacagaagtgtcataaaaaaaacatgaaggacagatatgttgaagtctttcagtgttcagctgaggagatgaactttgtgttaatggggggcactttaaatcgaaatggcttatccccaccgccatgtaagttaccatgcctgtctcctccctcctacacatttccagctcctgctgcagttattcctacagaagctgccatttaccagccctctgtgattttgaatccacgagcactgcagccctccacagcgtactacccagcaggcactcagctcttcatgaattacacagcgtactatcccagtgtttgaaagatgtatggtgatcttgaaacctccagacacaagaaaacttctagcaaattcaggggaagtttgtctacactcaggctgcagtattttcagcaaacttgattggacaaacgggcctgtgccttatcttttggtggagtgaaaaaatttgagctagtgaagccaaatcgtaacttacagcaagcagcatgcagcatacctggctctttgctgattgcaaataggcatttaaaatgtgaatttggaatcagatgtctccattacttccagttaaagtggcatcataggtgtttcctaagttttaagtcttggataaaaactccaccagtgtctaccatctccaccatgaactctgttaaggaagcttcatttttgtatattcccgctcttttctcttcatttccctgtcttctgcataatcatgccttcttgctaagtaattcaagcataagatcttggaataataaaatcacaatcttaggagaaagaataaaattgttattttcccagtctcttggccatgatgatatcttatgattaaaaacaaattaaattttaaaacacctgaagataaattagaagaaattgtgcaccctccacaaaacatacaaagtttaaaagtttggatctttttctcagcaggtatcagttgtaaataatgaattaggggccaaaatgcaaaacgaaaaatgaagcagctacatgtagttagtaatttctagtttgaactgtaattgaatattgtggcttcatatgtattattttatattgtacttttttcattattgatggtttggactttaataagagaaattccatagtttttaatatcccagaagtgagacaatttgaacagtgtattctagaaaacaatacactaactgaacagaagtgaatgcttatatatattatgatagccttaaacctttttcctctaatgccttaactgtcaaataattataaccttttaaagcataggactatagtcagcatgctagactgagaggtaaacactgatgcaattagaacaggtactgatgctgtcagtgtttaacactatgtttagctgtgtttatgctataaaagtgcaatattagacactagctagtactgctgcctcatgtaactccaaagaaaacaggatttcattaagtgcattgaatgtggatatttctctaagttactcatattgtcctttgcttgaatgcaatgccgtgcagatttatgaggctgctatttttattttctgtgcattactttaacaccttaaagggagaagcaaacatttccttcttcagctgactggcaatggccctttaactgcaataggaagaaaaaaaaaaaggtttgtgtgaaaattggtgataactggcacttaagatcgaaaagaaatttctgtatacttgatgccttaagatgcccaaagctgcccaaagctctgaaagactttaagataggcagtaatgcttactacaatactactgagtttttgtagagttaacatttgataataaaacttgcctgtttaatctcaa

SEQ ID NO: 18995 - protein, 608 aa, Homo sapiens; identical to SEQ ID NO: 18989

SEQ ID NO: 18996 - DNA, 519 bp, Homo sapiens
gtggttttgttttctctttttgggcttttcacccccttctctacctcagaagagggtttcagttttccagtgactcataccttagctagggcagaaaagtatttagaagggctttctatttgggtcctctctgattatcagtgcaaaatcagttacctcacatcttttctctttcattacatcaagccctactttttcttctgacctctcatttttctcagaaaagaatattctcctttgcatcaaagctgttgcataggtgggagacatgctgattcttcaaagactgaatgacatacataccttctatgcatctcttgcttttcgtacgacattataaattacaagtaacatcaacttttttgtctttgttttttgagatgtagtctggctctatcacccagggcagagtgcagtggcgctaccatggctcactgcagccttgatcctggagattgaagctgcaatgagctgtgatcgtgctcattgtggtgtgggagacagcacaagcctgtcttt

SEQ ID NO: 18997 - protein, 31 aa, Homo sapiens
MTYIPSMHLLLFVRHYKLQVTSTFLSLFFEM

SEQ ID NO: 18998 - DNA, 2951 bp, Homo sapiens
ggaagtgggggcgcggcggccaggagcgggcccccggaggccgaggggttcggcgacgcggagggagggagagtctgggccgcgcgggagccgcagggcgccctagccttcgcagaaacgatggcggaggaagaaggaccacctgtagagctgcgccaaagaaaaaagccaaagtcttcagaaaataaggaatctgccaaagaagagaaaatcagtgacattccaattcctgaaagagctccaaaacatgtattatttcaacgctttgcaaagattttcattggctgtcttgcagcggttactagtggtatgatgtatgctctctacttatcagcataccatgaacggaaattctggttttccaacaggcaggagcttgaacgggaaatcacgtttcagggtgacagtgccatttattactcctattataaagatatgttaaaggcaccttcatttgaaagaggtgtttacgaactgacacacaataacaaaactgtatctctgaagactataaatgcagtgcagcaaatgtctctgtatccggaacttattgctagcattttatatcaagccactggtagcaatgagattattgagccagtgtatttctatattggcattgtttttggattgcaaggaatatatgttactgctttatttgttacaagttggcttatgagtggaacatggctagcaggaatgcttactgttgcgtggttcgttattaacagggtagatacaacaagaattgaatactccattcctttaagagaaaactgggcactaccatattttgcatgccaaattgctgcacttacaggctatttaaaaagcaacttaaatacttatggagagaggttttgctacttgttgatgagtgcttcaacttacacatttatgatgatgtgggagtatagccactatctcctgtttcttcaagcaatatctctattcctgctagataccttttcagtggagcaaagtgacaaggtttatgaagtttataaaatctacatattttccctctttctgggatatttactacagtttgagaatccagctttgttggtatctcctttattaagtttagtagcagccttaatgcttgctaagtgccttcagctgaatgtgaagaaaggaagttttgtagctaaaataataaaagtgattaatttttacttggtgtgtactctgacaataacattgaatattataatgaagatgtttgtcccacacaaagaaaatgggcacatgctgaaattccttgaagtaaaatttggactaaatatgaccaagaattttacaatgaattggctcctctgtcaagaatccctgcaggcaccatctcaagatttttttctgcgattgacacagtcttctttattacctttctacattctagtgttaattatttgttttctttctatgttgcaagttatttttaggaggattaatggtaagtccctgaaggaaactgttactcttgaagatggacgaattggagaaagaccagaaataatttatcatgtaattcacactattttattgggttctcttgcaatggttatagaaggcttgaagtacatctggattccttatgtgtgcatgttagcagcatttggtgtatgttctcccgaactttggatgacacttttcaagtggcttcgattaagaactgtacacccaatattgttggctcttattctgagcatggccgtgcctactataataggtctcagcttatggaaagagttttttcccagattaatgacagaattaatggaactacaggaattctatgacccagatacagtggaacttatgacctggataaaaaggcaagctccagttgcagctgtgtttgcagggagtccacagttaatgggtgcgattaaattatgcactggatggatggtgacaagtttgcctctttacaatgatgatgatcttctcaagagaaatgaaaatatctaccaaatctattcaaagcgatctgctgaggatatttataaaatactgacatcttacaaagctaattacctaattgtagaggatgctatctgcaatgaggtgggacccatgagaggctgtagggttaaagatttattagacattgcaaatggccacatggtttgtgaagaaggtgacaagctaacctactcaaaatatgggcgattttgtcatgaggtcaaaattaactattctccatatgtgaattatttcactagagtatactggaacagatcctactttgtatataaaatcaacactgtgatatccttccagtcttgaaaaataacagagccttcatttcaaagactacctgaagtaaaatgcagttttcttctacctactcggtgtcttttgcagatcagagtatggacatttgaaatattgctgcttctttcccccttctgctgttaactggatccagagttctgtgggaaatagaagatcaagcattactgtcctttgattaaatgtgatatctaccactctgcaatattccagacaggtgtcttccttaccgttacatggtctttaacacttttactgattgcaatattttccccataaaatcttcattctattataatattgatcttgaatttgaatatgtgcaaggtcagatacatttctcaaacataacatttaataaataatgtgatataattatttaatagaaagaataattccgaccttcaagcaagtttctgaaggtattttatgatcatgtaaaacaatgtaattgaaaagtcagcttccatattttgtaggggaaatagaacaccctactttttatctagtgtgaaatatttaatcgaatttttgttgatttatattatgttacctgtgctgaattaggtttggtacttgtgttttgtttgacatattagtaagttgcttttgcttctttctgtcaacttattttttaaataaaattgatctgg

SEQ ID NO: 18999 - protein, 723 aa, Homo sapiens
MAEEEGPPVELRQRKKPKSSENKESAKEEKISDIPIPERAPKHVLFQRFAKIFIGCLAAVTSGMMYALYLSAYHERKFWFSNRQELEREITFQGDSAIYYSYYKDMLKAPSFERGVYELTHNNKTVSLKTINAVQQMSLYPELIASILYQATGSNEIIEPVYFYIGIVFGLQGIYVTALFVTSWLMSGTWLAGMLTVAWFVINRVDTTRIEYSIPLRENWALPYFACQIAALTGYLKSNLNTYGERFCYLLMSASTYTFMMMWEYSHYLLFLQAISLFLLDTFSVEQSDKVYEVYKIYIFSLFLGYLLQFENPALLVSPLLSLVAALMLAKCLQLNVKKGSFVAKIIKVINFYLVCTLTITLNIIMKMFVPHKENGHMLKFLEVKFGLNMTKNFTMNWLLCQESLQAPSQDFFLRLTQSSLLPFYILVLIICFLSMLQVIFRRINGKSLKETVTLEDGRIGERPEIIYHVIHTILLGSLAMVIEGLKYIWIPYVCMLAAFGVCSPELWMTLFKWLRLRTVHPILLALILSMAVPTIIGLSLWKEFFPRLMTELMELQEFYDPDTVELMTWIKRQAPVAAVFAGSPQLMGAIKLCTGWMVTSLPLYNDDDLLKRNENIYQIYSKRSAEDIYKILTSYKANYLIVEDAICNEVGPMRGCRVKDLLDIANGHMVCEEGDKLTYSKYGRFCHEVKINYSPYVNYFTRVYWNRSYFVYKINTVISFQS

SEQ ID NO: 19000 - DNA, 4226 bp, Homo sapiens
ggaagtgggggcgcggcggccaggagcgggcccccggaggccgaggggttcggcgacgcggagggagggagagtctgggccgcgcgggagccgcagggcgccctagccttcgcagaaacgatggcggaggaagaaggaccacctgtagagctgcgccaaagaaaaaagccaaagtcttcagaaaataaggaatctgccaaagaagagaaaatcagtgacattccaattcctgaaagagctccaaaacatgtattatttcaacgctttgcaaagattttcattggctgtcttgcagcggttactagtggtatgatgtatgctctctacttatcagcataccatgaacggaaattctggttttccaacaggcaggagcttgaacgggaaatcacgtttcagggtgacagtgccatttattactcctattataaagatatgttaaaggcaccttcatttgaaagaggtgtttacgaactgacacacaataacaaaactgtatctctgaagactataaatgcagtgcagcaaatgtctctgtatccggaacttattgctagcattttatatcaagccactggtagcaatgagattattgagccagtgtatttctatattggcattgtttttggattgcaaggaatatatgttactgctttatttgttacaagttggcttatgagtggaacatggctagcaggaatgcttactgttgcgtggttcgttattaacagggtagatacaacaagaattgaatactccattcctttaagagaaaactgggcactaccatattttgcatgccaaattgctgcacttacaggctatttaaaaagcaacttaaatacttatggagagaggttttgctacttgttgatgagtgcttcaacttacacatttatgatgatgtgggagtatagccactatctcctgtttcttcaagcaatatctctattcctgctagataccttttcagtggagcaaagtgacaaggtttatgaagtttataaaatctacatattttccctctttctgggatatttactacagtttgagaatccagctttgttggtatctcctttattaagtttagtagcagccttaatgcttgctaagtgccttcagctgaatgtgaagaaaggaagttttgtagctaaaataataaaagtgattaatttttacttggtgtgtactctgacaataacattgaatattataatgaagatgtttgtcccacacaaagaaaatgggcacatgctgaaattccttgaagtaaaatttggactaaatatgaccaagaattttacaatgaattggctcctctgtcaagaatccctgcaggcaccatctcaagatttttttctgcgattgacacagtcttctttattacctttctacattctagtgttaattatttgttttctttctatgttgcaagttatttttaggaggattaatggtaagtccctgaaggaaactgttactcttgaagatggacgaattggagaaagaccagaaataatttatcatgtaattcacactattttattgggttctcttgcaatggttatagaaggcttgaagtacatctggattccttatgtgtgcatgttagcagcatttggtgtatgttctcccgaactttggatgacacttttcaagtggcttcgattaagaactgtacacccaatattgttggctcttattctgagcatggccgtgcctactataataggtctcagcttatggaaagagttttttcccagattaatgacagaattaatggaactacaggaattctatgacccagatacagtggaacttatgacctggataaaaaggcaagctccagttgcagctgtgtttgcagggagtccacagttaatgggtgcgattaaattatgcactggatggatggtgacaagtttgcctctttacaatgatgatgatcttctcaagagaaatgaaaatatctaccaaatctattcaaagcgatctgctgaggatatttataaaatactgacatcttacaaagctaattacctaattgtagaggatgctatctgcaatgaggtgggacccatgagaggctgtagggttaaagatttattagacattgcaaatggccacatggtttgtgaagaaggtgacaagctaacctactcaaaatatgggcgattttgtcatgaggtcaaaattaactattctccatatgtgaattatttcactagagtatactggaacagatcctactttgtatataaaatcaacactgtgatatccttccagtcttgaaaaataacagagccttcatttcaaagactacctgaagtaaaatgcagttttcttctacctactcggtgtcttttgcagatcagagtatggacatttgaaatattgctgcttctttcccccttctgctgttaactggatccagagttctgtgggaaatagaagatcaagcattactgtcctttgattaaatgtgatatctaccactctgcaatattccagacaggtgtcttccttaccgttacatggtctttaacacttttactgattgcaatattttccccataaaatcttcattctattataatattgatcttgaatttgaatatgtgcaaggtcagatacatttctcaaacataacatttaataaataatgtgatataattatttaatagaaagaataattccgaccttcaagcaagtttctgaaggtattttatgatgtataacaactgaagttttacaataaaaactaatttaaatgttagctgaagatatgtggcatttaaattaaaatggaaattatataaaggaaagtgatttttaaggatatacataaagatatatttagaattttcatgatactgttctcctcatctactgcttatgttaagtgagaactttcttagtaatacataatgcatgatgttactgcattttctaaatgactagtaagtgattagttttttcacttatgcctattaatttgataccaatttaatcatgataaaacaataaccgttaacatatattttgttaaatggacatttaaaagaatgttgttcaggttttttttttaaatactgatatggggcatacaatctattcacatgttttctactgaagtactaagtaaaaaaattaaatcattatcagaataaaaatatgtgttctaaaattagcaacaatttctggggatacatgcagatgttgttaaacgtacctctgcatacagatatattataaaacacaagcaatgttatttatgaaactgtgatgcagtcttcaacatcaagaaaaaatgacaactataataaaatttacaacacagtttcacagtctaaatgctatgttcctttaagtattttcatatttttaatcatttattaagagaaaattgtgaaaagttaatttggccttatagagagattcaggatagatgtagcctatagatgtgtcattttaataagttgggatacatgtttagtttttccttatattcctgttcagtgaacagattttcataattctcacttgttaaagtgctgcaaaaattgcattttcagtactctaaattactacattagaagagagcatttctccattgtctttattttctgttatatatgtgttgtaaaagtacactacattagaagggagcttttccgttgtctttattttctgttatacatgtgttgttaaagtacatgcattcttagactaactctcagatgctttgctcttttggagctgaagaattgtttgatggtgatgtcatatatctgatagattagtttcagtggttctcatttcacttttatacgtaatttcttaactatattaagatagttgcaggcagtgtacctcaggttgactctgtacatctgaatagtgagtcactagtattttgcttcaagccttctgaaaatataaccatagttacctaagcacacagtgaatagtcacatggtagtacttgtgattagagcatgtaaaacaatgtaattgaaaagtcagcttccatattttgtaggggaaatagaacaccctactttttatctagtgtgaaatatttaatcgaatttttgttgatttatattatgttacctgtgctgaattaggtttggtacttgtgttttgtttgacatattagtaagttgcttttgcttctttctgtcaacttattttttaaataaaattgatctggaaaaattgtt

SEQ ID NO: 19001 - protein, 723 aa, Homo sapiens; identical to SEQ ID NO: 18999

SEQ ID NO: 19002 - DNA, 3259 bp, Homo sapiens
ggaagtgggggcgcggcggccaggagcgggcccccggaggccgaggggttcggcgacgcggagggagggagagtctgggccgcgcgggagccgcagggcgccctagccttcgcagaaacgatggcggaggaagaaggaccacctgtagagctgcgccaaagaaaaaagccaaagtcttcagaaaataaggaatctgccaaagaagagaaaatcagtgacattccaattcctgaaagagctccaaaacatgtattatttcaacgctttgcaaagattttcattggctgtcttgcagcggttactagtggtatgatgtatgctctctacttatcagcataccatgaacggaaattctggttttccaacaggcaggagcttgaacgggaaatcacgtttcagggtgacagtgccatttattactcctattataaagatatgttaaaggcaccttcatttgaaagaggtgtttacgaactgacacacaataacaaaactgtatctctgaagactataaatgcagtgcagcaaatgtctctgtatccggaacttattgctagcattttatatcaagccactggtagcaatgagattattgagccagtgtatttctatattggcattgtttttggattgcaaggaatatatgttactgctttatttgttacaagttggcttatgagtggaacatggctagcaggaatgcttactgttgcgtggttcgttattaacagggtagatacaacaagaattgaatactccattcctttaagagaaaactgggcactaccatattttgcatgccaaattgctgcacttacaggctatttaaaaagcaacttaaatacttatggagagaggttttgctacttgttgatgagtgcttcaacttacacatttatgatgatgtgggagtatagccactatctcctgtttcttcaagcaatatctctattcctgctagataccttttcagtggagcaaagtgacaaggtttatgaagtttataaaatctacatattttccctctttctgggatatttactacagtttgagaatccagctttgttggtatctcctttattaagtttagtagcagccttaatgcttgctaagtgccttcagctgaatgtgaagaaaggaagttttgtagctaaaataataaaagtgattaatttttacttggtgtgtactctgacaataacattgaatattataatgaagatgtttgtcccacacaaagaaaatgggcacatgctgaaattccttgaagtaaaatttggactaaatatgaccaagaattttacaatgaattggctcctctgtcaagaatccctgcaggcaccatctcaagatttttttctgcgattgacacagtcttctttattacctttctacattctagtgttaattatttgttttctttctatgttgcaagttatttttaggaggattaatggtaagtccctgaaggaaactgttactcttgaagatggacgaattggagaaagaccagaaataatttatcatgtaattcacactattttattgggttctcttgcaatggttatagaaggcttgaagtacatctggattccttatgtgtgcatgttagcagcatttggtgtatgttctcccgaactttggatgacacttttcaagtggcttcgattaagaactgtacacccaatattgttggctcttattctgagcatggccgtgcctactataataggtctcagcttatggaaagagttttttcccagattaatgacagaattaatggaactacaggaattctatgacccagatacagtggaacttatgacctggataaaaaggcaagctccagttgcagctgtgtttgcagggagtccacagttaatgggtgcgattaaattatgcactggatggatggtgacaagtttgcctctttacaatgatgatgatcttctcaagagaaatgaaaatatctaccaaatctattcaaagcgatctgctgaggatatttataaaatactgacatcttacaaagctaattacctaattgtagaggatgctatctgcaatgaggtgggacccatgagaggctgtagggttaaagatttattagacattgcaaatggccacatggtttgtgaagaaggtgacaagctaacctactcaaaatatgggcgattttgtcatgaggtcaaaattaactattctccatatgtgaattatttcactagagtatactggaacagatcctactttgtatataaaatcaacactgtgatatccttccagtcttgaaaaataacagagccttcatttcaaagactacctgaagtaaaatgcagttttcttctacctactcggtgtcttttgcagatcagagtatggacatttgaaatattgctgcttctttcccccttctgctgttaactggatccagagttctgtgggaaatagaagatcaagcattactgtcctttgattaaatgtgatatctaccactctgcaatattccagacaggtgtcttccttaccgttacatggtctttaacacttttactgattgcaatattttccccataaaatcttcattctattataatattgatcttgaatttgaatatgtgcaaggtcagatacatttctcaaacataacatttaataaataatgtgatataattatttaatagaaagaataattccgaccttcaagcaagtttctgaaggtattttatgatcatgtaaaacaatgtaattgaaaagtcagcttccatattttgtaggggaaatagaacaccctactttttatctagtgtgaaatatttaatcgaatttttgttgatttatattatgttacctgtgctgaattaggtttggtacttgtgttttgtttgacatattagtaagttgcttttgcttctttctgtcaacttattttttaaataaaattgatctggaaaaattgttaatgggatgttttaaataatgaatttttcatccagcatcagttgaaaaggaaaagaaagcttcattatggaaatgacaatattgaatatgacagataagtttatttgcttctgttttaactgcagttaatagtactagacaactttaagtggaaagcatttagtttatttcttcacttatttgtagagtgaacaaatgattcacaattctacaagtaattccacttaggtaacttacagttgttaggtttgacaataaagatctactatgagaggagaagaatttatgggttttgggt

SEQ ID NO: 19003 - protein, 723 aa, Homo sapiens; identical to SEQ ID NO: 18999

SEQ ID NO: 19004 - DNA, 373 bp, Homo sapiens
ctacttggggatactgaggtgggaggatcatctgagcctgggaggtcgaggctgcagtgagccgtgatcgtgtcactgtactccagcaattggggagggaataggaaaaaagttattagtgcttagaggtctgagactaggaaaagaaaaaggacaatggtggatctggctatgcctacctcacaggattgttatggagaacaatgagatttgtgttaaagtactttgaaaagtatagtgtaacacaaatataatgtcttatttttactgttcatctgtggtttattttagggtagatacaacaagaattgaatactccattcctttaagagaaaactgggcactaccatattttgcatgccaaattgctgca

SEQ ID NO: 19005 - protein, 39 aa, Homo sapiens
MSYFYCSSVVYFRVDTTRIEYSIPLRENWALPYFACQIA

SEQ ID NO: 19006 - DNA, 275 bp, Homo sapiens
ccaagtaaaaattaatcacttttattattttagctacaaaacttcctttcttcacattcagctgtggaggaaaaatcatatgaacaaagaagtgaggtgttaaaaaattaacaatttaaaaagtaatcataagaatggccgagcacagtggctcaagcctgtaatcccagcatttgctccactgaaaaggtatctagcaggaatagagatattgcttgaagaaacaggagatagtggctatactcccacatcatcataaatgtgtaagttgaagc

SEQ ID NO: 19007 - protein, 51 aa, Homo sapiens
KINNLKSNHKNGRAQWLKPVIPAFAPLKRYLAGIEILLEETGDSGYTPTSS

SEQ ID NO: 19008 - DNA, 751 bp, Homo sapiens
ggttaacattgcacatgaagttttgcattttgctttttataataatttatttaatcaatacctattgaagaacagaagttttttttgttgttgttgttgtttttccaattttcttgctagtaaaacaaaatgctatagttaaaactcttgtgtgtggccagtgctgggattacaggcataagccaccactcccagtccaccaaattgccttctgaaagagctgtcatagcttatattctctccaagaatacaattttcctgcatcctcatcagtattaatgcttttattttatcctaatttgctagcccacatgtctgcttgatttttaaaaaactggataacaatctgttgctgaaaattagagtctaagctttttcactgtcccttagcattttggtattttcgtgagtagtaggaaagagctcagagaacaaaaattagataataatgatgttcacaggatgtctcatgtatgactccatttgtgttttctagcttgaagtacatctggattccttatgtgtgcatgttagcagcatttggtgtatgttctcccgaactttggatgacacttttcaagtggcttcgattaagaactgtacacccaatattgttggtgagtcattattttgcattgtttctcttctaattatataaaatcaaatgctaataaatggaaactacattgaatacaattgaaatagcatgagtaaattacatgatgacttacaggtagaaaaacagatcctg

SEQ ID NO: 19009 - protein, 58 aa, Homo sapiens
MTPFVFSSLKYIWIPYVCMLAAFGVCSPELWMTLFKWLRLRTVHPILLVSHYFALFLF

SEQ ID NO: 19010 - DNA, 567 bp, Homo sapiens
gctgaggcaggagaatcacttgaacccagaaggcgggggttgcagtgagccaagatcacaaccactgtactctagcctgggcgacagtgagactccgcttcaaaaaaaaaaaaaaaacccttgtatgtctatctttatactcttatgctaatatatttttaggctacattactagaaatggcattgtctatcttagagtttttttgttttgttttgtttttttaagacagagtctcgcttttcacccaggctggagtacagtggtgcgatctcagctcactgcaacctctgcctcccaggcttaggtgatcctcctgcctcagcctcccaagtagctgggaccacaggcatgtgtcaccatgcctggctaatttttgtagttttggtagagacaggaatcagtaatgtgagaggtcatcaagaatcaatttttatgatatctttcttggtttgatttagaactatggtatattttctatgtgaatggaacattacattctgcctgctatgtgcttgggatacaaagataattatagcacacttaatttcatcaagtggattataatc

SEQ ID NO: 19011 - protein, 34 aa, Homo sapiens [sequence omitted]

SEQ ID NO: 19012 - DNA, 2138 bp, Homo sapiens
gctgcaaaaattgcattttcagtactctaaattactacattagaagagagcatttctccattgtctttattttctgttatatatgtgttgtaaaagtacactacattagaagggagcttttccgttgtctttattttctgttatacatgtgttgttaaagtacatgcattcttagactaactctcagatgctttgctcttttggagctgaagaattgtttgatggtgatgtcatatatctgatagattagtttcagtggttctcatttcacttttatacgtaatttcttaactatattaagatagttgcaggcagtgtacctcaggttgactctgtacatctgaatagtgagtcactagtattttgcttcaagccttctgaaaatataaccatagttacctaagcacacagtgaatagtcacatggtagtacttgtgattagagcatgtaaaacaatgtaattgaaaagtcagcttccatattttgtaggggaaatagaacaccctactttttatctagtgtgaaatatttaatcgaatttttgttgatttatattatgttacctgtgctgaattaggtttggtacttgtgttttgtttgacatattagtaagttgcttttgcttctttctgtcaacttattttttaaataaaattgatctggaaaaattgttaatgggatgttttaaataatgaatttttcatccagcatcagttgaaaaggaaaagaaagcttcattatggaaatgacaatattgaatatgacagataagtttatttgcttctgttttaactgcagttaatagtactagacaactttaagtggaaagcatttagtttatttcttcacttatttgtagagtgaacaaatgattcacaattctacaagtaattccacttaggtaacttacagttgttaggtttgacaataaagatctactatgagaggagaagaatttatgggttttgggtggaaggaatttctcaaagaaataaaaaatgttctttgcccttgatactgcaaacccactgatacaagtgccttgaatttattattattattattttttatttttttgagatggagtttcactcttgtctcccaggctggaatcatgccgctgcactccagcctgggcaacagagcaagactccatctcaaaaagaaaaaaaaagtagagatgggatctctagcctcctaagttaatttagcctcccaaatgccagacaaagaatctaacataaaatttaccttgaataagatatatgatattgattctgagctgctttgtattttttctgactttggcatctgtatcttggtgctttctgttagactggtagagtttaagaacctaaggagtatgcattgtacttcagtgctaacttttttcttcatttactttctgtgtatataggcagcatattttttttgtagaacattaacccagattgctaatagcttcatgttacggcattcttccacacagtccagattgatttaaggaaaagcagaaatggaagtcaaagtgtgttataaattgagactgaaaaacatgctttaaaaaatagatttaatttcttacactgtgaatagccattgtattgttttgtttctgataaatcagttgttttgggcccctatttttgaactgttaaaaaattttgatgcttttcgtggataaaagtagtgcctctctttatacaactgatggggttttaaaaagtgtaaattgccttttttgttaaacttattttaaatgctttagtatttaaagggtgtatgttattaattaatctgcatatttgtaacgcaaataactacttcctgatttacatctcaatatattcttctttcatttgcccaatttaaaaaatacgtagtctctattgttgctgtttactaatagttttagatcccaatgtgtattagaattatagctacaaaaagttgcaagtaaaatttagcaatttcctattcaaacaggatctcattagtatgttttttaatgtgtagaattaacactttaaaataaacaggtgtgaaaattataaaggaatatatatgacaattattttctgtacattaatgtctaaacattatacttactttttcataataaaggaaattttggaacc

SEQ ID NO: 19013 - protein, 41 aa, Homo sapiens
MEFHSCLPGWNHAAALQPGQQSKTPSQKEKKSRDGISSLLS

SEQ ID NO: 19014 - DNA, 2161 bp, Homo sapiens
gctgcaaaaattgcattttcagtactctaaattactacattagaagagagcatttctccattgtctttattttctgttatatatgtgttgtaaaagtacactacattagaagggagcttttccgttgtctttattttctgttatacatgtgttgttaaagtacatgcattcttagactaactctcagatgctttgctcttttggagctgaagaattgtttgatggtgatgtcatatatctgatagattagtttcagtggttctcatttcacttttatacgtaatttcttaactatattaagatagttgcaggcagtgtacctcaggttgactctgtacatctgaatagtgagtcactagtattttgcttcaagccttctgaaaatataaccatagttacctaagcacacagtgaatagtcacatggtagtacttgtgattagagcatgtaaaacaatgtaattgaaaagtcagcttccatattttgtaggggaaatagaacaccctactttttatctagtgtgaaatatttaatcgaatttttgttgatttatattatgttacctgtgctgaattaggtttggtacttgtgttttgtttgacatattagtaagttgcttttgcttctttctgtcaacttattttttaaataaaattgatctggaaaaattgttaatgggatgttttaaataatgaatttttcatccagcatcagttgaaaaggaaaagaaagcttcattatggaaatgacaatattgaatatgacagataagtttatttgcttctgttttaactgcagttaatagtactagacaactttaagtggaaagcatttagtttatttcttcacttatttgtagagtgaacaaatgattcacaattctacaagtaattccacttaggtaacttacagttgttaggtttgacaataaagatctactatgagaggagaagaatttatgggttttgggtggaaggaatttctcaaagaaataaaaaatgttctttgcccttgatactgcaaacccactgatacaagtgccttgaatttattattattattattttttatttttttgagatggagtttcactcttgtctcccaggctggaatcatgccgctgcactccagcctgggcaacagagcaagactccatctcaaaaagaaaaaaaaagtagagatgggatctctagcctcctaagttaatttagcctcccaaatgccagacaaagaatctaacataaaatttaccttgaataagatatatgatattgattctgagctgctttgtattttttctgactttggcatctgtatcttggtgctttctgttagactggtagagtttaagaacctaaggagtatgcattgtacttcagtgctaacttttttcttcatttactttctgtgtatataggcagcatattttttttgtagaacattaacccagattgctaatagcttcatgttacggcattcttccacacagtccagattgatttaaggaaaagcagaaatggaagtcaaagtgtgttataaattgagactgaaaaacatgctttaaaaaatagatttaatttcttacactgtgaatagccattgtattgttttgtttctgataaatcagttgttttgggcccctatttttgaactgttaaaaaattttgatgcttttcgtggataaaagtagtgcctctctttatacaactgatggggttttaaaaagtgtaaattgccttttttgttaaacttattttaaatgctttagtatttaaagggtgtatgttattaattaatctgcatatttgtaacgcaaataactacttcctgatttacatctcaatatattcttctttcatttgcccaatttaaaaaatacgtagtctctattgttgctgtttactaatagttttagatcccaatgtgtattagaattatagctacaaaaagttgcaagtaaaatttagcaatttcctattcaaacaggatctcattagtatgttttttaatgtgtagaattaacactttaaaataaacaggtgtgaaaattataaaggaatatatatgacaattattttctgtacattaatgtctaaacattatacttactttttcataataaaggaaattttggaaccaaatttgctgagtttagcataaa

SEQ ID NO: 19015 - protein, 41 aa, Homo sapiens; identical to SEQ ID NO: 19013

SEQ ID NO: 19016 - DNA, 2061 bp, Homo sapiens
gctcttttggagctgaagaattgtttgatggtgatgtcatatatctgatagattagtttcagtggttctcatttcacttttatacgtaatttcttaactatattaagatagttgcaggcagtgtacctcaggttgactctgtacatctgaatagtgagtcactagtattttgcttcaagccttctgaaaatataaccatagttacctaagcacacagtgaatagtcacatggtagtacttgtgattagagcatgtaaaacaatgtaattgaaaagtcagcttccatattttgtaggggaaatagaacaccctactttttatctagtgtgaaatatttaatcgaatttttgttgatttatattatgttacctgtgctgaattaggtttggtacttgtgttttgtttgacatattagtaagttgcttttgcttctttctgtcaacttattttttaaataaaattgatctggaaaaattgttaatgggatgttttaaataatgaatttttcatccagcatcagttgaaaaggaaaagaaagcttcattatggaaatgacaatattgaatatgacagataagtttatttgcttctgttttaactgcagttaatagtactagacaactttaagtggaaagcatttagtttatttcttcacttatttgtagagtgaacaaatgattcacaattctacaagtaattccacttaggtaacttacagttgttaggtttgacaataaagatctactatgagaggagaagaatttatgggttttgggtggaaggaatttctcaaagaaataaaaaatgttctttgcccttgatactgcaaacccactgatacaagtgccttgaatttattattattattattttttatttttttgagatggagtttcactcttgtctcccaggctggagtgcaatggcgcgatcttggctcactgcaacctccgctcgctgcaacctccgcctcccaggttcaagtgattctcctgcctcagcaagcggcgaggcggagcttgcggtgagccgagatcatgccgctgcactccagcctgggcaacagagcaagactccatctcaaaaagaaaaaaaaagtagagatgggatctctagcctcctaagttaatttagcctcccaaatgccagacaaagaatctaacataaaatttaccttgaataagatatatgatattgattctgagctgctttgtattttttctgactttggcatctgtatcttggtgctttctgttagactggtagagtttaagaacctaaggagtatgcattgtacttcagtgctaacttttttcttcatttactttctgtgtatataggcagcatattttttttgtagaacattaacccagattgctaatagcttcatgttacggcattcttccacacagtccagattgatttaaggaaaagcagaaatggaagtcaaagtgtgttataaattgagactgaaaaacatgctttaaaaaatagatttaatttcttacactgtgaatagccattgtattgttttgtttctgataaatcagttgttttgggcccctatttttgaactgttaaaaaattttgatgcttttcgtggataaaagtagtgcctctctttatacaactgatggggttttaaaaagtgtaaattgccttttttgttaaacttattttaaatgctttagtatttaaagggtgtatgttattaattaatctgcatatttgtaacgcaaataactacttcctgatttacatctcaatatattcttctttcatttgcccaatttaaaaaatacgtagtctctattgttgctgtttactaatagttttagatcccaatgtgtattagaattatagctacaaaaagttgcaagtaaaatttagcaatttcctattcaaacaggatctcattagtatgttttttaatgtgtagaattaacactttaaaataaacaggtgtgaaaattataaaggaatatatatgacaattattttctgtacattaatgtctaaacattatacttactttttcataataaaggaaattttggaacc

SEQ ID NO: 19017 - protein, 80 aa, Homo sapiens
MEFHSCLPGWSAMARSWLTATSARCNLRLPGSSDSPASASGEAELAVSRDHAAALQPGQQSKTPSQKEKKSRDGISSLLS

SEQ ID NO: 19018 - DNA, 2084 bp, Homo sapiens
gctcttttggagctgaagaattgtttgatggtgatgtcatatatctgatagattagtttcagtggttctcatttcacttttatacgtaatttcttaactatattaagatagttgcaggcagtgtacctcaggttgactctgtacatctgaatagtgagtcactagtattttgcttcaagccttctgaaaatataaccatagttacctaagcacacagtgaatagtcacatggtagtacttgtgattagagcatgtaaaacaatgtaattgaaaagtcagcttccatattttgtaggggaaatagaacaccctactttttatctagtgtgaaatatttaatcgaatttttgttgatttatattatgttacctgtgctgaattaggtttggtacttgtgttttgtttgacatattagtaagttgcttttgcttctttctgtcaacttattttttaaataaaattgatctggaaaaattgttaatgggatgttttaaataatgaatttttcatccagcatcagttgaaaaggaaaagaaagcttcattatggaaatgacaatattgaatatgacagataagtttatttgcttctgttttaactgcagttaatagtactagacaactttaagtggaaagcatttagtttatttcttcacttatttgtagagtgaacaaatgattcacaattctacaagtaattccacttaggtaacttacagttgttaggtttgacaataaagatctactatgagaggagaagaatttatgggttttgggtggaaggaatttctcaaagaaataaaaaatgttctttgcccttgatactgcaaacccactgatacaagtgccttgaatttattattattattattttttatttttttgagatggagtttcactcttgtctcccaggctggagtgcaatggcgcgatcttggctcactgcaacctccgctcgctgcaacctccgcctcccaggttcaagtgattctcctgcctcagcaagcggcgaggcggagcttgcggtgagccgagatcatgccgctgcactccagcctgggcaacagagcaagactccatctcaaaaagaaaaaaaaagtagagatgggatctctagcctcctaagttaatttagcctcccaaatgccagacaaagaatctaacataaaatttaccttgaataagatatatgatattgattctgagctgctttgtattttttctgactttggcatctgtatcttggtgctttctgttagactggtagagtttaagaacctaaggagtatgcattgtacttcagtgctaacttttttcttcatttactttctgtgtatataggcagcatattttttttgtagaacattaacccagattgctaatagcttcatgttacggcattcttccacacagtccagattgatttaaggaaaagcagaaatggaagtcaaagtgtgttataaattgagactgaaaaacatgctttaaaaaatagatttaatttcttacactgtgaatagccattgtattgttttgtttctgataaatcagttgttttgggcccctatttttgaactgttaaaaaattttgatgcttttcgtggataaaagtagtgcctctctttatacaactgatggggttttaaaaagtgtaaattgccttttttgttaaacttattttaaatgctttagtatttaaagggtgtatgttattaattaatctgcatatttgtaacgcaaataactacttcctgatttacatctcaatatattcttctttcatttgcccaatttaaaaaatacgtagtctctattgttgctgtttactaatagttttagatcccaatgtgtattagaattatagctacaaaaagttgcaagtaaaatttagcaatttcctattcaaacaggatctcattagtatgttttttaatgtgtagaattaacactttaaaataaacaggtgtgaaaattataaaggaatatatatgacaattattttctgtacattaatgtctaaacattatacttactttttcataataaaggaaattttggaaccaaatttgctgagtttagcataaa

SEQ ID NO: 19019 - protein, 80 aa, Homo sapiens; identical to SEQ ID NO: 19017

SEQ ID NO: 19020 - DNA, 851 bp, Homo sapiens
ctttaaatactaaagcatttaaaataagtttaacaaaaaaggcaatttacactttttaaaaccccatcagttgtataaagagaggcactacttttatccacgaaaagcatcaaaattttttaacagttcaaaaataggggcccaaaacaactgatttatcagaaacaaaacaatacaatggctattcacagtgtaagaaattaaatctattttttaaagcatgtttttcagtctcaatttataacacactttgacttccatttctgcttttccttaaatcaatctggactgtgtggaagaatgccgtaacatgaagctattagcaatctgggttaatgttctacaaaaaaaatatgctgcctatatacacagaaagtaaatgaagaaaaaagttagcactgaagtacaatgcatactccttaggttcttaaactctaccagtctaacagaaagcaccaagatacagatgccaaagtcagaaaaaatacaaagcagctcagaatcaatatcatatatcttattcaaggtaaattttatgttagattctttgtctggcatttgggaggctaaattaacttaggaggctagagatcccatctctactttttttttctttttgagatggagtcttgctctgttgcccaggctggagtgcagcggcatgatctcggctcaccgcaagctccgcctcgccgcttgacgccattctcctgcttcagcctcggagtagctgggactacaggagaatcacttgaacctgggaggcggaggttgcagcgagcggaggttgcagtgagccaagatcgcgccattgcactccagcctgggagacaagagtgaaactccatctc

SEQ ID NO: 19021 - protein, 72 aa, Homo sapiens
MESCSVAQAGVQRHDLGSPQAPPRRLTPFSCFSLGVAGTTGESLEPGRRRLQRAEVAVSQDRAIALQPGRQE

SEQ ID NO: 19022 - DNA, 1200 bp, Homo sapiens
gtgcaatggcgcgatcttggctcactgcaacctccgctcgctgcaaccccgtctctactgaaaatacaaaaaattagccgggcagggtggcgggcgcctgtagtcccagctactccgaggctgaagcaggagaatggcgtcaagcggcgaggcggagcttgcggtgagccgagatcatgccgctgcactccagcctgggcaacagagcaagactccatctcaaaaagaaaaaaaaagtagagatgggatctctagcctcctaagttaatttagcctcccaaatgccagacaaagaatctaacataaaatttaccttgaataagatatatgatattgattctgagctgctttgtattttttctgactttggcatctgtatcttggtgctttctgttagactggtagagtttaagaacctaaggagtatgcattgtacttcagtgctaacttttttcttcatttactttctgtgtatataggcagcatattttttttgtagaacattaacccagattgctaatagcttcatgttacggcattcttccacacagtccagattgatttaaggaaaagcagaaatggaagtcaaagtgtgttataaattgagactgaaaaacatgctttaaaaaatagatttaatttcttacactgtgaatagccattgtattgttttgtttctgataaatcagttgttttgggcccctatttttgaactgttaaaaaattttgatgcttttcgtggataaaagtagtgcctctctttatacaactgatggggttttaaaaagtgtaaattgccttttttgttaaacttattttaaatgctttagtatttaaagggtgtatgttattaattaatctgcatatttgtaacgcaaataactacttcctgatttacatctcaatatattcttctttcatttgcccaatttaaaaaatacgtagtctctattgttgctgtttactaatagttttagatcccaatgtgtattagaattatagctacaaaaagttgcaagtaaaatttagcaatttcctattcaaacaggatctcattagtatgttttttaatgtgtagaattaacactttaaaataaacaggtgtgaaaattataaaggaatatatatgacaattattttctgtacattaatgtctaaacattatacttactttttcataataaaggaaattttggaacc

SEQ ID NO: 19023 - protein, 65 aa, Homo sapiens
MPDKESNIKFTLNKIYDIDSELLCIFSDFGICILVLSVRLVEFKNLRSMHCTSVLTFFFIYFLCI

SEQ ID NO: 19024 - DNA, 1223 bp, Homo sapiens
gtgcaatggcgcgatcttggctcactgcaacctccgctcgctgcaaccccgtctctactgaaaatacaaaaaattagccgggcagggtggcgggcgcctgtagtcccagctactccgaggctgaagcaggagaatggcgtcaagcggcgaggcggagcttgcggtgagccgagatcatgccgctgcactccagcctgggcaacagagcaagactccatctcaaaaagaaaaaaaaagtagagatgggatctctagcctcctaagttaatttagcctcccaaatgccagacaaagaatctaacataaaatttaccttgaataagatatatgatattgattctgagctgctttgtattttttctgactttggcatctgtatcttggtgctttctgttagactggtagagtttaagaacctaaggagtatgcattgtacttcagtgctaacttttttcttcatttactttctgtgtatataggcagcatattttttttgtagaacattaacccagattgctaatagcttcatgttacggcattcttccacacagtccagattgatttaaggaaaagcagaaatggaagtcaaagtgtgttataaattgagactgaaaaacatgctttaaaaaatagatttaatttcttacactgtgaatagccattgtattgttttgtttctgataaatcagttgttttgggcccctatttttgaactgttaaaaaattttgatgcttttcgtggataaaagtagtgcctctctttatacaactgatggggttttaaaaagtgtaaattgccttttttgttaaacttattttaaatgctttagtatttaaagggtgtatgttattaattaatctgcatatttgtaacgcaaataactacttcctgatttacatctcaatatattcttctttcatttgcccaatttaaaaaatacgtagtctctattgttgctgtttactaatagttttagatcccaatgtgtattagaattatagctacaaaaagttgcaagtaaaatttagcaatttcctattcaaacaggatctcattagtatgttttttaatgtgtagaattaacactttaaaataaacaggtgtgaaaattataaaggaatatatatgacaattattttctgtacattaatgtctaaacattatacttactttttcataataaaggaaattttggaaccaaatttgctgagtttagcataaa

SEQ ID NO: 19025 - protein, 65 aa, Homo sapiens; identical to SEQ ID NO: 19023

SEQ ID NO: 19026 - DNA, 1384 bp, Homo sapiens
gttcaagtgattctcctgcctcagcctccggagtagctgggattacaggcacctgccaccaagcacggctaatttttgtatttttagtagaaacggggtttcgccatgttggccaggctggtctcgaactcctgacctcagatgatccactcaccccagcactttgggaggctgaggcaggcagatcacgaggtcaggagatcgagaccatcttggctaacacggtgaaaccccgtctctactgaaaatacaaaaaattagccgggcagggtggcgggcgcctgtagtcccagctactccgaggctgaagcaggagaatggcgtcaagcggcgaggcggagcttgcggtgagccgagatcatgccgctgcactccagcctgggcaacagagcaagactccatctcaaaaagaaaaaaaaagtagagatgggatctctagcctcctaagttaatttagcctcccaaatgccagacaaagaatctaacataaaatttaccttgaataagatatatgatattgattctgagctgctttgtattttttctgactttggcatctgtatcttggtgctttctgttagactggtagagtttaagaacctaaggagtatgcattgtacttcagtgctaacttttttcttcatttactttctgtgtatataggcagcatattttttttgtagaacattaacccagattgctaatagcttcatgttacggcattcttccacacagtccagattgatttaaggaaaagcagaaatggaagtcaaagtgtgttataaattgagactgaaaaacatgctttaaaaaatagatttaatttcttacactgtgaatagccattgtattgttttgtttctgataaatcagttgttttgggcccctatttttgaactgttaaaaaattttgatgcttttcgtggataaaagtagtgcctctctttatacaactgatggggttttaaaaagtgtaaattgccttttttgttaaacttattttaaatgctttagtatttaaagggtgtatgttattaattaatctgcatatttgtaacgcaaataactacttcctgatttacatctcaatatattcttctttcatttgcccaatttaaaaaatacgtagtctctattgttgctgtttactaatagttttagatcccaatgtgtattagaattatagctacaaaaagttgcaagtaaaatttagcaatttcctattcaaacaggatctcattagtatgttttttaatgtgtagaattaacactttaaaataaacaggtgtgaaaattataaaggaatatatatgacaattattttctgtacattaatgtctaaacattatacttactttttcataataaaggaaattttggaacc

SEQ ID NO: 19027 - protein, 65 aa, Homo sapiens; identical to SEQ ID NO: 19023

SEQ ID NO: 19028 - DNA, 1407 bp, Homo sapiens
gttcaagtgattctcctgcctcagcctccggagtagctgggattacaggcacctgccaccaagcacggctaatttttgtatttttagtagaaacggggtttcgccatgttggccaggctggtctcgaactcctgacctcagatgatccactcaccccagcactttgggaggctgaggcaggcagatcacgaggtcaggagatcgagaccatcttggctaacacggtgaaaccccgtctctactgaaaatacaaaaaattagccgggcagggtggcgggcgcctgtagtcccagctactccgaggctgaagcaggagaatggcgtcaagcggcgaggcggagcttgcggtgagccgagatcatgccgctgcactccagcctgggcaacagagcaagactccatctcaaaaagaaaaaaaaagtagagatgggatctctagcctcctaagttaatttagcctcccaaatgccagacaaagaatctaacataaaatttaccttgaataagatatatgatattgattctgagctgctttgtattttttctgactttggcatctgtatcttggtgctttctgttagactggtagagtttaagaacctaaggagtatgcattgtacttcagtgctaacttttttcttcatttactttctgtgtatataggcagcatattttttttgtagaacattaacccagattgctaatagcttcatgttacggcattcttccacacagtccagattgatttaaggaaaagcagaaatggaagtcaaagtgtgttataaattgagactgaaaaacatgctttaaaaaatagatttaatttcttacactgtgaatagccattgtattgttttgtttctgataaatcagttgttttgggcccctatttttgaactgttaaaaaattttgatgcttttcgtggataaaagtagtgcctctctttatacaactgatggggttttaaaaagtgtaaattgccttttttgttaaacttattttaaatgctttagtatttaaagggtgtatgttattaattaatctgcatatttgtaacgcaaataactacttcctgatttacatctcaatatattcttctttcatttgcccaatttaaaaaatacgtagtctctattgttgctgtttactaatagttttagatcccaatgtgtattagaattatagctacaaaaagttgcaagtaaaatttagcaatttcctattcaaacaggatctcattagtatgttttttaatgtgtagaattaacactttaaaataaacaggtgtgaaaattataaaggaatatatatgacaattattttctgtacattaatgtctaaacattatacttactttttcataataaaggaaattttggaaccaaatttgctgagtttagcataaa

SEQ ID NO: 19029 - protein, 65 aa, Homo sapiens; identical to SEQ ID NO: 19023

SEQ ID NO: 19030 - DNA, 3212 bp, Homo sapiens
tgtgtgagtttccgggacgttcggagggtggcctctctcccaccgggttccgcataccccaggcaccggcccgcatccaagtgtcaggttggagccgggaagcggccctggtggtagcggcggcgggggcaggatgagcgcggaggcggcggaccgggaggcggccacctccagccggccctgcaccccgccgcagacctgctggtttgagtttctgctggaggagtcactgttggagaaacatctgcgcaagccctgcccggatcctgcaccagttcaacttatagttcagtttttggaacaggcttccaaaccttcagttaatgaacaaaaccaagttcaacctccgcctgataacaagagaaatcgtattttaaaactacttgctcttaaagttgctgcacatttgaagtgggacttagacatattagagaaaagtttgtctgttccagtattgaatatgctactaaatgaactactctgcatcagtaaagttcctcctgggacaaagcatgtagacatggatctggccactttacctccgaccactgccatggctgtacttctctataatagatgggcaattaggacaattgttcaaagtagttttccagtcaaacaggcaaaacccggaccccctcagttaagtgttatgaatcaaatgcaacaggaaaaagagctaacagaaaacattttgaaagtgctcaaagaacaagctgctgattctattttggtactagaagcagccctaaaattaaacaaggatctttatgtccatacgatgagaactctagatttattggccatggaaccaggcatggtaaatggagaaactgagagttctactgctggattgaaagtcaaaaccgaagaaatgcagtgccaggtgtgctatgatttgggcgcagcatacttccagcaaggctccacaaattcagctgtctatgaaaatgccagggaaaaattttttagaaccaaagaactaattgcagagataggttcattatctcttcattgtaccatagatgagaagcggttagctggctattgtcaagcatgtgatgttcttgtaccttcttctgatagtacatctcaacagttgactccatatagtcaagtccatatttgtttgagatctggcaactatcaggaggtaatacagattttcattgaagacaacttaaccttgagtttacctgtccagttccgacagtcagtcctaagagaactctttaagaaagctcaacagggaaatgaagctctagatgaaatctgttttaaagtttgtgcctgtaatacagtccgtgatatactggaaggcagaacaattagtgttcaatttaaccagctatttcttagaccaaataaagagaaaatagactttcttcttgaggtatgttcaagatcagtaaatttagaaaaagcttcagagtctttgaaaggaaacatggctgcttttctaaagaatgtgtgtctggggttggaagatctgcagtatgttttcatgatttcttcacatgagcttttcattacattgttgaaagatgaagaacgaaagctacttgttgatcagatgaggaagagatcccctagagtaaatctgtgcattaaacctgtaacttcattttatgatatcccagcttcagcaagtgtcaacattggtcagttagagcatcaacttatattgtcagtggatccttggaggattagacaaattttaattgaattacatggtatgacttcagagcgccagttctggacagtgtctaataagtgggaagtaccttctgtctatagtggtgttatcctgggaattaaagacaatttaacaagagatttggtttatattcttatggccaaaggtttgcactgcagtactgttaaggacttttcccatgctaaacagctctttgctgcttgtttggagttggtaacagagttctcaccgaagcttcgtcaggtcatgctgaatgagatgttgcttttggatattcatacacacgaagctgggacagggcaggcaggagagagaccgccatccgaccttataagtagagtacgaggctatctggaaatgaggcttcctgatattcctcttcgtcaagttatagctgaggaatgtgttgcctttatgttaaactggagagaaaatgaataccttacactccaagttcctgcatttttgcttcagagtaatccatatgtaaagcttggacagcttttagcagctacatgcaaagaacttccaggccctaaagaaagtagacggactgccaaagacctttgggaagttgttgttcaaatctgtagtgtgtccagtcagcacaaacgaggaaatgatggcagagttagtttaataaaacagagggaatctacgttaggtatcatgtatcggagtgaactgctttcttttatcaaaaaattacgagaaccactcgttttgactattattttatcactctttgtgaaacttcacaatgttcgggaggacattgtgaatgatattacagctgaacacatttctatttggccatcttccattcccaacctccagtctgtggactttgaagctgtggcaatcacagtgaaagagctagttcgatatacactcagtataaatccaaataaccattcttggttaattatccaggcagatatttactttgcaacgaatcagtattcagcagctcttcactattacctccaggcaggagctgtgtgttctgacttctttaacaaggctgtgccccctgatgtttatacagaccaggtaataaaacgaatgataaaatgttgttctttgctgaattgccacacacaggtggccattttatgtcagttcctcagagaaattgactacaaaacagcgtttaaatctctgcaagaacaaaacagtcatgatgctatggactcctactacgactacatatgggatgttaccattttggaatacttgacttatcttcatcataaaagaggagaaacagataaaagacaaattgcaatcaaagccatcggccagacagagttgaatgcaagcaatccagaagaagtgttacagctggcagcgcagagaaggaaaaaaaagtttctccaagcaatggcaaaactttacttttaagcagttaaatttttttaacttttattttttaaacaatgggctaaaaataaacagtattaaaaggttaagtttatataatacatatgtacac

SEQ ID NO: 19031 - protein, 995 aa, Homo sapiens; identical to SEQ ID NO: 2316

SEQ ID NO: 19032 - DNA, 3379 bp, Homo sapiens
tgtgtgagtttccgggacgttcggagggtggcctctctcccaccgggttccgcataccccaggcaccggcccgcatccaagtgtcaggttggagccgggaagcggccctggtggtagcggcggcgggggcaggatgagcgcggaggcggcggaccgggaggcggccacctccagccggccctgcaccccgccgcagacctgctggtttgagtttctgctggaggagtcactgttggagaaacatctgcgcaagccctgcccggatcctgcaccagttcaacttatagttcagtttttggaacaggcttccaaaccttcagttaatgaacaaaaccaagttcaacctccgcctgataacaagagaaatcgtattttaaaactacttgctcttaaagttgctgcacatttgaagtgggacttagacatattagagaaaagtttgtctgttccagtattgaatatgctactaaatgaactactctgcatcagtaaagttcctcctgggacaaagcatgtagacatggatctggccactttacctccgaccactgccatggctgtacttctctataatagatgggcaattaggacaattgttcaaagtagttttccagtcaaacaggcaaaacccggaccccctcagttaagtgttatgaatcaaatgcaacaggaaaaagagctaacagaaaacattttgaaagtgctcaaagaacaagctgctgattctattttggtactagaagcagccctaaaattaaacaaggatctttatgtccatacgatgagaactctagatttattggccatggaaccaggcatggtaaatggagaaactgagagttctactgctggattgaaagtcaaaaccgaagaaatgcagtgccaggtgtgctatgatttgggcgcagcatacttccagcaaggctccacaaattcagctgtctatgaaaatgccagggaaaaattttttagaaccaaagaactaattgcagagataggttcattatctcttcattgtaccatagatgagaagcggttagctggctattgtcaagcatgtgatgttcttgtaccttcttctgatagtacatctcaacagttgactccatatagtcaagtccatatttgtttgagatctggcaactatcaggaggtaatacagattttcattgaagacaacttaaccttgagtttacctgtccagttccgacagtcagtcctaagagaactctttaagaaagctcaacagggaaatgaagctctagatgaaatctgttttaaagtttgtgcctgtaatacagtccgtgatatactggaaggcagaacaattagtgttcaatttaaccagctatttcttagaccaaataaagagaaaatagactttcttcttgaggtatgttcaagatcagtaaatttagaaaaagcttcagagtctttgaaaggaaacatggctgcttttctaaagaatgtgtgtctggggttggaagatctgcagtatgttttcatgatttcttcacatgagcttttcattacattgttgaaagatgaagaacgaaagctacttgttgatcagatgaggaagagatcccctagagtaaatctgtgcattaaacctgtaacttcattttatgatatcccagcttcagcaagtgtcaacattggtcagttagagcatcaacttatattgtcagtggatccttggaggattagacaaattttaattgaattacatggtatgacttcagagcgccagttctggacagtgtctaataagtgggaagtaccttctgtctatagtggtgttatcctgggaattaaagacaatttaacaagagatttggtttatattcttatggccaaaggtttgcactgcagtactgttaaggacttttcccatgctaaacagctctttgctgcttgtttggagttggtaacagagttctcaccgaagcttcgtcaggtcatgctgaatgagatgttgcttttggatattcatacacacgaagctgggacagggcaggcaggagagagaccgccatccgaccttataagtagagtacgaggctatctggaaatgaggcttcctgatattcctcttcgtcaagttatagctgaggaatgtgttgcctttatgttaaactggagagaaaatgaataccttacactccaagttcctgcatttttgcttcagagtaatccatatgtaaagcttggacagcttttagcagctacatgcaaagaacttccaggccctaaagaaagtagacggactgccaaagacctttgggaagttgttgttcaaatctgtagtgtgtccagtcagcacaaacgaggaaatgatggcagagttagtttaataaaacagagggaatctacgttaggtatcatgtatcggagtgaactgctttcttttatcaaaaaattacgagaaccactcgttttgactattattttatcactctttgtgaaacttcacaatgttcgggaggacattgtgaatgatattacagctgaacacatttctatttggccatcttccattcccaacctccagtctgtggactttgaagctgtggcaatcacagtgaaagagctagttcgatatacactcagtataaatccaaataaccattcttggttaattatccaggcagatatttactttgcaacgaatcagtattcagcagctcttcactattacctccaggcaggagctgtgtgttctgacttctttaacaaggctgtgccccctgatgtttatacagaccaggtaataaaacgaatgataaaatgttgttctttgctgaattgccacacacaggtggccattttatgtcagttcctcagagaaattgactacaaaacagcgtttaaatctctgcaagaacaaaacagtcatgatgctatggactcctactacgactacatatgggatgttaccattttggaatacttgacttatcttcatcataaaagaggagaaacagataaaagacaaattgcaatcaaagccatcggccagacagagttgaatgcaagcaatccagaagaagtgttacagctggcagcgcagagaaggaaaaaaaagtttctccaagcaatggcaaaactttacttttaagcagttaaatttttttaacttttattttttaaacaatgggctaaaaataaacagtattaaaaggttaagtttatataatacatatgtacacaattagtggtgttttcttttcagacaaaatactgaaacaaatattagtttaaaaacaaactatacagaagacttcataccgtaacaataaatgtatagtttcttcaaagggagaagagattcacatatctgataacaaaataaactagcaatctagttttctaatct

SEQ ID NO: 19033 - protein, 995 aa, Homo sapiens; identical to SEQ ID NO: 2316

SEQ ID NO: 19034 - DNA, 500 bp, Homo sapiens
ggagtcactgttggagaaacatctgcgcaagccctgcccggatcctgcaccagttcaacttatagttcagtttttggaacaggcttccaaaccttcagttaatgaacaaaaccaagttcaacctccgcctgataacaagagaaattgactacaaaacagcgtttaaatctctgcaagaacaaaacagtcatgatgctatggactcctactacgactacatatgggatgttaccattttggaatacttgacttatcttcatcataaaagaggagaaacagataaaagacaaattgcaatcaaagccatcggccagacagagttgaatgcaagcaatccagaagaagtgttacagctggcagcgcagagaaggaaaaaaaagtttctccaagcaatggcaaaactttacttttaagcagttaaatttttttaacttttattttttaaacaatgggctaaaaataaacagtattaaaaggttaagtttatataatacatatgt

SEQ ID NO: 19035 - protein, 103 aa, Homo sapiens
MNKTKFNLRLITREIDYKTAFKSLQEQNSHDAMDSYYDYIWDVTILEYLTYLHHKRGETDKRQIAIKAIGQTELNASNPEEVLQLAAQRRKKKFLQAMAKLYF

SEQ ID NO: 19036 - DNA, 1438 bp, Homo sapiens
ggagtcactgttggagaaacatctgcgcaagccctgcccggatcctgcaccagttcaacttatagttcagtttttggaacaggcttccaaaccttcagttaatgaacaaaaccaagttcaacctccgcctgataacaagagaaattgactacaaaacagcgtttaaatctctgcaagaacaaaacagtcatgatgctatggactcctactacgactacatatgggatgttaccattttggaatacttgacttatcttcatcataaaagaggagaaacagataaaagacaaattgcaatcaaagccatcggccagacagagttgaatgcaagcaatccagaagaagtgttacagctggcagcgcagagaaggaaaaaaaagtttctccaagcaatggcaaaactttacttttaagcagttaaatttttttaacttttattttttaaacaatgggctaaaaataaacagtattaaaaggttaagtttatataatacatatgtacacaattagtggtgttttcttttcagacaaaatactgaaacaaatattagtttaaaaacaaactatacagaagacttcataccgtaacaataaatgtatagtttcttcaaagggagaagagattcacatatctgataacaaaataaactagcaatctagttttctaatctactttatgaggctggattttttttttagaaaagctaatttaaaatatttagaaatagctagcctatgtacagcaagttttcatgtctttttttaataaatagatttctaggagtcagtatatatttaatactcttcttccttaagaaaatagaagtttaggtcaagtgttaagctttatcactttgacactgtccttatctcacaatggaggaatttagaaaggaccttaacagtttcacaaacataaataaagccttagtcacactaaattaaaaaaaaaaattccttagggatatcttagagtagtaaagtgacttcctcatataaatagtttgaaagggtacttaagtttttcacccaaattgtgatatacaaaaaggttattaccaagcaacctacatgtcaagaaagccccagttaggaaggagccacagcatttatcttgtttataatttctttggtactcccactgtttagagcacaggttgaacaccatgttcatctaagccttattagttaaaaaatgtgttatggcaaggcaaataaactagtttaaaaaacattaaatttcaccatttgtagaaattcaagttttataatagcttgctatagcagctatagataaattagtcaccttattacaaaactaaacctttgtaaacaagtttaaatttaattttcaagaaccaaattgcactagtcaagagtgtaggaattttgagaatctaacaactagattcaaagtactgtatcacttagtataccc

SEQ ID NO: 19037 - protein, 103 aa, Homo sapiens; identical to SEQ ID NO: 19035

SEQ ID NO: 19038 - DNA, 458 bp, Homo sapiens
gggaagtaatcgacagatacaggagaaattaaagcaatatggtaatgctcgtaactaactacatacttactccagcctgggtgacggagcgagactctatctcaaaaatcaagaacaaaccaaaaatttttaagatgaacaagtatagcatgatagttatgataggggattctgggactaaccgcgtgcttaagcttgaatgccagcttcatacttaaatagccgtataatcttgaacaagttatttaacttctttgtgttgcagttttctcatttgcaaaatgacagtagtagcataatagtacttaccttgatattgttgtgaggattacctgaattaatatatataaaactcctagtctttgtgtgcctttttttcctaatagtaatcccagtccattatttattacttgttgattgtagcgaatgtgttcattttcgttagtgttatattatgg

SEQ ID NO: 19039 - protein, 59 aa, Homo sapiens
MVMLVTNYILTPAWVTERDSISKIKNKPKIFKMNKYSMIVMIGDSGTNRVLKLECQLHT

SEQ ID NO: 19040 - DNA, 2950 bp, Homo sapiens
aggttttatacacctgaaagaagagaatgtcaagacgaagtagccgtttacaagctaagcagcagccccagcccagccagacggaatccccccaagaagcccagataatccaggccaagaagaggaaaactacccaggatgtcaaaaaaagaagagaggaggtcaccaagaaacatcagtatgaaattaggaattgttggccacctgtattatctggggggatcagtccttgcattatcattgaaacacctcacaaagaaataggaacaagtgatttctccagatttacaaattacagatttaaaaatctttttattaatccttcacctttgcctgatttaagctggggatgttcaaaagaagtctggctaaacatgttaaaaaaggagagcagatatgttcatgacaaacattttgaagttctgcattctgacttggaaccacagatgaggtccatacttctagactggcttttagaggtatgtgaagtatacacacttcatagggaaacattttatctttttgcttacgtcactgatggtgcttgcagtgaagaggatatcttaaggatggaactcattatattaaaggctttaaaatgggaactttgtcctgtaacaatcatctcctggctaaatctctttctccaagttgatgctcttaaagatgctcctaaagttcttctacctcagtattctcaggaaacattcattcaaatagctcagcttttagatctgtgtattctagccattgattcattagagttccagtacagaatactgactgctgctgccttgtgccattttacctccattgaagtggttaagaaagcctcaggtttggagtgggacagtatttcagaatgtgtagattggatggtaccttttgtcaatgtagtaaaaagtactagtccagtgaagctgaagacttttaagaagattcctatggaagacagacataatatccagacacatacaaactatttggctatgctggaggaagtaaattacataaacaccttcagaaaagggggacagttgtcaccagtgtgcaatggaggcattatgacaccaccgaagagcactgaaaaaccaccaggaaaacactaaagaagataactaagcaaacaagttggaattcaccaagattgggtagaactggtatcactgaactactaaagttttacagaaagtagtgctgtgattgattgccctagccaattcacaagttacactgccattctgattttaaaacttacaattggcactaaagaatacatttaattatttcctatgttagctgttaaagaaacagcaggacttgtttacaaagatgtcttcattcccaaggttactggatagaagccaaccacagtctataccatagcaatgtttttcctttaatccagtgttactgtgtttatcttgataaactaggaattttgtcactggagttttggactggataagtgctaccttaaagggtatactaagtgatacagtactttgaatctagttgttagattctcaaaattcctacactcttgactagtgcaatttggttcttgaaaattaaatttaaacttgtttacaaaggtttagttttgtaataaggtgactaatttatctatagctgctatagcaagctattataaaacttgaatttctacaaatggtgaaatttaatgttttttaaactagtttatttgccttgccataacacattttttaactaataaggcttagatgaacatggtgttcaacctgtgctctaaacagtgggagtaccaaagaaattataaacaagataaatgctgtggctccttcctaactggggctttcttgacatgtaggttgcttggtaataacctttttgtatatcacaatttgggtgaaaaacttaagtaccctttcaaactatttatatgaggaagtcactttactactctaagatatccctaaggaatttttttttttaatttagtgtgactaaggctttatttatgtttgtgaaactgttaaggtcctttctaaattcctccattgtgagataaggacagtgtcaaagtgataaagcttaacacttgacctaaacttctattttcttaaggaagaagagtattaaatatatactgactcctagaaatctatttattaaaaaaagacatgaaaacttgctgtacataggctagctatttctaaatattttaaattagcttttctaaaaaaaaaatccagcctcataaagtagattagaaaactagattgctagtttattttgttatcagatatgtgaatctcttctccctttgaagaaactatacatttattgttacggtatgaagtcttctgtatagtttgtttttaaactaatatttgtttcagtattttgtctgaaaagaaaacaccactaattgtgtacatatgtattatataaacttaaccttttaatactgtttatttttagcccattgtttaaaaaataaaagttaaaaaaatttaactgcttaaaagtaaagttttgccattgcttggagaaacttttttttccttctctgcgctgccagctgtaacacttcttctggattgcttgcattcaactctgtctggccgatggctttgatcttccaaaacagaaaagtgatgttattagaggtgtgtcaaaaattaagttttgttggtacaagtaatataaagctacctacgtgctaacaacgatacagtttaatgattaactgaacctcttaactgtaaaacccaggagtcttggaaaaaaattaacataaagattaaccagggccactctcaaggaaagatggactgctgagccatagtttatggaattacttaagtggcattttaatatattaagtaaattcatgtaaatttatttgaaagtataagtaagctctacatggcgatttttagagttaaactagggctccacttgt

SEQ ID NO: 19041 - protein, 360 aa, Homo sapiens
MSRRSSRLQAKQQPQPSQTESPQEAQIIQAKKRKTTQDVKKRREEVTKKHQYEIRNCWPPVLSGGISPCIIIETPHKEIGTSDFSRFTNYRFKNLFINPSPLPDLSWGCSKEVWLNMLKKESRYVHDKHFEVLHSDLEPQMRSILLDWLLEVCEVYTLHRETFYLFAYVTDGACSEEDILRMELIILKALKWELCPVTIISWLNLFLQVDALKDAPKVLLPQYSQETFIQIAQLLDLCILAIDSLEFQYRILTAAALCHFTSIEVVKKASGLEWDSISECVDWMVPFVNVVKSTSPVKLKTFKKIPMEDRHNIQTHTNYLAMLEEVNYINTFRKGGQLSPVCNGGIMTPPKSTEKPPGKH

SEQ ID NO: 19042 - DNA, 2513 bp, Homo sapiens
gtgcggggcgggaccggcccggcctatatattgggttggcgccggcgccagctgagccgagcggtagctggtctggcgaggttttatacacctgaaagaagagaatgtcaagacgaagtagccgtttacaagctaagcagcagccccagcccagccagacggaatccccccaagaagcccagataatccaggccaagaagaggaaaactacccaggatgttcaaaagaagtctggctaaacatgttaaaaaaggagagcagatatgttcatgacaaacattttgaagttctgcattctgacttggaaccacagatgaggtccatacttctagactggcttttagaggtatgtgaagtatacacacttcatagggaaacattttatcttgcacaagacttttttgatagatttatgttgacacaaaaggatataaataaaaatatgcttcaactcattggaattacctcattattcattgcttccaaacttgaggaaatctatgctcctaaactccaagagtttgcttacgtcactgatggtgcttgcagtgaagaggatatcttaaggatggaactcattatattaaaggctttaaaatgggaactttgtcctgtaacaatcatctcctggctaaatctctttctccaagttgatgctcttaaagatgctcctaaagttcttctacctcagtattctcaggaaacattcattcaaatagctcagcttttagatctgtgtattctagccattgattcattagagttccagtacagaatactgactgctgctgccttgtgccattttacctccattgaagtggttaagaaagcctcaggtttggagtgggacagtatttcagaatgtgtagattggatggtaccttttgtcaatgtagtaaaaagtactagtccagtgaagctgaagacttttaagaagattcctatggaagacagacataatatccagacacatacaaactatttggctatgctggaggaagtaaattacataaacaccttcagaaaagggggacagttgtcaccagtgtgcaatggaggcattatgacaccaccgaagagcactgaaaaaccaccaggaaaacactaaagaagataactaagcaaacaagttggaattcaccaagattgggtagaactggtatcactgaactactaaagttttacagaaagtagtgctgtgattgattgccctagccaattcacaagttacactgccattctgattttaaaacttacaattggcactaaagaatacatttaattatttcctatgttagctgttaaagaaacagcaggacttgtttacaaagatgtcttcattcccaaggttactggatagaagccaaccacagtctataccatagcaatgtttttcctttaatccagtgttactgtgtttatcttgataaactaggaattttgtcactggagttttggactggataagtgctaccttaaagggtatactaagtgatacagtactttgaatctagttgttagattctcaaaattcctacactcttgactagtgcaatttggttcttgaaaattaaatttaaacttgtttacaaaggtttagttttgtaataaggtgactaatttatctatagctgctatagcaagctattataaaacttgaatttctacaaatggtgaaatttaatgttttttaaactagtttatttgccttgccataacacattttttaactaataaggcttagatgaacatggtgttcaacctgtgctctaaacagtgggagtaccaaagaaattataaacaagataaatgctgtggctccttcctaactggggctttcttgacatgtaggttgcttggtaataacctttttgtatatcacaatttgggtgaaaaacttaagtaccctttcaaactatttatatgaggaagtcactttactactctaagatatccctaaggaatttttttttttaatttagtgtgactaaggctttatttatgtttgtgaaactgttaaggtcctttctaaattcctccattgtgagataaggacagtgtcaaagtgataaagcttaacacttgacctaaacttctattttcttaaggaagaagagtattaaatatatactgactcctagaaatctatttattaaaaaaagacatgaaaacttgctgtacataggctagctatttctaaatattttaaattagcttttctaaaaaaaaaatccagcctcataaagtagattagaaaactagattgctagtttattttgttatcagatatgtgaatctcttctccctttgaagaaactatacatttattgttacggtatgaagtcttctgtatagtttgtttttaaactaatatttgtttcagtattttgtctgaaaagaaaacaccactaattgtgtacatatgtattatataaacttaaccttttaatactgtttatttttagcccattgtttaaaaaataaaagttaaaaaaatttaactgcttaaaagt

SEQ ID NO: 19043 - protein, 288 aa, Homo sapiens
MLKKESRYVHDKHFEVLHSDLEPQMRSILLDWLLEVCEVYTLHRETFYLAQDFFDRFMLTQKDINKNMLQLIGITSLFIASKLEEIYAPKLQEFAYVTDGACSEEDILRMELIILKALKWELCPVTIISWLNLFLQVDALKDAPKVLLPQYSQETFIQIAQLLDLCILAIDSLEFQYRILTAAALCHFTSIEVVKKASGLEWDSISECVDWMVPFVNVVKSTSPVKLKTFKKIPMEDRHNIQTHTNYLAMLEEVNYINTFRKGGQLSPVCNGGIMTPPKSTEKPPGKH

SEQ ID NO: 19044 - DNA, 2724 bp, Homo sapiens
gtgcggggcgggaccggcccggcctatatattgggttggcgccggcgccagctgagccgagcggtagctggtctggcgaggttttatacacctgaaagaagagaatgtcaagacgaagtagccgtttacaagctaagcagcagccccagcccagccagacggaatccccccaagaagcccagataatccaggccaagaagaggaaaactacccaggatgtcaaaaaaagaagagaggaggtcaccaagaaacatcagtatgaaattaggaattgttggccacctgtattatctggggggatcagtccttgcattatcattgaaacacctcacaaagaaataggaacaagtgatttctccagatttacaaattacagatttaaaaatctttttattaatccttcacctttgcctgatttaagctggggatgttcaaaagaagtctggctaaacatgttaaaaaaggagagcagatatgttcatgacaaacattttgaagttctgcattctgacttggaaccacagatgaggtccatacttctagactggcttttagaggtatgtgaagtatacacacttcatagggaaacattttatcttgcacaagacttttttgatagatttatgttgacacaaaaggatataaataaaaatatgcttcaactcattggaattacctcattattcattgcttccaaacttgaggaaatctatgctcctaaactccaagagtttgcttacgtcactgatggtgcttgcagtgaagaggatatcttaaggatggaactcattatattaaaggctttaaaatgggaactttgtcctgtaacaatcatctcctggctaaatctctttctccaagttgatgctcttaaagatgctcctaaagttcttctacctcagtattctcaggaaacattcattcaaatagctcagcttttagatctgtgtattctagccattgattcattagagttccagtacagaatactgactgctgctgccttgtgccattttacctccattgaagtggttaagaaagcctcaggtttggagtgggacagtatttcagaatgtgtagattggatggtaccttttgtcaatgtagtaaaaagtactagtccagtgaagctgaagacttttaagaagattcctatggaagacagacataatatccagacacatacaaactatttggctatgctggaggaagtaaattacataaacaccttcagaaaagggggacagttgtcaccagtgtgcaatggaggcattatgacaccaccgaagagcactgaaaaaccaccaggaaaacactaaagaagataactaagcaaacaagttggaattcaccaagattgggtagaactggtatcactgaactactaaagttttacagaaagtagtgctgtgattgattgccctagccaattcacaagttacactgccattctgattttaaaacttacaattggcactaaagaatacatttaattatttcctatgttagctgttaaagaaacagcaggacttgtttacaaagatgtcttcattcccaaggttactggatagaagccaaccacagtctataccatagcaatgtttttcctttaatccagtgttactgtgtttatcttgataaactaggaattttgtcactggagttttggactggataagtgctaccttaaagggtatactaagtgatacagtactttgaatctagttgttagattctcaaaattcctacactcttgactagtgcaatttggttcttgaaaattaaatttaaacttgtttacaaaggtttagttttgtaataaggtgactaatttatctatagctgctatagcaagctattataaaacttgaatttctacaaatggtgaaatttaatgttttttaaactagtttatttgccttgccataacacattttttaactaataaggcttagatgaacatggtgttcaacctgtgctctaaacagtgggagtaccaaagaaattataaacaagataaatgctgtggctccttcctaactggggctttcttgacatgtaggttgcttggtaataacctttttgtatatcacaatttgggtgaaaaacttaagtaccctttcaaactatttatatgaggaagtcactttactactctaagatatccctaaggaatttttttttttaatttagtgtgactaaggctttatttatgtttgtgaaactgttaaggtcctttctaaattcctccattgtgagataaggacagtgtcaaagtgataaagcttaacacttgacctaaacttctattttcttaaggaagaagagtattaaatatatactgactcctagaaatctatttattaaaaaaagacatgaaaacttgctgtacataggctagctatttctaaatattttaaattagcttttctaaaaaaaaaatccagcctcataaagtagattagaaaactagattgctagtttattttgttatcagatatgtgaatctcttctccctttgaagaaactatacatttattgttacggtatgaagtcttctgtatagtttgtttttaaactaatatttgtttcagtattttgtctgaaaagaaaacaccactaattgtgtacatatgtattatataaacttaaccttttaatactgtttatttttagcccattgtttaaaaaataaaagttaaaaaaatttaactgcttaaaagt

SEQ ID NO: 19045 - protein, 404 aa, Homo sapiens; identical to SEQ ID NO: 2320

SEQ ID NO: 19046 - DNA, 2592 bp, Homo sapiens
gtgcggggcgggaccggcccggcctatatattgggttggcgccggcgccagctgagccgagcggtagctggtctggcgaggttttatacacctgaaagaagagaatgtcaagacgaagtagccgtttacaagctaagcagcagccccagcccagccagacggaatccccccaagaagcccagataatccaggccaagaagaggaaaactacccaggatgtcaaaaaaagaagagaggaggtcaccaagaaacatcagtatgaaattaggaattgttggccacctgtattatctggggggatcagtccttgcattatcattgaaacacctcacaaagaaataggaacaagtgatttctccagatttacaaattacagatttaaaaatctttttattaatccttcacctttgcctgatttaagctggggatgttcaaaagaagtctggctaaacatgttaaaaaaggagagcagatatgttcatgacaaacattttgaagttctgcattctgacttggaaccacagatgaggtccatacttctagactggcttttagaggtatgtgaagtatacacacttcatagggaaacattttatctttttgcttacgtcactgatggtgcttgcagtgaagaggatatcttaaggatggaactcattatattaaaggctttaaaatgggaactttgtcctgtaacaatcatctcctggctaaatctctttctccaagttgatgctcttaaagatgctcctaaagttcttctacctcagtattctcaggaaacattcattcaaatagctcagcttttagatctgtgtattctagccattgattcattagagttccagtacagaatactgactgctgctgccttgtgccattttacctccattgaagtggttaagaaagcctcaggtttggagtgggacagtatttcagaatgtgtagattggatggtaccttttgtcaatgtagtaaaaagtactagtccagtgaagctgaagacttttaagaagattcctatggaagacagacataatatccagacacatacaaactatttggctatgctggaggaagtaaattacataaacaccttcagaaaagggggacagttgtcaccagtgtgcaatggaggcattatgacaccaccgaagagcactgaaaaaccaccaggaaaacactaaagaagataactaagcaaacaagttggaattcaccaagattgggtagaactggtatcactgaactactaaagttttacagaaagtagtgctgtgattgattgccctagccaattcacaagttacactgccattctgattttaaaacttacaattggcactaaagaatacatttaattatttcctatgttagctgttaaagaaacagcaggacttgtttacaaagatgtcttcattcccaaggttactggatagaagccaaccacagtctataccatagcaatgtttttcctttaatccagtgttactgtgtttatcttgataaactaggaattttgtcactggagttttggactggataagtgctaccttaaagggtatactaagtgatacagtactttgaatctagttgttagattctcaaaattcctacactcttgactagtgcaatttggttcttgaaaattaaatttaaacttgtttacaaaggtttagttttgtaataaggtgactaatttatctatagctgctatagcaagctattataaaacttgaatttctacaaatggtgaaatttaatgttttttaaactagtttatttgccttgccataacacattttttaactaataaggcttagatgaacatggtgttcaacctgtgctctaaacagtgggagtaccaaagaaattataaacaagataaatgctgtggctccttcctaactggggctttcttgacatgtaggttgcttggtaataacctttttgtatatcacaatttgggtgaaaaacttaagtaccctttcaaactatttatatgaggaagtcactttactactctaagatatccctaaggaatttttttttttaatttagtgtgactaaggctttatttatgtttgtgaaactgttaaggtcctttctaaattcctccattgtgagataaggacagtgtcaaagtgataaagcttaacacttgacctaaacttctattttcttaaggaagaagagtattaaatatatactgactcctagaaatctatttattaaaaaaagacatgaaaacttgctgtacataggctagctatttctaaatattttaaattagcttttctaaaaaaaaaatccagcctcataaagtagattagaaaactagattgctagtttattttgttatcagatatgtgaatctcttctccctttgaagaaactatacatttattgttacggtatgaagtcttctgtatagtttgtttttaaactaatatttgtttcagtattttgtctgaaaagaaaacaccactaattgtgtacatatgtattatataaacttaaccttttaatactgtttatttttagcccattgtttaaaaaataaaagttaaaaaaatttaactgcttaaaagt

SEQ ID NO: 19047 - protein, 360 aa, Homo sapiens; identical to SEQ ID NO: 19041

SEQ ID NO: 19048 - DNA, 1709 bp, Homo sapiens
aggttttatacacctgaaagaagagaatgtcaagacgaagtagccgtttacaagctaagcagcagccccagcccagccagacggaatccccccaagaagcccagataatccaggccaagaagaggaaaactacccaggatgttcaaaagaagtctggctaaacatgttaaaaaaggagagcagatatgttcatgacaaacattttgaagttctgcattctgacttggaaccacagatgaggtccatacttctagactggcttttagaggtatgtgaagtatacacacttcatagggaaacattttatcttgcacaagacttttttgatagatttatgttgacacaaaaggatataaataaaaatatgcttcaactcattggaattacctcattattcattgcttccaaacttgaggaaatctatgctcctaaactccaagagtttgcttacgtcactgatggtgcttgcagtgaagaggatatcttaaggatggaactcattatattaaaggctttaaaatgggaactttgtcctgtaacaatcatctcctggctaaatctctttctccaagttgatgctcttaaagatgctcctaaagttcttctacctcagtattctcaggaaacattcattcaaatagctcagcttttagatctgtgtattctagccattgattcattagagttccagtacagaatactgactgctgctgccttgtgccattttacctccattgaagtggttaagaaagcctcaggtttggagtgggacagtatttcagaatgtgtagattggatggtaccttttgtcaatgtagtaaaaagtactagtccagtgaagctgaagacttttaagaagattcctatggaagacagacataatatccagacacatacaaactatttggctatgctggaggaagtaaattacataaacaccttcagaaaagggggacagttgtcaccagtgtgcaatggaggcattatgacaccaccgaagagcactgaaaaaccaccaggaaaacactaaagaagataactaagcaaacaagttggaattcaccaagattgggtagaactggtatcactgaactactaaagttttacagaaagtagtgctgtgattgattgccctagccaattcacaagttacactgccattctgattttaaaacttacaattggcactaaagaatacatttaattatttcctatgttagctgttaaagaaacagcaggacttgtttacaaagatgtcttcattcccaaggttactggatagaagccaaccacagtctataccatagcaatgtttttcctttaatccagtgttactgtgtttatcttgataaactaggaattttgtcactggagttttggactggataagtgctaccttaaagggtatactaagtgatacagtactttgaatctagttgttagattctcaaaattcctacactcttgactagtgcaatttggttcttgaaaattaaatttaaacttgtttacaaaggtttagttttgtaataaggtgactaatttatctatagctgctatagcaagctattataaaacttgaatttctacaaatggtgaaatttaatgttttttaaactagtttatttgccttgccataacacattttttaactaataaggcttagatgaacatggtgttcaacctgtgctctaaacagtgggagtacc

SEQ ID NO: 19049 - protein, 288 aa, Homo sapiens; identical to SEQ ID NO: 19043

SEQ ID NO: 19050 - DNA, 1040 bp, Homo sapiens
tggaaccacagatgaggtccatacttctagactggcttttagaggtatgtgaagtatacacacttcatagggaaacattttatcttgcacaagacttttttgatagatttatgttgacacaaaaggatataaataaaaatatgcttcaactcattggaattacctcattattcattgcttccaaacttgaggaaatctatgctcctaaactccaagagtttgcttacgtcactgatggtgcttgcagtgaagaggatatcttaaggatggaactcattatattaaaggctttaaaatgggaactttgtcctgtaacaatcatctcctggctaaatctctttctccaagttgatgctcttaaagatgctcctaaagttcttctacctcagtattctcaggaaacattcattcaaatagctcagctcttctcccatttctcctaccttctggaccaatgaggacaaacagaattgaagtttaattccactgcacaagtatcttctcaaatctgtgaaatctaccccttttacactataccattccactgctactagttcagctcttattgcctagattatacagccttttaactaatctcactgcttaataaacatgttttcttctagtctgtctgcttcactgcattctaaggtatctttcttaaaatggaactttgatttaaaaatcttccagtagcttcaagaatcagcctataaaattctgacttcttaaagaccctttgtgatccaatctagaccatgcctctttctagccaccacccctcatctttcttgataagaaatgaaggtactccttatttatttttcaccttaggagttctgaactgtgaactgagttccaagtaatgtccctatacctagaacattctctgcctcctactcttcctggctcccttatcttttaagacccatttatggcaatttgaggccatcactatcttttccaatctggattaggtgcccttcctgctagtacatgtcacactgtattgcaacagtccttccttgtctacttccttc

SEQ ID NO: 19051 - protein, 148 aa, Homo sapiens
MRSILLDWLLEVCEVYTLHRETFYLAQDFFDRFMLTQKDINKNMLQLIGITSLFIASKLEEIYAPKLQEFAYVTDGACSEEDILRMELIILKALKWELCPVTIISWLNLFLQVDALKDAPKVLLPQYSQETFIQIAQLFSHFSYLLDQ

SEQ ID NO: 19052 - DNA, 377 bp, Homo sapiens
gagtgaagaggtgccagaatccgcgaagagggtcgacgaatgcgctgccgcggaggcaacaatggccatgagggattcaaggattatgcgtctctgcaccctacaatacaccaactggcagttccatcatttgaaagaaaatcttcaaggtaaagacatttacaatgacacaaaaacctttcaaaggcatcatggtcctaaagggctttccccaagggacagcacagtgtgttccaggccctgacaagaggtttaagacctgtgacacagactgaagctctcctggcatactctgaagctctcctggcaccctcccctttatgcttcacaggtgtttctcctaataaatttcttgtatgtctcatcccatctgggaa

SEQ ID NO: 19053 - protein, 60 aa, Homo sapiens
MAMRDSRIMRLCTLQYTNWQFHHLKENLQGKDIYNDTKTFQRHHGPKGLSPRDSTVCSRP

SEQ ID NO: 19054 - DNA, 456 bp, Homo sapiens
atcatggcaacaggacttttagaagcacgtcctctgaaagccattttctgcctgtggttggaaagggactgtgagtctttcctcaggaagtcagtagccctacctggtgaggtgatcaagagtttgctagcacaagagatgaagcaacaatggccatgagggattcaaggattatgcgtctctgcaccctacaatacaccaactggcagttccatcatttgaaagaaaatcttcaaggtaaagacatttacaatgacacaaaaacctttcaaaggcatcatggtcctaaagggctttccccaagggacagcacagtgtgttccaggccctgacaagaggtttaagacctgtgacacagactgaagctctcctggcatactctgaagctctcctggcaccctcccctttatgcttcacaggtgtttctcctaataaatttcttgtatgtctcatccc

SEQ ID NO: 19055 - protein, 60 aa, Homo sapiens; identical to SEQ ID NO: 19053

SEQ ID NO: 19056 - DNA, 937 bp, Homo sapiens
gagacgggctttcaccgtggactctatctcctgacctcgtgatccgcccgcataggcctcccaaagtgctgggattacaagcgtgagcaaccgcgcccggcccccttcagagatggggccttgctgtgttgtccaggctggactcaaactcctgggcccaagcatttctcacacctcagtttgtggagtagctgggattacaggcatgtgtcaccatgctccaaaattcatatgttgaaacctgattcccactgtgatggttttgggtaaggcctgtgggagatgattaggttgtgagggcggagcacccatgaatcggattagtgctcttaaaacagtccgaagagaccagcattcttacttttcatcatgtgaggacacagcgagaagacattgtctaggaacaaagaaataggccttcatgatacaccgaatctgccagcacctttattttggattttccagactccagaactgagagggacaattttttattctttataagtcacttagtctatggtattttgttatagcaacctcaatggactaagacaaatgagtacgaaaagtgttaagcacatgaatactcttaatccagcaattctaattctaggagattataaaagcagacaaaggtattgctatgggaatgttcattgtagcatcatgctagtaccaaacttggcccaacaataggaaattgaatcataaataccccacatttatttgttaaatactttgaaactattaaaaatatgtggtaaaatattatttaataccatggggaagtattcacaatacatgattgacttaaaaaattgtaagacacaatgtaccgtaatagttccttttgaaaagaatgtactatcttttcaatggccactgtctcttgaactgttggccttttcacacctgaatagtaataaaacccacattt

SEQ ID NO: 19057 - protein, 59 aa, Homo sapiens [sequence omitted]

SEQ ID NO: 19058 - DNA, 729 bp, Homo sapiens
atgacccaggggaaatttggaaggttccagaggaagacattaggctctattcttcaggttaatcaccaggaaaatggcaacaactggagacagaatatcagatttgagagcaaaggagtctgttctcatctttcaggtgggacctggggaagtgctgcagcttctcatgcagcaccagcttttaactctggcaaagtaaatattgtcgccatcaatgactccttcattgatctcaactacatagtctacatgttccagtataattccacccatggcaagttccatggcactgtcaaggctgtgaacagaaagtgtgtcaccaatggcaatactatcaccatcttccaggagcaagatcccaccaaaatcaaatgggttgatgctggcattgattatgctgtggaatcctccagtatcttcagtgtcttggagatggctggggctcacttagaaggaggacttatgaccacagtccatgccatcattgctactcagaagactgtggatgtcccctctgggaaactgtggtgtgagggcagggctctccagaacatcattcctgcatctactggtgctgccgagggtgtgggcaaggccatgcctgagctgaatgggaagctcactggcatggtcttccatatcctcactgccaatgtatcagtcgtggacttgatctgccatatggagaaacttaccagatatgatgatatcaataaggtggtaaagtaa

SEQ ID NO: 19059 - protein, 242 aa, Homo sapiens
MTQGKFGRFQRKTLGSILQVNHQENGNNWRQNIRFESKGVCSHLSGGTWGSAAASHAAPAFNSGKVNIVAINDSFIDLNYIVYMFQYNSTHGKFHGTVKAVNRKCVTNGNTITIFQEQDPTKIKWVDAGIDYAVESSSIFSVLEMAGAHLEGGLMTTVHAIIATQKTVDVPSGKLWCEGRALQNIIPASTGAAEGVGKAMPELNGKLTGMVFHILTANVSVVDLICHMEKLTRYDDINKVVK

SEQ ID NO: 19060 - DNA, 4724 bp, Homo sapiens
atggatactcccagggtcctgctctcggccgtcttcctcatcagttttctgtgggatttgcccggtttccagcaggcttccatctcatcctcctcgtcgtccgccgagctgggttccaccaagggcatgcgaagccgcaaggaaggcaagatgcagcgggcgccgcgcgacagtgacgcgggccgggagggccaggaaccacagccgcggcctcaggacgaaccccgggctcagcagccccgggcgcaggagccgccaggcaggggtccgcgcgtggtgccccacgagtacatgctgtcaatctacaggacttactccatcgctgagaagctgggcatcaatgccagctttttccagtcttccaagtcggctaatacgatcaccagctttgtagacaggggactagcctccccacccccatccccgccactgcgctgtatgcccccgatcctggagatagaggagggattgcatgtgcacccagtctggggaggcctctgttcccgagccaaggcctccagactagcaggaccgagatccacaagtaccgctacaaccccggaatgcggtggagggctggggatgcgagcggtccacagcgggaggagacgctgcatgaccacccggacagcatcttcaaaggcgctgtctcctccgcgtctccgggttctcagaaaatgcgaagaaaggcagttcgttgactgggaaggcgccttcgtggaggacctggttgctcccctgggctcccgggtgacttaccggtcgacagtgcagggaaggccgcccctagccaaccccccagagacaaaaggagtttccttaaagcgccttggagctcctgataggactggccctgtggtcagatcgtgcccccacaaaaggacaccaaagtggggaaagaaacgaatccttaggcctctcagggctgcactgccagccagggagtcatttgggttagcacaagggctgtcactggccttgacccctgcagaagaggaaacctgcaagaagggctggatccttgatgtggctggggtggaggtcatctgttcacctggcactgtgggagggacagcagtggtgacagggcctcacaggactgagaagaatcgggatgatgagcacctttcctccactcacttctggaatcttgtggagagaagtggaccacaaggactgaagtccagagaactggatttcaaaggaagtcaagagaaggacagctgccaggaaacgaagataagccctaatccagcaattgtaactggaaatgtttatatgtctaatgttcagcaaacaccgttaacagaggtcagcaggcagcaggcaaagtgtcttcagggtaacagtgcatggtgttgtattcactccccaggttggatgcctcctctgagctatttctgtgatgcaggtttagacaggttggggcatgtgcgtaagagtgaaccagccagtgctacggtcagccccgagtacaaactgggtgtggcagaggctccagagccagtgcccccgggctacatctggactgacgatctctcgcacactcctctccggagacagaagtatttgtttgatgtgtccatgctctcagacaaagaagagctggtgggcgcggagctgcggctctttcgccaggcgccctcagcgccctgggggccaccagccgggccgctccacgtgcagctcttcccttgcctttcgcccctactgctggacgcgcggaccctggacccgcagggggcgccgccggccggctgggaagtcttcgacgtgtggcagggcctgcgccaccagccctggaagcagctgtgcttggagctgcgggccgcatggggcgagctggacgccggggaggccgaggcgcgcgcgcggggaccccagcaaccgccgcccccggacctgcggagtctgggcttcggccggagggtgcggcctccccaggagcgggccctgctggtggtattcaccagatcccagcgcaagaacctgttcgcagagatgcgcgagcagctgggctcggccgaggctgcgggcccgggcgcgggcgccgaggggtcgtggccgccgccgtcgggcgccccggatgccaggccttggctgccctcgcccggccgccggcggcggcgcacggccttcgccagtcgccatggcaagcggcacggcaagaagtccaggctacgctgcagcaagaagcccctgcacgtgaacttcaaggagctgggctgggacgactggattatcgcgcccctggagtacgaggcctatcactgcgagggtgtatgcgacttcccgctgcgctcgcacctggagcccaccaaccacgccatcatccagacgctgatgaactccatggaccccggctccaccccgcccagctgctgcgtgcccaccaaattgactcccatcagcattctatacatcgacgcgggcaataatgtggtctacaagcagtacgaggacatggtggtggagtcgtgcggctgcaggtagcggtgcctttcccgccgccttggcccggaaccaaggtgggccaaggtccgccttgcaggggaggcctggctgcagagaggcggaggaggaagctggcgctgggggaggctgagggtgagggaacagcctggatgtgagagccggtgggagagaagggagcgcagccttcccagtaacttctacctgccagcccagagggaaatatggattttcacaccttgcctggccaccctggaaaaacaagccaaggaggatttcttttgttctgttttctctctctctctctctctctctctctctctctctctctctctctctattactgtggctttggatttccttatgtgtcttacaggctttgatagaaggggaggggaggagagatgcatacccgtttctcaactgctccatggattgaaaaaataacagtttaaaaagggaaacaatgtgggaggaagaatcaccgttgacgcatcttgatttggttggtttttacatgtgtaaagaaggtggggtctctggccatgtcatagcccatgtcttgtgccctcccacacagaaagtgttagatagggaaattggcaaaaagaatagttaagtcaggaatggtcctgcctatagaagagctttgagagaggtgggcccacgggtgcccctctcacccatttgtgtactctgtgagtttaccagctctgccctggcctctttcggtaccaggaactggcaaccttcatctcactcctgagggcccaggtctctgccttcattgttgctttttctggtgggggcaaggggagctggtatggatggaatgacaagaattagtccaaatggaaccccttgaaggataatgagaaaccacaaggcctgcctctgactggggctgacacggaggtgcattagcccaggctggaggtagcccacccaaatgccctttctgattctaattgatttctttcaacagaatttgccaaaattcagacatgcacttctaaggggaaggtgattttccagttcaaaaaaatgggcaggagtggggaacaaaacaattaacgtaagagctacaaaggagggaaaaggaaccaagaagtagaaggagtcccatcaggagggaagatggtgggcctcagggaggatggggatcaagggacaggccaggagccaggagtggggaagggagggatgaaaggggacacaagtccctgtctctgaagtttctttaaaatctgagttccctcccctctctttgacattcctgaaagattaccagccagcaatagcccagggctcccccaaaagaattggttcagattgtaattatcagttaggcaatgtttttaaaacttagtaatgagaaactgtgaaaagagccaagtgttacattgagcttggggtgggagatggggaacaggcagtgaggaaggagacaggggtggaattcgtcttctgggaggaagctggagagagcacagtgaaattgaaatacccattcccagatagtcaaaaacatgaactttcccccagcctgcaccagtattgttttcaaacattgcccatgagtaggccctttgaagagttagcttcctcctcatctttgactataaaattgtttaatcaatggaatttgtaccagccttttaaaaagttttagtttttcctaagtgattttgctctcttccaatctaaacctgttgcttgtttggttcagagaactacaaactgtcaaagaaagggtggggatgataagaaatgctaatataaaaatgctaagtgaaaaaaagacttggccaggagaaataatttaaaatgcacatttgctttggatgcactgttgttctgttaaggctgtatatatttgtttatttaaggtgactgaaagtgcaaagaggaaatggacagcatgcaattcatcctaatgtacaaaacgttatatgcactcaaatgttataatttctaatatttttaaagtttatattcgagttgtacaaagttaagcattaatcagatatttcattttttcataatgttaccattttcttaaatattattacaaaattttaagtctgtctaatggagagttttttttaaactgtctacctcatataatacaagtatttacaacgctaaagttaccagaggtcaatgaataatcaaaacattttttacagtacacctttcctggatgatatgcaatcgaatgctatattattaaacgcatttttctccttaat

SEQ ID NO: 19061 - protein, 830 aa, Homo sapiens
MDTPRVLLSAVFLISFLWDLPGFQQASISSSSSSAELGSTKGMRSRKEGKMQRAPRDSDAGREGQEPQPRPQDEPRAQQPRAQEPPGRGPRVVPHEYMLSIYRTYSIAEKLGINASFFQSSKSANTITSFVDRGLASPPPSPPLRCMPPILEIEEGLHVHPVWGGLCSRAKASRLAGPRSTSTATTPECGGGLGMRAVHSGRRRCMTTRTASSKALSPPRLRVLRKCEERQFVDWEGAFVEDLVAPLGSRVTYRSTVQGRPPLANPPETKGVSLKRLGAPDRTGPVVRSCPHKRTPKWGKKRILRPLRAALPARESFGLAQGLSLALTPAEEETCKKGWILDVAGVEVICSPGTVGGTAVVTGPHRTEKNRDDEHLSSTHFWNLVERSGPQGLKSRELDFKGSQEKDSCQETKISPNPAIVTGNVYMSNVQQTPLTEVSRQQAKCLQGNSAWCCIHSPGWMPPLSYFCDAGLDRLGHVRKSEPASATVSPEYKLGVAEAPEPVPPGYIWTDDLSHTPLRRQKYLFDVSMLSDKEELVGAELRLFRQAPSAPWGPPAGPLHVQLFPCLSPLLLDARTLDPQGAPPAGWEVFDVWQGLRHQPWKQLCLELRAAWGELDAGEAEARARGPQQPPPPDLRSLGFGRRVRPPQERALLVVFTRSQRKNLFAEMREQLGSAEAAGPGAGAEGSWPPPSGAPDARPWLPSPGRRRRRTAFASRHGKRHGKKSRLRCSKKPLHVNFKELGWDDWIIAPLEYEAYHCEGVCDFPLRSHLEPTNHAIIQTLMNSMDPGSTPPSCCVPTKLTPISILYIDAGNNVVYKQYEDMVVESCGCR

SEQ ID NO: 19062 - DNA, 824 bp, Homo sapiens
gctggcgaggcggcggcggcggcctaccgggttttccccccaaaaggcttcgtaaccactaatgtgccctttgtggtctcaagcctgggccgcgtttcccctagacctcctctgggctgggctggctcgttctcgttgacgtctcaaatgtcacctcctccaagtagccacccctgagcaccctgatctaagtctgcctttcccagtaacactctgtctgcctccaccaacccacgggagctaggccgatgtcattgtccaccttgctcccctcagtgcctagggcggttcctgacctggagcacacgccggtcagaaaccacaaggatgtttgagcacgtttttagatcccctcccccatcggcaactccaccgcgcgaactcccagaggcccgagagcctcccgcgttgaggaaaacgctatgtccgtctcagattagcctcctttgccaaggaaactcgccaagaatccctgcgcaacctgcgctctcgctgtagagcatactagggtaccggcaaaagcactgctgagttgattacaccactctgcggctcaggtccacccagaaacccgctgttttgcataacatgaggtaccagatgaacttcaatcgcgaggggactatgcaactctctgaatgccctccccgcagccgggctattcccagaatggtcctgctctgccctttggtaatcacgacccagaaggtgaatggagaagccaacaaacaatcagtggcaaactgtcctgagagttatttctagggcatcaagttcttcaaggatgttcccatctcgttttggtttttatctgttccttactg

SEQ ID NO: 19063 - protein, 58 aa, Homo sapiens
MRYQMNFNREGTMQLSECPPRSRAIPRMVLLCPLVITTQKVNGEANKQSVANCPESYF

SEQ ID NO: 19064 - DNA, 980 bp, Homo sapiens
ttcgcattaagagggcactggacctgaacttgaagcatcagatcttgcctaaagagcagtggaccaaatatgaagaggaaaatttctaccttgaaccgtatctgaaagaggttattcgggaaagaaaagaaagagaagaatgggcaaagaagtaatcatgtagttgaagtctgtggatgcagctgttatgaagatggttaaacttgaaacaaacaattttaagaattatttggtctgaagatgttttactttaaataaatgtctattgtaatggctggagtttttgaattccaaaccttatactgaataactactgaatccctttactgttaaatttttttccaaactttcaagatatatttagttgtgtttaactgctacttggagctcagaagccactttatcagttttcctcactggttggatagcctatcagtttatggaaggatataacttccgtaagttacatccttatggaagctactgaataaaagaagggggtatgcaccccctagtttgccaagattgagaaatagcctcttcactggtatgcaaacagatttgattttgcatcctatcatttaaaaagaaattatgtctgcaccccaacataggcatacttaagtaatatacatactcctgtgctaacatgtatactagaaaacaaaaagatgttagaaaaataaaagtataaagacaaatcatactgtccccatatcccagtgacttttccactttggaaatgattgttatgaagtttaagggttggatactagtcagttaaaagttttaagattatagggtaatttttaaaaatataaattagaatcattggcaaggcatggtggctcatgcctgtaatcccagcactttgggaggccgaggcgggcgggtcacctgaagtcaggaatttgagaccagcctggccaacatggtgaaaccctgtctctactaaaaatacaaaaaattagctaggcgtg

SEQ ID NO: 19065 - protein, 50 aa, Homo sapiens
RIKRALDLNLKHQILPKEQWTKYEEENFYLEPYLKEVIRERKEREEWAKK

SEQ ID NO: 19066 - DNA, 1454 bp, Homo sapiens
gggttaatgcgagatgatacaatatacgaggatgaagatgtaaaagaagccataagaagacttcctgagaacctttataatgacaggatgtttcgcattaagagggcactggacctgaacttgaagcatcagatcttgcctaaagagcagtggaccaaatatgaagaggtctttgctgttccagctctgcactctgcttcctacttagatgaaaagatcagcccattgagtgtccctccagatcccaagaagagcttctgtgaagcaaactctcaccccttgaactgcattgaaactaggcaaaggcctgtggacattcatttctttttcttcccgaaaagacttccccctcataacctatcaaagcaacttatcacaccatcaccacagatttgacattttaaaaagcagatagttcttaggttgagaatatgttttctaaaattggaaattcaaaagtaattgcttttttcttgttattgaagacctgttgagtgtttgggatatatcagtacgtgatggtaacatataatatttcattcattctttaggaaaatttctaccttgaaccgtatctgaaagaggttattcgggaaagaaaagaaagagaagaatgggcaaagaagtaatcatgtagttgaagtctgtggatgcagctgttatgaagatggttaaacttgaaacaaacaattttaagaattatttggtctgaagatgttttactttaaataaatgtctattgtaatggctggagtttttgaattccaaaccttatactgaataactactgaatccctttactgttaaatttttttccaaactttcaagatatatttagttgtgtttaactgctacttggagctcagaagccactttatcagttttcctcactggttggatagcctatcagtttatggaaggatataacttccgtaagttacatccttatggaagctactgaataaaagaagggggtatgcaccccctagtttgccaagattgagaaatagcctcttcactggtatgcaaacagatttgattttgcatcctatcatttaaaaagaaattatgtctgcaccccaacataggcatacttaagtaatatacatactcctgtgctaacatgtatactagaaaacaaaaagatgttagaaaaataaaagtataaagacaaatcatactgtccccatatcccagtgacttttccactttggaaatgattgttatgaagtttaagggttggatactagtcagttaaaagttttaagattatagggtaatttttaaaaatataaattagaatcattggcaaggcatggtggctcatgcctgtaatcccagcactttgggaggccgaggcgggcgggtcacctgaagtcaggaatttgagaccagcctggccaacatggtgaaaccctgtctctactaaaaatacaaaaaattagctaggcgtg

SEQ ID NO: 19067 - protein, 129 aa, Homo sapiens
MRDDTIYEDEDVKEAIRRLPENLYNDRMFRIKRALDLNLKHQILPKEQWTKYEEVFAVPALHSASYLDEKISPLSVPPDPKKSFCEANSHPLNCIETRQRPVDIHFFFFPKRLPPHNLSKQLITPSPQI

SEQ ID NO: 19068 - DNA, 1208 bp, Homo sapiens
gggttaatgcgagatgatacaatatacgaggatgaagatgtaaaagaagccataagaagacttcctgagaacctttataatgacaggatgtttcgcattaagagggcactggacctgaacttgaagcatcagatcttgcctaaagagcagtggaccaaatatgaagaggtctttgctgttccagctctgcactctgcttcctacttagatgaaaagatcagcccattgagtgtccctccagatcccaagaagagcttctgtgaagcaaactctcaccccttgaactgcattgaaactaggcaaaggaaaatttctaccttgaaccgtatctgaaagaggttattcgggaaagaaaagaaagagaagaatgggcaaagaagtaatcatgtagttgaagtctgtggatgcagctgttatgaagatggttaaacttgaaacaaacaattttaagaattatttggtctgaagatgttttactttaaataaatgtctattgtaatggctggagtttttgaattccaaaccttatactgaataactactgaatccctttactgttaaatttttttccaaactttcaagatatatttagttgtgtttaactgctacttggagctcagaagccactttatcagttttcctcactggttggatagcctatcagtttatggaaggatataacttccgtaagttacatccttatggaagctactgaataaaagaagggggtatgcaccccctagtttgccaagattgagaaatagcctcttcactggtatgcaaacagatttgattttgcatcctatcatttaaaaagaaattatgtctgcaccccaacataggcatacttaagtaatatacatactcctgtgctaacatgtatactagaaaacaaaaagatgttagaaaaataaaagtataaagacaaatcatactgtccccatatcccagtgacttttccactttggaaatgattgttatgaagtttaagggttggatactagtcagttaaaagttttaagattatagggtaatttttaaaaatataaattagaatcattggcaaggcatggtggctcatgcctgtaatcccagcactttgggaggccgaggcgggcgggtcacctgaagtcaggaatttgagaccagcctggccaacatggtgaaaccctgtctctactaaaaatacaaaaaattagctaggcgtg

SEQ ID NO: 19069 - protein, 108 aa, Homo sapiens
MRDDTIYEDEDVKEAIRRLPENLYNDRMFRIKRALDLNLKHQILPKEQWTKYEEVFAVPALHSASYLDEKISPLSVPPDPKKSFCEANSHPLNCIETRQRKISTLNRI

SEQ ID NO: 19070 - DNA, 1817 bp, Homo sapiens
ctctttctggtcaaaatggctggtaagcaggccgtttcagcatcaggcaagtggctggatggtattcgaaaatggtattacaatgctgcaggattcaataaactggggttaatgcgagatgatacaatatacgaggatgaagatgtaaaagaagccataagaagacttcctgagaacctttataatgacaggatgtttcgcattaagagggcactggacctgaacttgaagcatcagatcttgcctaaagagcagtggaccaaatatgaagaggtagcacagctttatctacctgacagtgttgctcattaaggatggagttttagaaacaagagaaacatgttcatttgcatagtgttagagttctctgagtcatgtcaaataaatatgtgaggttaataaagcaaatgttatttccgttttagaagaaaaccacattgagtcttacgtgtgaaatgattcttctgaaattactaagcaagtctctaatatagagagccaggactaaaatccaggtctgttgcctcccaggtctttgctgttccagctctgcactctgcttcctacttagatgaaaagatcagcccattgagtgtccctccagatcccaagaagagcttctgtgaagcaaactctcaccccttgaactgcattgaaactaggcaaaggcctgtggacattcatttctttttcttcccgaaaagacttccccctcataacctatcaaagcaacttatcacaccatcaccacagatttgacattttaaaaagcagatagttcttaggttgagaatatgttttctaaaattggaaattcaaaagtaattgcttttttcttgttattgaagacctgttgagtgtttgggatatatcagtacgtgatggtaacatataatatttcattcattctttaggaaaatttctaccttgaaccgtatctgaaagaggttattcgggaaagaaaagaaagagaagaatgggcaaagaagtaatcatgtagttgaagtctgtggatgcagctgttatgaagatggttaaacttgaaacaaacaattttaagaattatttggtctgaagatgttttactttaaataaatgtctattgtaatggctggagtttttgaattccaaaccttatactgaataactactgaatccctttactgttaaatttttttccaaactttcaagatatatttagttgtgtttaactgctacttggagctcagaagccactttatcagttttcctcactggttggatagcctatcagtttatggaaggatataacttccgtaagttacatccttatggaagctactgaataaaagaagggggtatgcaccccctagtttgccaagattgagaaatagcctcttcactggtatgcaaacagatttgattttgcatcctatcatttaaaaagaaattatgtctgcaccccaacataggcatacttaagtaatatacatactcctgtgctaacatgtatactagaaaacaaaaagatgttagaaaaataaaagtataaagacaaatcatactgtccccatatcccagtgacttttccactttggaaatgattgttatgaagtttaagggttggatactagtcagttaaaagttttaagattatagggtaatttttaaaaatataaattagaatcattggcaaggcatggtggctcatgcctgtaatcccagcactttgggaggccgaggcgggcgggtcacctgaagtcaggaatttgagaccagcctggccaacatggtgaaaccctgtctctactaaaaatacaaaaaattagctaggcgtg

SEQ ID NO: 19071 - protein, 98 aa, Homo sapiens
MAGKQAVSASGKWLDGIRKWYYNAAGFNKLGLMRDDTIYEDEDVKEAIRRLPENLYNDRMFRIKRALDLNLKHQILPKEQWTKYEEVAQLYLPDSVAH

SEQ ID NO: 19072 - DNA, 1319 bp, Homo sapiens
acgcttctctttctggtcaaaatggctggtaagcaggccgtttcagcatcaggcaagtggctggatggtattcgaaaatggtattacaatgctgcaggattcaataaactggggttaatgcgagatgatacaatatacgaggatgaagatgtaaaagaagccataagaagacttcctgagaacctttataatgacaggatgtttcgcattaagagggcactggacctgaacttgaagcatcagatcttgcctaaagagcagtggaccaaatatgaagaggtctttgctgttccagctctgcactctgcttcctacttagatgaaaagatcagcccattgagtgtccctccagatcccaagaagagcttctgtgaagcaaactctcaccccttgaactgcattgaaactaggcaaaggaaaatttctaccttgaaccgtatctgaaagaggttattcgggaaagaaaagaaagagaagaatgggcaaagaagtaatcatgtagttgaagtctgtggatgcagctgttatgaagatggttaaacttgaaacaaacaattttaagaattatttggtctgaagatgttttactttaaataaatgtctattgtaatggctggagtttttgaattccaaaccttatactgaataactactgaatccctttactgttaaatttttttccaaactttcaagatatatttagttgtgtttaactgctacttggagctcagaagccactttatcagttttcctcactggttggatagcctatcagtttatggaaggatataacttccgtaagttacatccttatggaagctactgaataaaagaagggggtatgcaccccctagtttgccaagattgagaaatagcctcttcactggtatgcaaacagatttgattttgcatcctatcatttaaaaagaaattatgtctgcaccccaacataggcatacttaagtaatatacatactcctgtgctaacatgtatactagaaaacaaaaagatgttagaaaaataaaagtataaagacaaatcatactgtccccatatcccagtgacttttccactttggaaatgattgttatgaagtttaagggttggatactagtcagttaaaagttttaagattatagggtaatttttaaaaatataaattagaatcattggcaaggcatggtggctcatgcctgtaatcccagcactttgggaggccgaggcgggcgggtcacctgaagtcaggaatttgagaccagcctggccaacatggtgaaaccctgtctctactaaaaatacaaaaaattagctaggcgtg

SEQ ID NO: 19073 - protein, 140 aa, Homo sapiens
MAGKQAVSASGKWLDGIRKWYYNAAGFNKLGLMRDDTIYEDEDVKEAIRRLPENLYNDRMFRIKRALDLNLKHQILPKEQWTKYEEVFAVPALHSASYLDEKISPLSVPPDPKKSFCEANSHPLNCIETRQRKISTLNRI

SEQ ID NO: 19074 - DNA, 1265 bp, Homo sapiens
agcggcctttctctgttcgcgatgtgacgtaacgcgcctgcggactgggcccagcttgtcctctatgacttacccagaaggcaacgcttctctttctggtcaaaatggctggtaagcaggccgtttcagcatcaggcaagtggctggatggtattcgaaaatggtattacaatgctgcaggattcaataaactggggttaatgcgagatgatacaatatacgaggatgaagatgtaaaagaagccataagaagacttcctgagaacctttataatgacaggatgtttcgcattaagagggcactggacctgaacttgaagcatcagatcttgcctaaagagcagtggaccaaatatgaagaggaaaatttctaccttgaaccgtatctgaaagaggttattcgggaaagaaaagaaagagaagaatgggcaaagaagtaatcatgtagttgaagtctgtggatgcagctgttatgaagatggttaaacttgaaacaaacaattttaagaattatttggtctgaagatgttttactttaaataaatgtctattgtaatggctggagtttttgaattccaaaccttatactgaataactactgaatccctttactgttaaatttttttccaaactttcaagatatatttagttgtgtttaactgctacttggagctcagaagccactttatcagttttcctcactggttggatagcctatcagtttatggaaggatataacttccgtaagttacatccttatggaagctactgaataaaagaagggggtatgcaccccctagtttgccaagattgagaaatagcctcttcactggtatgcaaacagatttgattttgcatcctatcatttaaaaagaaattatgtctgcaccccaacataggcatacttaagtaatatacatactcctgtgctaacatgtatactagaaaacaaaaagatgttagaaaaataaaagtataaagacaaatcatactgtccccatatcccagtgacttttccactttggaaatgattgttatgaagtttaagggttggatactagtcagttaaaagttttaagattatagggtaatttttaaaaatataaattagaatcattggcaaggcatggtggctcatgcctgtaatcccagcactttgggaggccgaggcgggcgggtcacctgaagtcaggaatttgagaccagcctggccaacatggtgaaaccctgtctctactaaaaatacaaaaaattagctaggcgtg

SEQ ID NO: 19075 - protein, 111 aa, Homo sapiens; identical to SEQ ID NO: 2324

SEQ ID NO: 19076 - DNA, 703 bp, Homo sapiens
ttcgcattaagagggcactggacctgaacttgaagcatcagatcttgcctaaagagcagtggaccaaatatgaagaggaaaatttctaccttgaaccgtatctgaaagaggttattcgggaaagaaaagaaagagaagaatgggcaaagaagtaatcatgtagttgaagtctgtggatgcagctgttatgaagatggttaaacttgaaacaaacaattttaagaattatttggtctgaagatgttttactttaaataaatgtctattgtaatggctggagtttttgaattccaaaccttatactgaataactactgaatccctttactgttaaatttttttccaaactttcaagatatatttagttgtgtttaactgctacttggagctcagaagccactttatcagttttcctcactggttggatagcctatcagtttatggaaggatataacttccgtaagttacatccttatggaagctactgaataaaagaagggggtatgcaccccctagtttgccaagattgagaaatagcctcttcactggtatgcaaacagatttgattttgcatcctatcatttaaaaagaaattatgtctgcaccccaacataggcatacttaagtaatatacatactcctgtgctaacatgtatactagaaaacaaaaagatgttagaaaaataaaagtataaagacaaatc

SEQ ID NO: 19077 - protein, 50 aa, Homo sapiens; identical to SEQ ID NO: 19065

SEQ ID NO: 19078 - DNA, 1177 bp, Homo sapiens
gggttaatgcgagatgatacaatatacgaggatgaagatgtaaaagaagccataagaagacttcctgagaacctttataatgacaggatgtttcgcattaagagggcactggacctgaacttgaagcatcagatcttgcctaaagagcagtggaccaaatatgaagaggtctttgctgttccagctctgcactctgcttcctacttagatgaaaagatcagcccattgagtgtccctccagatcccaagaagagcttctgtgaagcaaactctcaccccttgaactgcattgaaactaggcaaaggcctgtggacattcatttctttttcttcccgaaaagacttccccctcataacctatcaaagcaacttatcacaccatcaccacagatttgacattttaaaaagcagatagttcttaggttgagaatatgttttctaaaattggaaattcaaaagtaattgcttttttcttgttattgaagacctgttgagtgtttgggatatatcagtacgtgatggtaacatataatatttcattcattctttaggaaaatttctaccttgaaccgtatctgaaagaggttattcgggaaagaaaagaaagagaagaatgggcaaagaagtaatcatgtagttgaagtctgtggatgcagctgttatgaagatggttaaacttgaaacaaacaattttaagaattatttggtctgaagatgttttactttaaataaatgtctattgtaatggctggagtttttgaattccaaaccttatactgaataactactgaatccctttactgttaaatttttttccaaactttcaagatatatttagttgtgtttaactgctacttggagctcagaagccactttatcagttttcctcactggttggatagcctatcagtttatggaaggatataacttccgtaagttacatccttatggaagctactgaataaaagaagggggtatgcaccccctagtttgccaagattgagaaatagcctcttcactggtatgcaaacagatttgattttgcatcctatcatttaaaaagaaattatgtctgcaccccaacataggcatacttaagtaatatacatactcctgtgctaacatgtatactagaaaacaaaaagatgttagaaaaataaaagtataaagacaaatc

SEQ ID NO: 19079 - protein, 129 aa, Homo sapiens; identical to SEQ ID NO: 19067

SEQ ID NO: 19080 - DNA, 931 bp, Homo sapiens
gggttaatgcgagatgatacaatatacgaggatgaagatgtaaaagaagccataagaagacttcctgagaacctttataatgacaggatgtttcgcattaagagggcactggacctgaacttgaagcatcagatcttgcctaaagagcagtggaccaaatatgaagaggtctttgctgttccagctctgcactctgcttcctacttagatgaaaagatcagcccattgagtgtccctccagatcccaagaagagcttctgtgaagcaaactctcaccccttgaactgcattgaaactaggcaaaggaaaatttctaccttgaaccgtatctgaaagaggttattcgggaaagaaaagaaagagaagaatgggcaaagaagtaatcatgtagttgaagtctgtggatgcagctgttatgaagatggttaaacttgaaacaaacaattttaagaattatttggtctgaagatgttttactttaaataaatgtctattgtaatggctggagtttttgaattccaaaccttatactgaataactactgaatccctttactgttaaatttttttccaaactttcaagatatatttagttgtgtttaactgctacttggagctcagaagccactttatcagttttcctcactggttggatagcctatcagtttatggaaggatataacttccgtaagttacatccttatggaagctactgaataaaagaagggggtatgcaccccctagtttgccaagattgagaaatagcctcttcactggtatgcaaacagatttgattttgcatcctatcatttaaaaagaaattatgtctgcaccccaacataggcatacttaagtaatatacatactcctgtgctaacatgtatactagaaaacaaaaagatgttagaaaaataaaagtataaagacaaatc

SEQ ID NO: 19081 - protein, 108 aa, Homo sapiens; identical to SEQ ID NO: 19069

SEQ ID NO: 19082 - DNA, 1540 bp, Homo sapiens
ctctttctggtcaaaatggctggtaagcaggccgtttcagcatcaggcaagtggctggatggtattcgaaaatggtattacaatgctgcaggattcaataaactggggttaatgcgagatgatacaatatacgaggatgaagatgtaaaagaagccataagaagacttcctgagaacctttataatgacaggatgtttcgcattaagagggcactggacctgaacttgaagcatcagatcttgcctaaagagcagtggaccaaatatgaagaggtagcacagctttatctacctgacagtgttgctcattaaggatggagttttagaaacaagagaaacatgttcatttgcatagtgttagagttctctgagtcatgtcaaataaatatgtgaggttaataaagcaaatgttatttccgttttagaagaaaaccacattgagtcttacgtgtgaaatgattcttctgaaattactaagcaagtctctaatatagagagccaggactaaaatccaggtctgttgcctcccaggtctttgctgttccagctctgcactctgcttcctacttagatgaaaagatcagcccattgagtgtccctccagatcccaagaagagcttctgtgaagcaaactctcaccccttgaactgcattgaaactaggcaaaggcctgtggacattcatttctttttcttcccgaaaagacttccccctcataacctatcaaagcaacttatcacaccatcaccacagatttgacattttaaaaagcagatagttcttaggttgagaatatgttttctaaaattggaaattcaaaagtaattgcttttttcttgttattgaagacctgttgagtgtttgggatatatcagtacgtgatggtaacatataatatttcattcattctttaggaaaatttctaccttgaaccgtatctgaaagaggttattcgggaaagaaaagaaagagaagaatgggcaaagaagtaatcatgtagttgaagtctgtggatgcagctgttatgaagatggttaaacttgaaacaaacaattttaagaattatttggtctgaagatgttttactttaaataaatgtctattgtaatggctggagtttttgaattccaaaccttatactgaataactactgaatccctttactgttaaatttttttccaaactttcaagatatatttagttgtgtttaactgctacttggagctcagaagccactttatcagttttcctcactggttggatagcctatcagtttatggaaggatataacttccgtaagttacatccttatggaagctactgaataaaagaagggggtatgcaccccctagtttgccaagattgagaaatagcctcttcactggtatgcaaacagatttgattttgcatcctatcatttaaaaagaaattatgtctgcaccccaacataggcatacttaagtaatatacatactcctgtgctaacatgtatactagaaaacaaaaagatgttagaaaaataaaagtataaagacaaatc

SEQ ID NO: 19083 - protein, 98 aa, Homo sapiens; identical to SEQ ID NO: 19071

SEQ ID NO: 19084 - DNA, 1042 bp, Homo sapiens
acgcttctctttctggtcaaaatggctggtaagcaggccgtttcagcatcaggcaagtggctggatggtattcgaaaatggtattacaatgctgcaggattcaataaactggggttaatgcgagatgatacaatatacgaggatgaagatgtaaaagaagccataagaagacttcctgagaacctttataatgacaggatgtttcgcattaagagggcactggacctgaacttgaagcatcagatcttgcctaaagagcagtggaccaaatatgaagaggtctttgctgttccagctctgcactctgcttcctacttagatgaaaagatcagcccattgagtgtccctccagatcccaagaagagcttctgtgaagcaaactctcaccccttgaactgcattgaaactaggcaaaggaaaatttctaccttgaaccgtatctgaaagaggttattcgggaaagaaaagaaagagaagaatgggcaaagaagtaatcatgtagttgaagtctgtggatgcagctgttatgaagatggttaaacttgaaacaaacaattttaagaattatttggtctgaagatgttttactttaaataaatgtctattgtaatggctggagtttttgaattccaaaccttatactgaataactactgaatccctttactgttaaatttttttccaaactttcaagatatatttagttgtgtttaactgctacttggagctcagaagccactttatcagttttcctcactggttggatagcctatcagtttatggaaggatataacttccgtaagttacatccttatggaagctactgaataaaagaagggggtatgcaccccctagtttgccaagattgagaaatagcctcttcactggtatgcaaacagatttgattttgcatcctatcatttaaaaagaaattatgtctgcaccccaacataggcatacttaagtaatatacatactcctgtgctaacatgtatactagaaaacaaaaagatgttagaaaaataaaagtataaagacaaatc

SEQ ID NO: 19085 - protein, 140 aa, Homo sapiens; identical to SEQ ID NO: 19073

SEQ ID NO: 19086 - DNA, 988 bp, Homo sapiens
agcggcctttctctgttcgcgatgtgacgtaacgcgcctgcggactgggcccagcttgtcctctatgacttacccagaaggcaacgcttctctttctggtcaaaatggctggtaagcaggccgtttcagcatcaggcaagtggctggatggtattcgaaaatggtattacaatgctgcaggattcaataaactggggttaatgcgagatgatacaatatacgaggatgaagatgtaaaagaagccataagaagacttcctgagaacctttataatgacaggatgtttcgcattaagagggcactggacctgaacttgaagcatcagatcttgcctaaagagcagtggaccaaatatgaagaggaaaatttctaccttgaaccgtatctgaaagaggttattcgggaaagaaaagaaagagaagaatgggcaaagaagtaatcatgtagttgaagtctgtggatgcagctgttatgaagatggttaaacttgaaacaaacaattttaagaattatttggtctgaagatgttttactttaaataaatgtctattgtaatggctggagtttttgaattccaaaccttatactgaataactactgaatccctttactgttaaatttttttccaaactttcaagatatatttagttgtgtttaactgctacttggagctcagaagccactttatcagttttcctcactggttggatagcctatcagtttatggaaggatataacttccgtaagttacatccttatggaagctactgaataaaagaagggggtatgcaccccctagtttgccaagattgagaaatagcctcttcactggtatgcaaacagatttgattttgcatcctatcatttaaaaagaaattatgtctgcaccccaacataggcatacttaagtaatatacatactcctgtgctaacatgtatactagaaaacaaaaagatgttagaaaaataaaagtataaagacaaatc

SEQ ID NO: 19087 - protein, 111 aa, Homo sapiens; identical to SEQ ID NO: 2324

SEQ ID NO: 19088 - DNA, 590 bp, Homo sapiens
agcggcctttctctgttcgcgatgtgacgtaacgcgcctgcggactgggcccagcttgtcctctatgacttacccagaaggcaacgcttctctttctggtcaaaatggctggtaagcaggccgtttcagcatcaggcaagtggctggatggtattcgaaaatggtattacaatgctgcaggattcaataaactggggttaatgcgagatgatacaatatacgaggatgaagatgtaaaagaagccataagaagacttcctgagaacctttataatgacaggatgtttcgcattaagagggcactggacctgaacttgaagcatcagatcttgcctaaagagcagtggaccaaatatgaagaggaaaatttctaccttgaaccgtatctgaaagaggttattcgggaaagaaaagaaagagaagaatgggcaaagaagtaatcatgtagttgaagtctgtggatgcagctgttatgaagatggttaaacttgaaacaaacaattttaagaattatttggtctgaagatgttttactttaaataaatgtctattgtaatggctggagtttttgaattccaaaccttatactg

SEQ ID NO: 19089 - protein, 111 aa, Homo sapiens; identical to SEQ ID NO: 2324

SEQ ID NO: 19090 - DNA, 777 bp, Homo sapiens
gggttaatgcgagatgatacaatatacgaggatgaagatgtaaaagaagccataagaagacttcctgagaacctttataatgacaggatgtttcgcattaagagggcactggacctgaacttgaagcatcagatcttgcctaaagagcagtggaccaaatatgaagaggtctttgctgttccagctctgcactctgcttcctacttagatgaaaagatcagcccattgagtgtccctccagatcccaagaagagcttctgtgaagcaaactctcaccccttgaactgcattgaaactaggcaaaggcctgtggacattcatttctttttcttcccgaaaagacttccccctcataacctatcaaagcaacttatcacaccatcaccacagatttgacattttaaaaagcagatagttcttaggttgagaatatgttttctaaaattggaaattcaaaagtaattgcttttttcttgttattgaagacctgttgagtgtttgggatatatcagtacgtgatggtaacatataatatttcattcattctttaggaaaatttctaccttgaaccgtatctgaaagaggttattcgggaaagaaaagaaagagaagaatgggcaaagaagtaatcatgtagttgaagtctgtggatgcagctgttatgaagatggttaaacttgaaacaaacaattttaagaattatttggtctgaagatgttttactttaaataaatgtctattgtaatggctggagtttttgaattccaaaccttatac

SEQ ID NO: 19091 - protein, 129 aa, Homo sapiens; identical to SEQ ID NO: 19067

SEQ ID NO: 19092 - DNA, 531 bp, Homo sapiens
gggttaatgcgagatgatacaatatacgaggatgaagatgtaaaagaagccataagaagacttcctgagaacctttataatgacaggatgtttcgcattaagagggcactggacctgaacttgaagcatcagatcttgcctaaagagcagtggaccaaatatgaagaggtctttgctgttccagctctgcactctgcttcctacttagatgaaaagatcagcccattgagtgtccctccagatcccaagaagagcttctgtgaagcaaactctcaccccttgaactgcattgaaactaggcaaaggaaaatttctaccttgaaccgtatctgaaagaggttattcgggaaagaaaagaaagagaagaatgggcaaagaagtaatcatgtagttgaagtctgtggatgcagctgttatgaagatggttaaacttgaaacaaacaattttaagaattatttggtctgaagatgttttactttaaataaatgtctattgtaatggctggagtttttgaattccaaaccttatac

SEQ ID NO: 19093 - protein, 108 aa, Homo sapiens; identical to SEQ ID NO: 19069

SEQ ID NO: 19094 - DNA, 1061 bp, Homo sapiens
tcccttggggggaacttagttgcttaggaggaggtaaatggacttcttttacgaatccatattaatgtttaaatgactaatggtatcaaaatcctccccaaaatacatacatttttaaagaatgtggccaaatgaaataactgtaatatcgagtaaaaattttagaggatgagggtcatttagacctgccagtctatgctgaaatctcactgtcttttccctacaactccagctctcttgaaatgaaaagtttacaattatttcctgtgatctatttatgaaactacaaatgatggaaatttccaagtccttttcctatctcccaccccttcatttctgaaggtaacagggcaggcataagggcacacgatgtacctatggatcttttgtacattcagtgtttgagtttacccttttctttcatgacttgccaccattttcctgcaaccacttttgctcataaataaaataagcactttttatcaacattttatagagtataaacttttttcttttaaatctaattcttttgattaaattcttgctgtatatactatatacttttaaaaggaaatttatttctatgtttgcattcatcagcaagataactgagtactggttgcttgcctatcaatgtgttcatatagtataattaaattgtagcaattaacagtgtgacaattatcagtttcagcatcaggcaagtggctggatggtattcgaaaatggtattacaatgctgcaggattcaaggatgtttcgcattaagagggcactggacctgaacttgaagcatcagatcttgcctaaagagcagtggaccaaatatgaagaggaaaatttctaccttgaaccgtatctgaaagaggttattcgggaaagaaaagaaagagaagaatgggcaaagaagtaatcatgtagttgaagtctgtggatgcagctgttatgaagatggttaaacttgaaacaaacaattttaagaattatttggtctgaagatgttttactttaaataaatgtctattgtaatggctggagtttttgaattccaaaccttatac

SEQ ID NO: 19095 - protein, 66 aa, Homo sapiens
MVFENGITMLQDSRMFRIKRALDLNLKHQILPKEQWTKYEEENFYLEPYLKEVIRERKEREEWAKK

SEQ ID NO: 19096 - DNA, 3998 bp, Homo sapiens
ctctttctggtcaaaatggctggtaagcaggccggtaagtaactgggggtcttcttggccggcatcgtcgcgcttcaccgtttatttttgctgcagcttgctccgttttctctcttctttgtaagtggccaagtttgtcgcggaagggaaattggctgcttcagtccagtgaaaaggatgtgcttccccactcgtttgctgtccccagggcgggcttgcctgtatagggttgggatgttaacccgctgtttgtgaaggtgcccgcggtggctctgacagccctggagttccagctgcccgtgcttggaagtccttccccttggccttagaaaagttaaagggcacaagaggataactagtggatgactttcaacccgaatgagctcagtgctttctatgacccaagtgctctatcgtgtgcattggccctataaattttcttgccattgcgacgagggagatattaatttcccttttacgctgataagataactgaggcaaagtgacccaaggaagtagaattggaaatatcattgcacccctcgcgcttctcaaactgcgaatcagagacagttgagcaagggatacgagcgacgcttcaggttgaccttggattatctagagcgtcagcttgatcagtaggtttggagaaatttgaatttattgtaggttctttttttcttttttctttctttttttttttttttgctaatctctgccctctggcggtacaagttggagtagccgttttgtttgtttgtttgttttgtctttgagacggagtcttgctttgtcgcccaggctggagtgcaatggcacaatctcgtctcactgcaatgcaaccaagttggagtagcttaaaaaatgttgatccttttctccccgcccccagcaattgtgaagctgttaggaaacatcaggttgccagaaacatccgttaacctaattgacattgagctttttgggggtgggggagactttttaaataattattttattaatttggcagatattgaaggagtcttactaaattcaagacactgcttctgtgcgtgtttgggaactacatagaccagatctcaactcccattagctaactctgaccttgggtgggatcacttctgtaagccagcttccccttctgtagtaacagacatgtaaataaatcagctaatgttggtaaagcaaataggaaagtgtttggtgcacaataagtgcttagtgaatattattatagtcactgataggtggttgaatataatctgtcttccacaagtatgtttgtagattgttgactgatacttgtttttctagcagcagttttatacatgactcttaatttccaaggagatttgctaaagccacgtaatctgtagtgcactgagtttgcaagcaaggagagttgagtgaaaggagagtttgctttccttccttggtaagggctaaccctagacaaaattttaaaagagaatacaaacctgttctacctctccttttgtaaaatgtctctcctaaaatgtcagatacggtcctgctgtacttggaccctgctgggttacttcatcaggctcagccctgttccccaaacagttttaaaattacctatttctcatcctttttcaatatccattcccttggggggaacttagttgcttaggaggaggtaaatggacttcttttacgaatccatattaatgtttaaatgactaatggtatcaaaatcctccccaaaatacatacatttttaaagaatgtggccaaatgaaataactgtaatatcgagtaaaaattttagaggatgagggtcatttagacctgccagtctatgctgaaatctcactgtcttttccctacaactccagctctcttgaaatgaaaagtttacaattatttcctgtgatctatttatgaaactacaaatgatggaaatttccaagtccttttcctatctcccaccccttcatttctgaaggtaacagggcaggcataagggcacacgatgtacctatggatcttttgtacattcagtgtttgagtttacccttttctttcatgacttgccaccattttcctgcaaccacttttgctcataaataaaataagcactttttatcaacattttatagagtataaacttttttcttttaaatctaattcttttgattaaattcttgctgtatatactatatacttttaaaaggaaatttatttctatgtttgcattcatcagcaagataactgagtactggttgcttgcctatcaatgtgttcatatagtataattaaattgtagcaattaacagtgtgacaattatcagtttcagcatcaggcaagtggctggatggtattcgaaaatggtattacaatgctgcaggattcaataaactgggtaagcagctgtgctgtttaatgttttttgttgttgttgttgtttctttgtttttttttttgtttttctgagagtattgcttttgcaagtgttactgtggttccaaaaaccatttcagttcttgtatacatcagaagattttaaaattaaatcacattatgttaaatccagttcctttttaaagtttttttgagagaagagggatgaaagcctctaaaatgttcgacttggtaatgatttaagtagtaagacattttccttctacaccccctttcccaactcttccacttaaaattttatttatttatttatttatttatttgagacagagtcttgctctgtcaccaggctggagtgcagtggcgcaatcacggttcactgcaacctccgcctcccgagttcaagtgattctcctgcctcagcctcctgagtagctgggattacaggcgtgtgccaccacgcctggctaattttttttgtatgtagtagagacggggtttcaccatattaggctggtcgcaaactcctgacctcaggtgatccacctgcctcggcctcccaaagtgctgggattataggtgtgcactactgcgcccggccttccacttaaaattttaatttaaattatataaacattgaaagtagagagtttttgaatattaaaattttatcacgtccatgcaatcatatgattcctaagcttttttagaactttgtaatttaccatgaacttcatcttttactattgaagcttgaagaaagtgtaagcaaaagtcactgttccttagtatactatcattttaagattctttaataccttgatctcagatttaaactatgagaaaaaagagatgtggtttattaatgtgtgtttaaaaacaaagtaaacatttaaaatattttgtaaatggtttagataaaatatgaattttgtggcattggattttaagaggctcatatattgtttccatagtctagttcaagaagtaacccattatatcaagtaataactcattacttttaatggcaaaactgcaattacttttgcaccaacctataatgtatgaaatgcattgaatttccattgaacctagtgatttgaattcgatagttcaccaaaagttgtaagttataagtcataaaggtattttactaatttaaaaaaaccgcgatttttgagatgcatgtgcaatctaactttgtcatctatcatagggttaatgcgagatgatacaatatacgaggatgaagatgtaaaagaagccataagaagacttcctgagaacctttataatgacaggatgtttcgcattaagagggcactggacctgaacttgaagcatcagatcttgcctaaagagcagtggaccaaatatgaagaggaaaatttctaccttgaaccgtatctgaaagaggttattcgggaaagaaaagaaagagaagaatgggcaaagaagtaatcatgtagttgaagtctgtggatgcagctgttatgaagatggttaaacttgaaacaaacaattttaagaattatttggtctgaagatgttttactttaaataaatgtctattgtaatggctggagtttttgaattccaaaccttatac

SEQ ID NO: 19097 - protein, 91 aa, Homo sapiens [sequence omitted]

SEQ ID NO: 19098 - DNA, 1140 bp, Homo sapiens
ctctttctggtcaaaatggctggtaagcaggccgtttcagcatcaggcaagtggctggatggtattcgaaaatggtattacaatgctgcaggattcaataaactggggttaatgcgagatgatacaatatacgaggatgaagatgtaaaagaagccataagaagacttcctgagaacctttataatgacaggatgtttcgcattaagagggcactggacctgaacttgaagcatcagatcttgcctaaagagcagtggaccaaatatgaagaggtagcacagctttatctacctgacagtgttgctcattaaggatggagttttagaaacaagagaaacatgttcatttgcatagtgttagagttctctgagtcatgtcaaataaatatgtgaggttaataaagcaaatgttatttccgttttagaagaaaaccacattgagtcttacgtgtgaaatgattcttctgaaattactaagcaagtctctaatatagagagccaggactaaaatccaggtctgttgcctcccaggtctttgctgttccagctctgcactctgcttcctacttagatgaaaagatcagcccattgagtgtccctccagatcccaagaagagcttctgtgaagcaaactctcaccccttgaactgcattgaaactaggcaaaggcctgtggacattcatttctttttcttcccgaaaagacttccccctcataacctatcaaagcaacttatcacaccatcaccacagatttgacattttaaaaagcagatagttcttaggttgagaatatgttttctaaaattggaaattcaaaagtaattgcttttttcttgttattgaagacctgttgagtgtttgggatatatcagtacgtgatggtaacatataatatttcattcattctttaggaaaatttctaccttgaaccgtatctgaaagaggttattcgggaaagaaaagaaagagaagaatgggcaaagaagtaatcatgtagttgaagtctgtggatgcagctgttatgaagatggttaaacttgaaacaaacaattttaagaattatttggtctgaagatgttttactttaaataaatgtctattgtaatggctggagtttttgaattccaaaccttatac

SEQ ID NO: 19099 - protein, 98 aa, Homo sapiens; identical to SEQ ID NO: 19071

SEQ ID NO: 19100 - DNA, 642 bp, Homo sapiens
acgcttctctttctggtcaaaatggctggtaagcaggccgtttcagcatcaggcaagtggctggatggtattcgaaaatggtattacaatgctgcaggattcaataaactggggttaatgcgagatgatacaatatacgaggatgaagatgtaaaagaagccataagaagacttcctgagaacctttataatgacaggatgtttcgcattaagagggcactggacctgaacttgaagcatcagatcttgcctaaagagcagtggaccaaatatgaagaggtctttgctgttccagctctgcactctgcttcctacttagatgaaaagatcagcccattgagtgtccctccagatcccaagaagagcttctgtgaagcaaactctcaccccttgaactgcattgaaactaggcaaaggaaaatttctaccttgaaccgtatctgaaagaggttattcgggaaagaaaagaaagagaagaatgggcaaagaagtaatcatgtagttgaagtctgtggatgcagctgttatgaagatggttaaacttgaaacaaacaattttaagaattatttggtctgaagatgttttactttaaataaatgtctattgtaatggctggagtttttgaattccaaaccttatac

SEQ ID NO: 19101 - protein, 140 aa, Homo sapiens; identical to SEQ ID NO: 19073

SEQ ID NO: 19102 - DNA, 438 bp, Homo sapiens
cagaaggcaacgcttctctttctggtcaaaatggctggtaagcaggccgtttcagcatcaggcaagtggctggatggtattcgaaaatggtattacaatgctgcaggattcaataaactggggttaatgcgagatgatacaatatacgaggatgaagatgtaaaagaagccataagaagacttcctgagaacctttataatgacaggatgtttcgcattaagagggcactggacctgaacttgaagcatcagatcttgcctaaagagcagtggaccaaatatgaagaggaaaatttctaccttgaaccgtatctgaaagaggttattcgggaaagaaaagaaagagaagaatgggcaaagaagtaatcatgtagttgaagtctgtggatgcagctgttatgaagatggttaaacttgaaacaaacaattttaagaatt

SEQ ID NO: 19103 - protein, 111 aa, Homo sapiens; identical to SEQ ID NO: 2324

SEQ ID NO: 19104 - DNA, 490 bp, Homo sapiens
tgtgccctttaacttttctaaggccaaggggaaggacttccaagcacgggcagctggaactccagggctgtcagagccaccgcgggcaccttcacaaacagcgggttaacatcccaaccctatacaggcaagcccgccctggggacagcaaacgagtggggaagcacatccttttcactggactgaagcagccaatttcccttccgcgacaaacttggccacttacaaagaagagagaaaacggagcaagctgcagcaaaaataaacggtgaagcgcgacgatgccggccaagaagacccccagttacttaccggcctgcttaccagccattttgaccagaaagagaagcgttgccttctggactggcaacactccagaaatgatggagacaggatacatcaacctgtatcactgaagatgatgtggagcagagcctttgtggtcctaagaaacatgtataagataaaaacttttgtggtttttcaatca

SEQ ID NO: 19105 - protein, 44 aa, Homo sapiens
MPAKKTPSYLPACLPAILTRKRSVAFWTGNTPEMMETGYINLYH

SEQ ID NO: 19106 - DNA, 361 bp, Homo sapiens
aagctgcagcaaaaataaacggtgaagcgcgacgatgccggccaagaagacccccagttacttaccggcctgcttaccagccattttgaccagaaagagaagcgttgccttctggtcagtcctgtatacagcactaaagctgatgaatgatctatcttacactagccaaagtgaagtctgaaagatgtgaagaaatgcagtacatttgtacattggcacattgccctgcagaggactggcaacactccagaaatgatggagacaggatacatcaacctgtatcactgaagatgatgtggagcagagcctttgtggtcctaagaaacatgtataagataaaaacttttgtggtttttcaatc

SEQ ID NO: 19107 - protein, 70 aa, Homo sapiens
MIYLTLAKVKSERCEEMQYICTLAHCPAEDWQHSRNDGDRIHQPVSLKMMWSRAFVVLRNMYKIKTFVVF

SEQ ID NO: 19108 - DNA, 1449 bp, Homo sapiens
tgtgtagggcgggctgaggagccggcgtgcggcgcggcgggacgggacgtgcggcccagcgagttggtcggtcccggggtcacccgctacgggaagcaggcctcgccacagactaagaaaaatggctttgtcagcccaacagatacccagatggtttaactcagttaagttgaggagcctcattaatgctgcacaactcacaaaacgttttactagaccagcaagaacactgttacatggcttttctgctcagcctcagatatcctctgacaattgctttctccagtggggatttaagacttacaggacttcctccttatggaatagttcccagtctactagctcaagtagtcaggagaataattctgcccaaagcagtctgcttccttccatgaatgaacagtcacagaagacacaaaatatatccagctttgattctgagctgtttctagaagaactggatgaattgcctccattgtctccaatgcagccaatttcagaggaagaggctattcagattattgcagaccctccattgccaccagcttcattcacacttcgagactatgtggatcattctgagactctgcagaagttggttcttctaggcgtggatttgtccaagatagaaaaacatccagaagcagcaaacctccttctgagactggattttgaaaaagacattaagcaaatgcttctgtttcttaaagatgtgggtatagaggataaccaactgggagcattcctgacaaaaaatcatgcaattttctctgaagaccttgaaaatctgaagaccagggtggcttatctgcattcaaaaaatttcagtaaagcagatgttgcacagatggtcagaaaagcaccatttttgctgaacttttcagtggaaagactggataacagattgggattttttcagaaagaacttgaacttagtgtgaagaagactagagatctggtagttcgtctcccaaggctgctaactggaagtctggaacccgtgaaagaaaatatgaaggtttatcgtcttgaacttggttttaaacataacgaaattcaacatatgatcaccagaatcccaaagatgttaactgcaaataaaatgaaacttaccgagacgtttgattttgtgcacaatgtgatgagcattccccaccacatcattgtcaagttcccacaggtatttaatacaaggctgtttaaggtcaaagaaagacacttgtttcttacctatttaggaagagcacagtatgatccagcaaaacctaactacatctctttggacaaactagtatctattcctgatgaaatattttgtgaagagattgccaaagcatcagtacaggactttgaaaaattcttaaaaacgctttagatttttatgtatgttaaaatgcagtattgtaaagtgaatatatatatgaataaatgaatatatttttaaatgcc

SEQ ID NO: 19109 - protein, 417 aa, Homo sapiens; identical to SEQ ID NO: 2326

SEQ ID NO: 19110 - DNA, 1154 bp, Homo sapiens
cttacctcttaaaaggtgaaaaattagggacttggatgtttaattctaaaatgatcccaagatttaaccactgaaagaagcaaacaagggaagagctggtctttgcagaaatagttttaagtgtgcatattagagcactaatttgtttctctctttcaaagaactggatgaattgcctccattgtctccaatgcagccaatttcagaggaagaggctattcagattattgcagaccctccattgccaccagcttcattcacacttcgagactatgtggatcattctgagactctgcagaagttggttcttctaggcgtggatttgtccaagatagaaaaacatccagaagcagcaaacctccttctgagactggattttgaaaaagacattaagcaaatgcttctgtttcttaaagatgtgggtatagaggataaccaactgggagcattcctgacaaaaaatcatgcaattttctctgaagaccttgaaaatctgaagaccagggtggcttatctgcattcaaaaaatttcagtaaagcagatgttgcacagatggtcagaaaagcaccatttttgctgaacttttcagtggaaagactggataacagattgggattttttcagaaagaacttgaacttagtgtgaagaagactagagatctggtagttcgtctcccaaggctgctaactggaagtctggaacccgtgaaagaaaatatgaaggtttatcgtcttgaacttggttttaaacataacgaaattcaacatatgatcaccagaatcccaaagatgttaactgcaaataaaatgaaacttaccgagacgtttgattttgtgcacaatgtgatgagcattccccaccacatcattgtcaagttcccacaggtatttaatacaaggctgtttaaggtcaaagaaagacacttgtttcttacctatttaggaagagcacagtatgatccagcaaaacctaactacatctctttggacaaactagtatctattcctgatgaaatattttgtgaagagattgccaaagcatcagtacaggactttgaaaaattcttaaaaacgctttagatttttatgtatgttaaaatgcagtattgtaaagtgaatatatatatgaataaatgaatatatttttaaatgc

SEQ ID NO: 19111 - protein, 296 aa, Homo sapiens
MQPISEEEAIQIIADPPLPPASFTLRDYVDHSETLQKLVLLGVDLSKIEKHPEAANLLLRLDFEKDIKQMLLFLKDVGIEDNQLGAFLTKNHAIFSEDLENLKTRVAYLHSKNFSKADVAQMVRKAPFLLNFSVERLDNRLGFFQKELELSVKKTRDLVVRLPRLLTGSLEPVKENMKVYRLELGFKHNEIQHMITRIPKMLTANKMKLTETFDFVHNVMSIPHHIIVKFPQVFNTRLFKVKERHLFLTYLGRAQYDPAKPNYISLDKLVSIPDEIFCEEIAKASVQDFEKFLKTL

SEQ ID NO: 19112 - DNA, 833 bp, Homo sapiens
gtgacccacggtcgtccccgcgcgcggcgtggatcgcggcccaagccgccattgttccgccgagggaggacagcggggcctggcgctggcgccgagacgccgcttagcggccgccactggagacactccctcccgcctcccgggtctcctggcggcggcggagtgaggctgacagcggggaacctgggagacccctccgccctccccgcggtggcagcggccgatccccggctccggcgcgagggacggccgcgatgcgctcggcctgaggttacccggcccggcccttcctcgcttccctcgactattccactgcgtctccgcgccccggcgtcatcctgcgagtccctctgacgggagggaagatggctgcacggagctggcaggacgagctggcccagcaggccgaggagggctcggcccggctgcgggaaatgctctcggtcggcctaggctttctgcgcaccgagctgggcctcgacctggggctggagccgaaacggtaccccggctgggtgatcctggtgggcactggcgcgctcgggctgctgctgctgtttctgctgggctacggctgggccgcggcttgcgccggcgcccgcaaaaagcggaggagcccgccccgcaagcgggaggaggcggcggccgtgccggccgcggcccccgacgacctggccttgctgaagaatctccggagcgaggaacagaagaagaagaaccggaagaaactgtccgagaagcccaaaccaaatgggcggactgttgaagtggctgagggtgaagctgttcgaacacctcaaagtgtaacagcaaagcagccaccagagattgac

SEQ ID NO: 19113 - protein, 155 aa, Homo sapiens
MAARSWQDELAQQAEEGSARLREMLSVGLGFLRTELGLDLGLEPKRYPGWVILVGTGALGLLLLFLLGYGWAAACAGARKKRRSPPRKREEAAAVPAAAPDDLALLKNLRSEEQKKKNRKKLSEKPKPNGRTVEVAEGEAVRTPQSVTAKQPPEI

SEQ ID NO: 19114 - DNA, 3759 bp, Homo sapiens
gtgacccacggtcgtccccgcgcgcggcgtggatcgcggcccaagccgccattgttccgccgagggaggacagcggggcctggcgctggcgccgagacgccgcttagcggccgccactggagacactccctcccgcctcccgggtctcctggcggcggcggagtgaggctgacagcggggaacctgggagacccctccgccctccccgcggtggcagcggccgatccccggctccggcgcgagggacggccgcgatgcgctcggcctgaggttacccggcccggcccttcctcgcttccctcgactattccactgcgtctccgcgccccggcgtcatcctgcgagtccctctgacgggagggaagatggctgcacggagctggcaggacgagctggcccagcaggccgaggagggctcggcccggctgcgggaaatgctctcggtcggcctaggctttctgcgcaccgagctgggcctcgacctggggctggagccgaaacggtaccccggctgggtgatcctggtgggcactggcgcgctcgggctgctgctgctgtttctgctgggctacggctgggccgcggcttgcgccggcgcccgcaaaaagcggaggagcccgccccgcaagcgggaggaggcggcggccgtgccggccgcggcccccgacgacctggccttgctgaagaatctccggagcgaggaacagaagaagaagaaccggaagaaactgtccgagaagcccaaaccaaatgggcggactgttgaagtggctgagggtgaagctgttcgaacacctcaaagtgtaacagcaaagcagccaccagagattgacaagaaaaatgaaaagtcaaagaaaaataagaagaaatcaaagtcagatgctaaagcagtgcaaaacagttcacgccatgatggaaaggaagttgatgaaggagcctgggaaactaaaattagtcacagagagaaacgacagcagcgtaaacgtgataaggtgctgactgattctggttcattggattcaactatccctgggatagaaaataccatcacagttaccaccgagcaacttacaaccgcatcatttcctgttggttccaagaagaataaaggtgattctcatctaaatgttcaagttagcaactttaaatctggaaaaggagattctacacttcaggtttcttcaggattgaatgaaaacctcactgtcaatggaggaggctggaatgaaaagtctgtaaaactctcctcacagatcagtgcaggtgaggagaagtggaactccgtttcacctgcttctgcaggaaagaggaaaactgagccatctgcctggagtcaagacactggagatgctaatacaaatggaaaagactggggaaggagttggagtgaccgttcaatattttctggcattgggtctactgctgagccagtttctcagtctaccacttctgattatcagtgggatgttagccgtaatcaaccctatatcgatgatgaatggtctgggttaaatggtctgtcttctgctgatcccaactctgattggaatgcaccagcagaagagtggggcaattgggtagacgaagaaagagcttcacttctaaagtcccaggaaccaattcctgatgatcaaaaggtctcagatgatgataaagaaaagggagagggagctcttccaactgggaaatccaaaaagaaaaaaaagaaaaagaagaagcaaggtgaagataactctactgcacaggacacagaagaattagaaaaagagattagagaagaccttccagtgaatacctctaaaacccgtccaaaacaggaaaaagctttttccttgaagaccataagcactagtgatccagccgaagtactcgtcaaaaatagccagcctatcaagactcttccacctgctacttctaccgagccatctgtaatcttatcaaaaagtgattctgacaagagctcttcccaagtgccgccaatactacaagagacagataaatccaagtcaaataccaagcaaaatagtgtgcctccttcacagaccaagtctgaaactagctgggaatctcccaaacaaataaaaaagaagaaaaaagccagacgagaaacgtgaaattttttttcctgaattggacatgtgtttgcaaacacttgtcttgaagattatgctgtttatgcaataatttgtgaacatgtacagagttttatataaatttaaaccaatttttaaaacaaaactgcggacaccaccataaaaatggaatcaaaagaaagttaatttatgaaattaagaggtcagcagaatatactcagtgatggaagacacttgggaaagtctttttaatagaacaagaacgatcttaatttaagaatattatcctggtttaacaacagtgccctgtttacaacagattgtgccctatctcatctgcagccgaggaataaaggattctgattagaaagagggttgcctacagattagtaagcaattccttggatcttatgcacagaacttgtaccatttgaatctgttttatgcttaaatcaaagtgctttgatcaaatgcataacctgccatatctttacatatttgttggtagcaatttgtattaaagaaatcacaagtgcaaataaaaagtcatttatcatttgtttaactaaactgtcatggtttagtttacaatttttaaaaagttcttaaaatactgaaaatgcagttgacacttgtgtatggcttatgaagttatttttgatagtcttacattacttgaattgttcaaagtacagtatattttaaattaagaaaagtgaactatatgtatttgttttatacatttaaggcttagactcataaataatgctattgtttatgatttgaaaactttcaggcaaaatccaatttacatttttcccttccctagcaattacttttttccagcttcaactcttcttagttactaatactttgttgactttaaaaatgaaatcattcacaaacttttggtatatgatggagaatgaaaaactagagtcagacagctttaattgacattgtcaacacctccagttatcaggaatacatttttttactgccttaacctgtagtgcgtagaatatgcatcaatttcttgaaggagattcatgtttttataagaattttcatgtaattattgcaattgtggtcaaataaggaacgtttcctgcttgaaattatattgatttaaatgatgtgtgagatgtttcaccattttcaggcactgtgtaattctattgtaataaactggcaggtatctttgtaactataaatagtgcatgctcagccatgtacactgtaaatagcctttaccaaacgtgtttgacaaggaccataattaacatcacttagtgaattgtgataaagaaaaaaaagccatgatttattcgatgtgattggcttgtttttatgtggcgccaagaacgaacctgtttaacagctgtaaccaatggtactgatctatccatccaatgttgtcattatatttgactgtggttcaacagtattgcgttgtcagactaggaaagctaaacgaacaaaatggttttagttttgctgaagactggccttattaatggacagctttcctaacaagagattattaacttttatcaggtgttaacatctgtttcaggaacatggcagtatgtttacatgtcagaagttttgtttaattctatggtatttctaaattgacttgtttaaataaattcagcaaatggat

SEQ ID NO: 19115 - protein, 582 aa, Homo sapiens
MAARSWQDELAQQAEEGSARLREMLSVGLGFLRTELGLDLGLEPKRYPGWVILVGTGALGLLLLFLLGYGWAAACAGARKKRRSPPRKREEAAAVPAAAPDDLALLKNLRSEEQKKKNRKKLSEKPKPNGRTVEVAEGEAVRTPQSVTAKQPPEIDKKNEKSKKNKKKSKSDAKAVQNSSRHDGKEVDEGAWETKISHREKRQQRKRDKVLTDSGSLDSTIPGIENTITVTTEQLTTASFPVGSKKNKGDSHLNVQVSNFKSGKGDSTLQVSSGLNENLTVNGGGWNEKSVKLSSQISAGEEKWNSVSPASAGKRKTEPSAWSQDTGDANTNGKDWGRSWSDRSIFSGIGSTAEPVSQSTTSDYQWDVSRNQPYIDDEWSGLNGLSSADPNSDWNAPAEEWGNWVDEERASLLKSQEPIPDDQKVSDDDKEKGEGALPTGKSKKKKKKKKKQGEDNSTAQDTEELEKEIREDLPVNTSKTRPKQEKAFSLKTISTSDPAEVLVKNSQPIKTLPPATSTEPSVILSKSDSDKSSSQVPPILQETDKSKSNTKQNSVPPSQTKSETSWESPKQIKKKKKARRET

SEQ ID NO: 19116 - DNA, 6219 bp, Homo sapiens
gtgacccacggtcgtccccgcgcgcggcgtggatcgcggcccaagccgccattgttccgccgagggaggacagcggggcctggcgctggcgccgagacgccgcttagcggccgccactggagacactccctcccgcctcccgggtctcctggcggcggcggagtgaggctgacagcggggaacctgggagacccctccgccctccccgcggtggcagcggccgatccccggctccggcgcgagggacggccgcgatgcgctcggcctgaggttacccggcccggcccttcctcgcttccctcgactattccactgcgtctccgcgccccggcgtcatcctgcgagtccctctgacgggagggaagatggctgcacggagctggcaggacgagctggcccagcaggccgaggagggctcggcccggctgcgggaaatgctctcggtcggcctaggctttctgcgcaccgagctgggcctcgacctggggctggagccgaaacggtaccccggctgggtgatcctggtgggcactggcgcgctcgggctgctgctgctgtttctgctgggctacggctgggccgcggcttgcgccggcgcccgcaaaaagcggaggagcccgccccgcaagcgggaggaggcggcggccgtgccggccgcggcccccgacgacctggccttgctgaagaatctccggagcgaggaacagaagaagaagaaccggaagaaactgtccgagaagcccaaaccaaatgggcggactgttgaagtggctgagggtgaagctgttcgaacacctcaaagtgtaacagcaaagcagccaccagagattgacaagaaaaatgaaaagtcaaagaaaaataagaagaaatcaaagtcagatgctaaagcagtgcaaaacagttcacgccatgatggaaaggaagttgatgaaggagcctgggaaactaaaattagtcacagagagaaacgacagcagcgtaaacgtgataaggtgctgactgattctggttcattggattcaactatccctgggatagaaaataccatcacagttaccaccgagcaacttacaaccgcatcatttcctgttggttccaagaagaataaaggtgattctcatctaaatgttcaagttagcaactttaaatctggaaaaggagattctacacttcaggtttcttcaggattgaatgaaaacctcactgtcaatggaggaggctggaatgaaaagtctgtaaaactctcctcacagatcagtgcaggtgaggagaagtggaactccgtttcacctgcttctgcaggaaagaggaaaactgagccatctgcctggagtcaagacactggagatgctaatacaaatggaaaagactggggaaggagttggagtgaccgttcaatattttctggcattgggtctactgctgagccagtttctcagtctaccacttctgattatcagtgggatgttagccgtaatcaaccctatatcgatgatgaatggtctgggttaaatggtctgtcttctgctgatcccaactctgattggaatgcaccagcagaagagtggggcaattgggtagacgaagaaagagcttcacttctaaagtcccaggaaccaattcctgatgatcaaaaggtctcagatgatgataaagaaaagggagagggagctcttccaactgggaaatccaaaaagaaaaaaaagaaaaagaagaagcaaggtgaagataactctactgcacaggacacagaagaattagaaaaagagattagagaagaccttccagtgaatacctctaaaacccgtccaaaacaggaaaaagctttttccttgaagaccataagcactagtgatccagccgaagtactcgtcaaaaatagccagcctatcaagactcttccacctgctacttctaccgagccatctgtaatcttatcaaaaagtgattctgacaagagctcttcccaagtgccgccaatactacaagagacagataaatccaagtcaaataccaagcaaaatagtgtgcctccttcacagaccaagtctgaaactagctgggaatctcccaaacaaataaaaaagaagaaaaaagccagacgagaaacgtgaaattttttttcctgaattggacatgtgtttgcaaacacttgtcttgaagattatgctgtttatgcaataatttgtgaacatgtacagagttttatataaatttaaaccaatttttaaaacaaaactgcggacaccaccataaaaatggaatcaaaagaaagttaatttatgaaattaagaggtcagcagaatatactcagtgatggaagacacttgggaaagtctttttaatagaacaagaacgatcttaatttaagaatattatcctggtttaacaacagtgccctgtttacaacagattgtgccctatctcatctgcagccgaggaataaaggattctgattagaaagagggttgcctacagattagtaagcaattccttggatcttatgcacagaacttgtaccatttgaatctgttttatgcttaaatcaaagtgctttgatcaaatgcataacctgccatatctttacatatttgttggtagcaatttgtattaaagaaatcacaagtgcaaataaaaagtcatttatcatttgtttaactaaactgtcatggtttagtttacaatttttaaaaagttcttaaaatactgaaaatgcagttgacacttgtgtatggcttatgaagttatttttgatagtcttacattacttgaattgttcaaagtacagtatattttaaattaagaaaagtgaactatatgtatttgttttatacatttaaggcttagactcataaataatgctattgtttatgatttgaaaactttcaggcaaaatccaatttacatttttcccttccctagcaattacttttttccagcttcaactcttcttagttactaatactttgttgactttaaaaatgaaatcattcacaaacttttggtatatgatggagaatgaaaaactagagtcagacagctttaattgacattgtcaacacctccagttatcaggaatacatttttttactgccttaacctgtagtgcgtagaatatgcatcaatttcttgaaggagattcatgtttttataagaattttcatgtaattattgcaattgtggtcaaataaggaacgtttcctgcttgaaattatattgatttaaatgatgtgtgagatgtttcaccattttcaggcactgtgtaattctattgtaataaactggcaggtatctttgtaactataaatagtgcatgctcagccatgtacactgtaaatagcctttaccaaacgtgtttgacaaggaccataattaacatcacttagtgaattgtgataaagaaaaaaaagccatgatttattcgatgtgattggcttgtttttatgtggcgccaagaacgaacctgtttaacagctgtaaccaatggtactgatctatccatccaatgttgtcattatatttgactgtggttcaacagtattgcgttgtcagactaggaaagctaaacgaacaaaatggttttagttttgctgaagactggccttattaatggacagctttcctaacaagagattattaacttttatcaggtgttaacatctgtttcaggaacatggcagtatgtttacatgtcagaagttttgtttaattctatggtatttctaaattgacttgtttaaataaattcagcaaatggatagcattgttttttatttgcttcaatatgggggtagataatagctaaagagccaaggatgaatttcttcaaatgactttattctgttagctttacataggtgttggaggattcctaaggtgtcagcattttgtaaaggtaccacaaaggagaagttgatagggaatctaattttagaatgtgccaaatggtctgtgctcaacaatataattgaactctctcaactctacctcaccatttctttatctcaaaattctgttggctttgtcaaacgttggattttatttctgcagcctagtatctccccattctaccacctatgccagatgttaaagacagcagatgttttgaggagaatggcattgtggagatgcagagatgcgttgctaagttgaggtggatccagtatagagatacctctatttcttctttatggctcaagagctaggacttggattttgttttaagagatggcagctggccgggtgcagtggctcacgtctgtaatcccagcactttgggaggccgaggcaggtggatcacgaggtcaggagttcaagaccagcctggccaagagggtgaaaccccatctttactaaaaatacaaaaaaaaaaattagctgggtgtggtggtgggctcctgtaatcccagctactcaggaggctaaggcagagaatcatttgaacccaggagacggagtttgcaaagccaagatcgtgccactgcactccagcctgggcaacagaaggagactccgtctcaaaaaaaaaaaaaagatggcagctatataaatgataaaattaattacattctctttcacatgcatgaggtgcaaactctgtcacaaagtattttaattaccttttaccttgtttcatagatctttatgtgacataaaaacagtttctggcacggtggctcacgcctgtaatcctagcactttgggaggctgaggcaggtggatcacctgaggtcaggagtttgagaccagcctggccaatatggtgaaaccccatctctacaaaatttgcaaaaagtagatgggtgtggtagtgggcgcctgtaatcccagctactcaggaggttgaggcagagaatcgcttgaacccggggggtggaggttgcagtgagctgagatcgcaccactgcactccagcatgaaagagcgagactcaatctcaaaaaaaaaaaagtttctggcacctgaacaggaactggtttccatcatcaactcagaaagcactaaaatctaggtggtgattcagggaggagcaggggaagacagcctcctatggtggcatgaataagatgcttccagaactagtagggaaataactaacctcttcaggctttatcaggcctggaggggaaccttgctcatgttagcaagaaaggtatcctagagaagccactcaaaaggctccctaatccagcctgtctccacatacatactgaaaattcttccctactctgaggcagggtgtagtggtttaggggtttctccagactggaatcctacctatctgtaccgacaattgagcaaacaacagttgagagagtccaaaaaaaaaagtattaaaatgtgattgatgtaatttaccatgtttactttatgcatgcattttattggggaggggaggtcagaataattcacccaaatctagtggtcttatttcataggctaatctggtttatatttgcattaaagatactggagggcaatatttacagagtttagtttttcttaattaaaaacagtcctctattaatatagtgtgaaatatctttcaaaatttagagtttaggtttaagatgtctactagatatctttaagattttcctgtaaactcactgcacaaactggaattactttccaaaagacttagggaatgcaaatatgttactcataagatgcattgagtattgtaaataaaacaaaccatttttgatttgtttaaattgctcgttacagttctcttgtggggagggactttgtcagtcattttgcatcttaagctagactaaactttttgttgttgttttcctaaaaccataggtgcaagctttgccgctgggaagtcatattgaattaagcacttttgaaaatgtcactgtttgtgacacacaatgttctctacagaaaacttcttctatcttatgtcattttagcagtagatgtagctgcctgccaccaggtgcaatatgtcatttgcatcagccttttcagttaaggaaattaaaacttggcatgcattagttcatatgtatgaggttggctgtgtccccaaacagcaattgcttgtacaagatagaagtttgcttctcagctgggcatggtggctcatgcctgtaatccaagctctttgggaggccaacgcgggaggattgtttgagcccaggagtttgaaaccatcctgagcaatagagagacccccatctcgacaaaaaaaaaaaaaaaaaa

SEQ ID NO: 19117 - protein, 582 aa, Homo sapiens; identical to SEQ ID NO: 19115

SEQ ID NO: 19118 - DNA, 832 bp, Homo sapiens
gttatgttcaagcctcctgtttttaaattaaggcaatccttggtgatcaaaggatagtaggggaagtgagtaataaatataagtcaagcaatcatagaaatgtgaaaatatcccagttttaagaagtcatgtacctgttttttaatattcattttcttttctttaagtttcttcaggattgaatgaaaacctcactgtcaatggaggaggctggaatgaaaagtctgtaaaactctcctcacagatcagtgcaggtgaggagaagtggaactccgtttcacctgcttctgcaggaaagaggaaaactgagccatctgcctggagtcaagacactggagatgctaatacaaatggaaaagactggggaaggagttggagtgaccgttcaatattttctggcattggtaagaagtgttagaaaaatttaactttatttaaaattactaatcttgtacatttttaatttttcagaaatagaaaaaaaaactatgaatagaaaaataagtactgctctgcagaaataatagtaataattaactcatctcacatcctttttgtagagcaaggtgggaattaaataagtaaataacatcatttactctttacatagtgctttcacatactttatcacatttgattatcaacatagctaactggtgtaattatatattcttagtgatgtgatacatgtaatgtgtgggtagactttttgattaatttcaacaattctgttgagtctaaataaaaatagtaaatggaagtacagttgataacatccacttatattttacagttgcacttcagcctgggtgacagagtgagatcctgtctc

SEQ ID NO: 19119 - protein, 83 aa, Homo sapiens
VSSGLNENLTVNGGGWNEKSVKLSSQISAGEEKWNSVSPASAGKRKTEPSAWSQDTGDANTNGKDWGRSWSDRSIFSGIGKKC

SEQ ID NO: 19120 - DNA, 882 bp, Homo sapiens
tccatctcaaaaaaataaatagatagatagataagatacagagaagattggcatggcctctgcatcattatgaatactaacataacagtgctaacttgataggtatatttttgtcctgcagaatgctattttcaatgacatgacctctcaaattcagttttttaaattaaaccttttattttgagataattgtagattcaaatgcagttataagaaataatataggccaggcacggtggctcacgcctgtaatcccagcactttgggagactaaggtaggaggatcacttgagcccatggtgtttgagactagtctgtacaacatagcaagaccctatctctaattaaaaaaaaaaaaaaaagaaaaatcagcctgtagtcccagttcaagcagttctcccatctcagcctcctgagtagctgggattacaggcgcatgccaccaggcccagctaatttttttatttttagtagagatggggtttcaccatagtggtcaggctgctcttgaactcctgaccttaggggatccacccgccttggcctccaaagtgctgggattgcaggcttcagccactgctcctggccttggtatgttttgttttttgttttttttcactccacataattctctggagattcatccaggttgttgtatgtgtcagtagttgtacctttttactgctgagtgatattccatggtctggatgtacctcagtttctttaaccatttacctattgaaggacatttgtgtcctttccagtttgggactattatgaataaagctgctaaatgtgtaggttttcagaagtctctgtctaaacataagctttcatttctctaggataaatgcccatatgtacaatcgctgggtgttatga

SEQ ID NO: 19121 - protein, 63 aa, Homo sapiens
MGFHHSGQAALELLTLGDPPALASKVLGLQASATAPGLGMFCFLFFFTPHNSLEIHPGCCMCQ

SEQ ID NO: 19122 - DNA, 3249 bp, Homo sapiens
ccaagtctgaaactagctgggaatctcccaaacaaataaaaaagaagaaaaaagccagacgagaaacgtgaaattttttttcctgaattggacatgtgtttgcaaacacttgtcttgaagattatgctgtttatgcaataatttgtgaacatgtacagagttttatataaatttaaaccaatttttaaaacaaaactgcggacaccaccataaaaatggaatcaaaagaaagttaatttatgaaattaagaggtcagcagaatatactcagtgatggaagacacttgggaaagtctttttaatagaacaagaacgatcttaatttaagaatattatcctggtttaacaacagtgccctgtttacaacagattgtgccctatctcatctgcagccgaggaataaaggattctgattagaaagagggttgcctacagattagtaagcaattccttggatcttatgcacagaacttgtaccatttgaatctgttttatgcttaaatcaaagtgctttgatcaaatgcataacctgccatatctttacatatttgttggtagcaatttgtattaaagaaatcacaagtgcaaataaaaagtcatttatcatttgtttaactaaactgtcatggtttagtttacaatttttaaaaagttcttaaaatactgaaaatgcagttgacacttgtgtatggcttatgaagttatttttgatagtcttacattacttgaattgttcaaagtacagtatattttaaattaagaaaagtgaactatatgtatttgttttatacatttaaggcttagactcataaataatgctattgtttatgatttgaaaactttcaggcaaaatccaatttacatttttcccttccctagcaattacttttttccagcttcaactcttcttagttactaatactttgttgactttaaaaatgaaatcattcacaaacttttggtatatgatggagaatgaaaaactagagtcagacagctttaattgacattgtcaacacctccagttatcaggaatacatttttttactgccttaacctgtagtgcgtagaatatgcatcaatttcttgaaggagattcatgtttttataagaattttcatgtaattattgcaattgtggtcaaataaggaacgtttcctgcttgaaattatattgatttaaatgatgtgtgagatgtttcaccattttcaggcactgtgtaattctattgtaataaactggcaggtatctttgtaactataaatagtgcatgctcagccatgtacactgtaaatagcctttaccaaacgtgtttgacaaggaccataattaacatcacttagtgaattgtgataaagaaaaaaaagccatgatttattcgatgtgattggcttgtttttatgtggcgccaagaacgaacctgtttaacagctgtaaccaatggtactgatctatccatccaatgttgtcattatatttgactgtggttcaacagtattgcgttgtcagactaggaaagctaaacgaacaaaatggttttagttttgctgaagactggccttattaatggacagctttcctaacaagagattattaacttttatcaggtgttaacatctgtttcaggaacatggcagtatgtttacatgtcagaagttttgtttaattctatggtatttctaaattgacttgtttaaataaattcagcaaatggatagcattgttttttatttgcttcaatatgggggtagataatagctaaagagccaaggatgaatttcttcaaatgactttattctgttagctttacataggtgttggaggattcctaaggtgtcagcattttgtaaaggtaccacaaaggagaagttgatagggaatctaattttagaatgtgccaaatggtctgtgctcaacaatataattgaactctctcaactctacctcaccatttctttatctcaaaattctgttggctttgtcaaacgttggattttatttctgcagcctagtatctccccattctaccacctatgccagatgttaaagacagcagatgttttgaggagaatggcattgtggagatgcagagatgcgttgctaagttgaggtggatccagtatagagatacctctatttcttctttatggctcaagagctaggacttggcctcccaaagtgctggtgttacaggtgtgagccaccacacctggccaacatgtggctttcagttcttacttgaagacagctgctctagctagaaacttcctatcggcatctgagccagctggtagagggcattacctcccccacccccaagaacacttcttggaagttacacacaatacataaacttcaatttcaaacagttgcttggtcccactagccatgaagctggatgggacgtaatattctatctgggttgtcatgggccaaattaacattttgagattctgttaggaagatgagaattggataatgggcacctctaacagtgtctgtcagagttgacatacattgtgtatctcctgcaccaaagcatttttgagatcaagtgttcttccagctgagcagaaatttggaaggctattcagtgctgcttagtgtagcagctaataatgttccaacttctatatgatagtttgctttttgttttttgtttttttctagagacagagtctcgttgcccaggctggtctccaattcctgggttcaagcaatcctcctgactcagcctcctaaatgctgggattacaggcatgaaccactgtgcccagtctatatataatagattttagaagaaatttctgccactcagtgactgctttaaattctagagacagaggctgagagaaacttagtagcctgcctgcgcatactgcaagtacagactatataacaagttgaaagagaatcaccctggtatataatattttaaaacatgaaaaaggcattactattgttctggtctaagtactctaacaggacgatgatttctaaccctagcatcatgacatgtatatagtgtgttgtaagacatttgccagctaatagttacagtactgaagcttgtgaatacgttaattgagaaaactttaagcaggttcaaagttatcccatgatagtggcattcttatttgtatatatgtgctttccttttttatttgtatcaaggcatttaaaatgaatatatgtaacatgtacctaagttttaaaagcataataaaatgaacacatctgaaaccacca

SEQ ID NO: 19123 - protein, 31 aa, Homo sapiens
MAQELGLGLPKCWCYRCEPPHLANMWLSVLT

SEQ ID NO: 19124 - DNA, 1179 bp, Homo sapiens
attgtggtcaaataaggaacgtttcctgcttgaaattatattgatttaaatgatgtgtgagatgtttcaccattttcaggcactgtgtaattctattgtaataaactggcaggtatctttgtaactataaatagtgcatgctcagccatgtacactgtaaatagcctttaccaaacgtgtttgacaaggaccataattaacatcacttagtgaattgtgataaagaaaaaaaagccatgatttattcgatgtgattggcttgtttttatgtggcgccaagaacgaacctgtttaacagctgtaaccaatggtactgatctatccatccaatgttgtcattatatttgactgtggttcaacagtattgcgttgtcagactaggaaagctaaacgaacaaaatggttttagttttgctgaagactggccttattaatggacagctttcctaacaagagattattaacttttatcaggtgttaacatctgtttcaggaacatggcagtatgtttacatgtcagaagttttgtttaattctatggtatttctaaattgacttgtttaaataaattcagcaaatggatagcattgttttttatttgcttcaatatgggggtagataatagctaaagagccaaggatgaatttcttcaaatgactttattctgttagctttacataggtgttggaggattcctaaggtgtcagcattttgtaaaggtaccacaaaggagaagttgatagggaatctaattttagaatgtgccaaatggtctgtgctcaacaatataattgaactctctcaactctacctcaccatttctttatctcaaaattctgttggctttgtcaaacgttggattttatttctgcagcctagtatctccccattctaccacctatgccagatgttaaagacagcagatgttttgaggagaatggcattgtggagatgcagagatgcgttgctaagttgaggtggatccagtatagagatacctctatttcttctttatggctcaagagctaggacttggattttgttttaagagatggcagctggccgggtgcagtggctcacgtctgtaatcccagcactttgggaggccaacgcgggaggattgtttgagcccaggagtttgaaaccatcctgagcaatagagagacccccatctcgaca

SEQ ID NO: 19125 - protein, 33 aa, Homo sapiens
MAAGRVQWLTSVIPALWEANAGGLFEPRSLKPS

SEQ ID NO: 19126 - DNA, 660 bp, Homo sapiens
tggtttcagatgtgttcattttattatgcttttaaaacttaggtacatgttacatatattcattttaaatgccttgatacaaataaaaaaggaaagcacatatatacaaataagaatgccactatcatgggataactttgaacctgcttaaagttttctcaattaacgtattcacaagcttcagtactgtaactattagctggcaaatgtcttacaacacactatatacatgtcatgatgctagggttagaaatcatcgtcctgttagagtacttagaccagaacaatagtaatgcctttttcatgttttaaaatattatataccagggtgattctctttcaacttgttatatagtctgtacttgcagtatgcgcaggcaggctactaagtttctctcagcctctgtctctagaatttaaagcagtcactgagtggcagaaatttcttctaaaatctattatatatagactgggcacagtggttcatgctcttaaaacaaaatccaagtcctagctcttgagccataaagaagaaatagaggtatctctatactggatccacctcaacttagcaacgcatctctgcatctccacaatgccattctcctcaaaacatctgctgtctttaacatctggcataggtggtagaatggggagata

SEQ ID NO: 19127 - protein, 41 aa, Homo sapiens
MLLKLRYMLHIFILNALIQIKKESTYIQIRMPLSWDNFEPA

SEQ ID NO: 19128 - DNA, 652 bp, Homo sapiens
aattaagaaaaactaaactctgtaaatattgccctccagtatctttaatgcaaatataaaccagattagcctatgaaataagaccactagatttgggtgaattattctgacctcccctccccaataaaatgcatgcataaagtaaacatggtaaattacatcaatcacattttaatacttttttttttggactctctcaactgttgtttgctcaattgtcggtacagataggtaggattccagtctggagaaacccctaaaccactacaccctgcctcagagtagggaagaattttcagtatgtatgtggagacaggctggattagggagccttttgagtggcttctctaggatacctttcttgctaacatgagcaaggttcccctccaggcctgataaagcctgaagaggttagttatttccctactagttctggaagcatcttattcatgccaccataggaggctgtcttcccctgctcctccctgaatcaccacctagattttagtgctttctgagttgatgatggaaaccagttcctgttcaggtgccagaaacttttttttttttgagattgagtctcgctctttcatgctggagtgcatggcacgatcttggctttgcaaactccgtctcctgggttcaaatgatt

SEQ ID NO: 19129 - protein, 42 aa, Homo sapiens [sequence omitted]

SEQ ID NO: 19130 - DNA, 580 bp, Homo sapiens
ggagttgggcaatcatgtggagcttggacacctcaggaagtcaggacatggttggtgactgtatcccatcaccgttacttagctttatggttttctgaaagcaggttgctgcctgctgggatcaccttgacaactaagagcttctcttgcaggtgaaacttgcctaagtacttggtaaggtctgcagggaaattgagggctccaggaaggtggtaaggtgcgagaacaccttcactgcctctcctccctctccccttttttttttttgagacagagtctcgctctgtcacccaagctggagtggcagtgtgatctcggctcactgcaacctccacctcccaggttcaagcgattctcctgcctcagcctcccaagtagctgggattacaggcgtgagccaccaggcccggactaattttttttggtgtagacggggtttctccatgttggccaggctggtttcaaactcctgactcaagtgatctgcctgcctcggcctcccaaaatgataggattacaggcgtgagccaccacaccctgctctctcctctctctctgggactaaatcatccatgagtat

SEQ ID NO: 19131 - protein, 72 aa, Homo sapiens
GLQEGGKVREHLHCLSSLSPFFFLRQSLALSPKLEWQCDLGSLQPPPPRFKRFSCLSLPSSWDYRREPPGPD

SEQ ID NO: 19132 - DNA, 2757 bp, Homo sapiens
tattttctgggaaaagattactaccacagtaattgagctgtgaagcggagacaaattgctctcggtggtggttcaaagtactgcaattgactggaatagcaccgcgcagttttccttcctctcgtgcaagataagagtgataggagctgtatcgattacctgcaagatagaagtagaagcgggccgggtgcggtggctcacgcctgtaatcccagcactttgggaggctgaggcgggtggatcattcgacgtcaggagttccagaccagcctgaccaacatggtgaaaccccgtctctactaaaaatacaacaaattagccgggtgtggtggcaagcgcctgtaatcccagctactcggttggttgggcaggagaatcgcttgaacccgggaggcggaggttgcagtgagccgagatcgcgccattgcactccagcctgggcgacaagagcgagactctgtctcaaaaaaaaaaaaaaaagaagtagaagggaagaaaatcgcaaggaactagactaaaagaatctcgacccttgaatggagttacacgaacggccagatgaaagaaggaaggcccggacctccactcagggccgactaggggactggcggagggtgcacgctgatggatttactcaccgggtgcttggagctccagcagctggctggagcccgcgatgacgtcacggactcgggtcacatggccaagtccgccccgccccctccccgtccccgccgctgcagcggtcgccttcggagcgaagggtaccgacccggcagaagctcggagctctcggggtatcgaggaggcaggcccgcgggcgcacgggcgagcgggccgggagccggagcggcggaggagccggcagcagcggcgcggcgggctccaggcgaggcggtcgacgctcctgaaaacttgcgcgcgcgctcgcgccactgcgcccggagcgatgaagatggtcgcgccctggacgcggttctactccaacagctgctgcttgtgctgccatgtccgcaccggcaccatcctgctcggcgtctggtatctgatcatcaatgctgtggtactgttgattttattgagtgccctggctgatccggatcagtataacttttcaagttctgaactgggaggtgactttgagttcatggatgatgccaacatgtgcattgccattgcgatttctcttctcatgatcctgatatgtgctatggctacttacggagcgtacaagcaacgcgcagcctggatcatcccattcttctgttaccagatctttgactttgccctgaacatgttggttgcaatcactgtgcttatttatccaaactccattcaggaatacatacggcaactgcctcctaattttccctacagagatgatgtcatgtcagtgaatcctacctgtttggtccttattattcttctgtttattagcattatcttgacttttaagggttacttgattagctgtgtttggaactgctaccgatacatcaatggtaggaactcctctgatgtcctggtttatgttaccagcaatgacactacggtgctgctacccccgtatgatgatgccactgtgaatggtgctgccaaggagccaccgccaccttacgtgtctgcctaagccttcaagtgggcggagctgagggcagcagcttgactttgcagacatctgagcaatagttctgttatttcacttttgccatgagcctctctgagcttgtttgttgctgaaatgctactttttaaaatttagatgttagattgaaaactgtagttttcaacatatgctttgctggaacactgtgatagattaactgtagaattcttcctgtacgattggggatataatgggcttcactaaccttccctaggcattgaaacttcccccaaatctgatggacctagaagtctgcttttgtacctgctgggccccaaagttgggcatttttctctctgttccctctcttttgaaaatgtaaaataaaaccaaaaatagacaactttttcttcagccattccagcatagagaacaaaaccttatggaaacaggaatgtcaattgtgtaatcattgttctaattaggtaaatagaagtccttatgtatgtgttacaagaatttcccccacaacatcctttatgactgaagttcaatgacagtttgtgtttggtggtaaaggattttctccatggcctgaattaagaccattagaaagcaccaggccgtgggagcagtgaccatctgctgactgttcttgtggatcttgtgtccagggacatggggtgacatgcctcgtatgtgttagagggtggaatggatgtgtttggcgctgcatgggatctggtgcccctcttctcctggattcacatccccacccagggcccgcttttactaagtgttctgccctagattggttcaaggaggtcatccaactgactttatcaagtggaattgggatatatttgatatacttctgcctaacaacatggaaaagggttttcttttccctgcaagctacatcctactgctttgaacttccaagtatgtctagtcaccttttaaaatgtaaacattttcagaaaaatgaggattgccttccttgtatgcgctttttaccttgactacctgaattgcaagggatttttatatattcatatgttacaaagtcagcaactctcctgttggttcattattgaatgtgctgtaaattaagttgtttgcaattaaaacaaggtttgcccacatccaag

SEQ ID NO: 19133 - protein, 317 aa, Homo sapiens; identical to SEQ ID NO: 2330

SEQ ID NO: 19134 - DNA, 2994 bp, Homo sapiens
tattttctgggaaaagattactaccacagtaattgagctgtgaagcggagacaaattgctctcggtggtggttcaaagtactgcaattgactggaatagcaccgcgcagttttccttcctctcgtgcaagataagagtgataggagctgtatcgattacctgcaagatagaagtagaagcgggccgggtgcggtggctcacgcctgtaatcccagcactttgggaggctgaggcgggtggatcattcgacgtcaggagttccagaccagcctgaccaacatggtgaaaccccgtctctactaaaaatacaacaaattagccgggtgtggtggcaagcgcctgtaatcccagctactcggttggttgggcaggagaatcgcttgaacccgggaggcggaggttgcagtgagccgagatcgcgccattgcactccagcctgggcgacaagagcgagactctgtctcaaaaaaaaaaaaaaaagaagtagaagggaagaaaatcgcaaggaactagactaaaagaatctcgacccttgaatggagttacacgaacggccagatgaaagaaggaaggcccggacctccactcagggccgactaggggactggcggagggtgcacgctgatggatttactcaccgggtgcttggagctccagcagctggctggagcccgcgatgacgtcacggactcgggtcacatggccaagtccgccccgccccctccccgtccccgccgctgcagcggtcgccttcggagcgaagggtaccgacccggcagaagctcggagctctcggggtatcgaggaggcaggcccgcgggcgcacgggcgagcgggccgggagccggagcggcggaggagccggcagcagcggcgcggcgggctccaggcgaggcggtcgacgctcctgaaaacttgcgcgcgcgctcgcgccactgcgcccggagcgatgaagatggtcgcgccctggacgcggttctactccaacagctgctgcttgtgctgccatgtccgcaccggcaccatcctgctcggcgtctggtatctgatcatcaatgctgtggtactgttgattttattgagtgccctggctgatccggatcagtataacttttcaagttctgaactgggaggtgactttgagttcatggatgatgccaacatgtgcattgccattgcgatttctcttctcatgatcctgatatgtgctatggctacttacggagcgtacaagcaacgcgcagcctggatcatcccattcttctgttaccagatctttgactttgccctgaacatgttggttgcaatcactgtgcttatttatccaaactccattcaggaatacatacggcaactgcctcctaattttccctacagagatgatgtcatgtcagtgaatcctacctgtttggtccttattattcttctgtttattagcattatcttgacttttaagggttacttgattagctgtgtttggaactgctaccgatacatcaatggtaggaactcctctgatgtcctggtttatgttaccagcaatgacactacggtgctgctacccccgtatgatgatgccactgtgaatggtgctgccaaggagccaccgccaccttacgtgtctgcctaagccttcaagtgggcggagctgagggcagcagcttgactttgcagacatctgagcaatagttctgttatttcacttttgccatgagcctctctgagcttgtttgttgctgaaatgctactttttaaaatttagatgttagattgaaaactgtagttttcaacatatgctttgctggaacactgtgatagattaactgtagaattcttcctgtacgattggggatataatgggcttcactaaccttccctaggcattgaaacttcccccaaatctgatggacctagaagtctgcttttgtacctgctgggccccaaagttgggcatttttctctctgttccctctcttttgaaaatgtaaaataaaaccaaaaatagacaactttttcttcagccattccagcatagagaacaaaaccttatggaaacaggaatgtcaattgtgtaatcattgttctaattaggtaaatagaagtccttatgtatgtgttacaagaatttcccccacaacatcctttatgactgaagttcaatgacagtttgtgtttggtggtaaaggattttctccatggcctgaattaagaccattagaaagcaccaggccgtgggagcagtgaccatctgctgactgttcttgtggatcttgtgtccagggacatggggtgacatgcctcgtatgtgttagagggtggaatggatgtgtttggcgctgcatgggatctggtgcccctcttctcctggattcacatccccacccagggcccgcttttactaagtgttctgccctagattggttcaaggaggtcatccaactgactttatcaagtggaattgggatatatttgatatacttctgcctaacaacatggaaaagggttttcttttccctgcaagctacatcctactgctttgaacttccaagtatgtctagtcaccttttaaaatgtaaacattttcagaaaaatgaggattgccttccttgtatgcgctttttaccttgactacctgaattgcaagggatttttatatattcatatgttacaaagtcagcaactctcctgttggttcattattgaatgtgctgtaaattaagttgtttgcaattaaaacaaggtttgcccacatccaagatgaccttgtgattttgtgctgattgtgtctgaggacctttccctccacatatggtctggcagatgcacccagttcagcctaaggagtaggcttttttttgggggggggaggtcgggtgggggggatttttaatcttttaattttcaagatggttaaaatattgaaatgtttaagtggataactatattattcataaaatgactgagtgaaaactaatacactatgagatgaaaagt

SEQ ID NO: 19135 - protein, 317 aa, Homo sapiens; identical to SEQ ID NO: 2330

SEQ ID NO: 19136 - DNA, 1281 bp, Homo sapiens
gccccctccccgtccccgccgctgcagcggtcgccttcggagcgaagggtaccgacccggcagaagctcggagctctcggggtatcgaggaggcaggcccgcgggcgcacgggcgagcgggccgggagccggagcggcggaggagccggcagcagcggcgcggcgggctccaggcgaggcggtcgacgctcctgaaaacttgcgcgcgcgctcgcgccactgcgcccggagcgatgaagatggtcgcgccctggacgcggttctactccaacagctgctgcttgtgctgccatgtccgcaccggcaccatcctgctcggcgtctggtatctgatcatcaatgctgtggtactgttgattttattgagtgccctggctgatccggatcagtataacttttcaagttctgaactgggaggtgactttgagttcatggatgatgccaacatgtgcattgccattgcgatttctcttctcatgatcctgatatgtgctatggctacttacggagcgtacaagcaacgcgcagcctggatcatcccattcttctgttaccagatctttgactttgccctgaacatgttggttgcaatcactgtgcttatttatccaaactccattcaggaatacatacggcaactgcctcctaattttccctacagagatgatgtcatgtcagtgaatcctacctgtttggtccttattattcttctgtttattagcattatcttgacttttaagggttacttgattagctgtgtttggaactgctaccgatacatcaatggtaggaactcctctgatgtcctggtttatgttaccagcaatgacactacggtgctgctacccccgtatgatgatgccactgtgaatggtgctgccaaggagccaccgccaccttacgtgtctgcctaagccttcaagtgggcggagctgagggcagcagcttgactttgcagacatctgagcaatagttctgttatttcacttttgccatgagcctctctgagcttgtttgttgctgaaatgctactttttaaaatttagatgttagattgaaaactgtagttttcaacatatgctttgctggaacactgtgatagattaactgtagaattcttcctgtacgattggggatataatgggcttcactaaccttccctaggcattgaaacttcccccaaatctgatggacctagaagtctgcttttgtacctgctgggccccaaagttgggcatttttctctctgttccctctcttttgaaaatgtaaaataaaacc

SEQ ID NO: 19137 - protein, 226 aa, Homo sapiens
MKMVAPWTRFYSNSCCLCCHVRTGTILLGVWYLIINAVVLLILLSALADPDQYNFSSSELGGDFEFMDDANMCIAIAISLLMILICAMATYGAYKQRAAWIIPFFCYQIFDFALNMLVAITVLIYPNSIQEYIRQLPPNFPYRDDVMSVNPTCLVLIILLFISIILTFKGYLISCVWNCYRYINGRNSSDVLVYVTSNDTTVLLPPYDDATVNGAAKEPPPPYVSA

SEQ ID NO: 19138 - DNA, 646 bp, Homo sapiens
ctccccgtccccgccgctgcagcggtcgccttcggagcgaagggtaccgacccggcagaagctcggagctctcggggtatcgaggaggcaggcccgcgggcgcacgggcgagcgggccgggagccggagcggcggaggagccggcagcagcggcgcggcgggctccaggcgaggcggtcgacgctcctgaaaacttgcgcgcgcgctcgcgccactgcgcccggagcgatgaagatggtcgcgccctggacgcggttctactccaacagctgctgcttgtgctgccatgtccgcaccggcaccatcctgctcggcgtctggtatctgatcatcaatgctgtggtactgttgattttattgagtgccctggctgatccggatcagtataacttttcaagttctgaactgggaggtgactttgagttcatggatgatgccaacatgtgcattgccattgcgatttctcttctcatgatcctgatatgtgctatggctacttacggagcgtacaagcaacgcgcagcctggatcatcccattcttctgttaccagatctttgactttgccctgaacatgttggttcattattgaatgtgctgtaaattaagttgtttgcaattaaaacaaggtttgcccacatccaaga

SEQ ID NO: 19139 - protein, 120 aa, Homo sapiens
MKMVAPWTRFYSNSCCLCCHVRTGTILLGVWYLIINAVVLLILLSALADPDQYNFSSSELGGDFEFMDDANMCIAIAISLLMILICAMATYGAYKQRAAWIIPFFCYQIFDFALNMLVHY

SEQ ID NO: 19140 - DNA, 417 bp, Homo sapiens
ccagtccctgcattctcccgatgttgtcatatgcgcatacagcttcagatagacttacctgttggttccaatatcaaagcatcatgggtgagattggactacatgctcctgagatttttctcccaaaaccttttccttggctgtaattctgaggttcaggctgacagtatgtgacattaactcggctcctatttctttccttctgcataatattcttccaacaattttttttgttttgttttgtttttggtgagatggagttttactcttgttgcccaggctggagtgcaatggcgcgatctcggctcactgcatcctccacctcccagagaatgccttgaacccaggagacagaggttgcatgagccaagattgcagcattgcactccagcctggggcaacaagagcgaaactcca

SEQ ID NO: 19141 - protein, 47 aa, Homo sapiens
MRIQLQIDLPVGSNIKASWVRLDYMLLRFFSQNLFLGCNSEVQADSM

SEQ ID NO: 19142 - DNA, 2122 bp, Homo sapiens
gcagcctgaggcagagctcgggggctgtcggtggggaccttgcaggagggcaccccaagcccgcccggcccgcccaacccagcccctgcgcgcagcccgggccgagtaggaccccgcgcgcccctcgctatggcggcgccctcgcggctcctgatccgcgggggtcgcgtggtcaacgatgacttctcggaggtggccgacgtgctggtggaggacggcgtggtgcgggcactcgggcacgacctgctgcctcccgggggcgctcctgcggggctgcgggtcctcgacgccgccggcaagctcgtcctgcccggaggcatcgacacacacacgcacatgcagttccccttcatgggctcgcggtccatcgacgacttccaccagggcaccaaggctgctctctcaggaggcaccaccatgattattgatttcgccattcctcagaaaggtggctccctcattgaggccttcgagacctggcgaagctgggctgatcccaaagtttgctgcgactacagccttcatgtggcagtgacgtggtggagtgaccaggttaaagaagaaatgaaaatccttgtgcaagataaaggtgttaactctttcaagatgtttatggcctataaagatctgtacatggtgacagacctggagctgtacgaagccttctctcggtgcaaggaaattggagcaattgcccaggtccatgcggaaaatggagacttaattgcagagggagcaaagaagatgttggctctggggataacaggccctgagggccacgagctgtgccgcccagaggcagtggaggcagaggccacgctgagagccatcaccatagccagcgctgtgaactgtcctctctacattgtgcatgtgatgagcaagtctgcagctaaggtgatagcggatgcaaggagagatgggaaggtggtctatggtgaacccatagcagccagtcttggcacagatggcactcactactggaataaagaatggcaccatgcagcccaccatgtcatgggtccacctttgcgaccagacccctcaacacccgacttcctcatgaatctgttggctaatgatgatctaaccacaacagggactgataactgcactttcaacacctgccagaaagctcttgggaaggatgattttaccaagatccccaatggggtgaatggtgttgaagatcggatgtccgtaatatgggaaaaaggcgtgcatagtggtaaaatggatgaaaacagatttgtggcagttaccagcacaaatgcagccaaaatttttaatctctatccaagaaaaggaagaatagctgtaggatcagatgctgacattgttatttgggacccaaaaggcacaaggactatctcagcaaaaactcatcatcaggctgttaacttcaacattttcgagggcatggtttgccacggggtgccccttgtgactatttcaagaggcaaagtggtatatgaagccggagtgttcagtgtcacggcaggagatgggaagtttattcctcgaaaaccatttgctgaatatatttacaaacgaataaagcagcgagaccggacttgcacacctacccctgtggagcgtgcaccctataagggagaagtcgccacactgaaatccagagtgacaaaagaagatgccacagcagggaccaggaaacaggcccacccctgaagtgtgtgccatcggtaaaaaaatcagaggaaaggaggctgccattcccttcacagccaaacattgtcaacccatggagaagcaggccttattcaactccctaggatcctttagaaaaaattcaccactataggcttctttgattttctttcagaagcaattgctgtctttctcactgtgtttttgttgctgcataagattgaaggtataaatttatattattgtgatggaaaggctgtgtggaaattcattgatgatactttaaaatgtcatctttgcttgtactagatttcttacttagaatttttaaaaatcattttcttgtttaaatagtttctttttttaaaaaaatggttacattagttttaaaatagctctgtgattttactttttattgtaattaataaacattgagatcttcattttatacctt

SEQ ID NO: 19143 - protein, 519 aa, Homo sapiens; identical to SEQ ID NO: 2332

SEQ ID NO: 19144 - DNA, 4076 bp, Homo sapiens
cagtttgatgcaggataaatgggacctggcagaagttaatggcagagatgtccctgtggagacaatgaccttcagtcccaggagaattacaaataatagatttaacaactttttacgtaacagatggctaataggtggcacacagatgcacagtatcgtaataaccattactgcatcttttcttttttttccttttttttttttttgttgtttgtttggagacgggagtcttgctctgtcacccgggctggagtgcactggtgcgatctcagctcactgcactccgtctcccaggttcaagcgattctcctgcctcagcctcccaagtagctgtgattacaggcgcccgccaccacgcctggctaattttttgtatttttagtagagacagggtttcactctgttggccaggctggtcccagactactgacctcgtgatccacccgccttggcctcccaaactgctgggattacaggtgtgagccacggcgcccgaccactgcatctttggccaagtgtaaatggccagaaaactttttaccacattgcaacaaaagagcacaatgaagagtcaaagatcccagctgggcgcagtggcttcaacgtatattcagtaaatacagtattcttaggagtttttaaatcttgtattatttctccctttaccttttacagggattttcatttattaaaactcagtgatctaggcttctactagcataaagccctatgaagacagactgcctgcgtcagctttgtattcccactgtagggataatacatatattcagtaaatgtttgtcaaatgactaagctttaaaatgatcaaatatgccaagactcagattgttttaattactgataatagaaaattgttctttttcttcgctcccccttttaatcatttttctttccatctactctcaaagatcatttgaaacacagttgtcaagagtggaagcagaattgttaagaagagaagctcctccctcgtatggacaattgattgctcagggtttaattccaccagttgaagattttcctgtttgttcacctaatcaggcttctgttttggaaaatctgaggctagcggtacgatctcagcttggatttacttcagtcaggcttcctatggcaggcagatcaagcaacatttggaaccgtatttttaattttgcaagatcacgtcattctgggtcattggctttggtctcagcagatggagatgaggttgtccctagtcagagtaccagtagagaacctgagagaaatcatactcacagaagtttgttttccgtggagtctgatgatacagacacagaaaatgagagaagagatatggcaggagcatctggtggggttgcagctcctttgcctcaaaaagtccctcccacaacggcagtagaagcgacagtaggagcatgtgcaagttcctcaactcagagtacccgaggtggtcatgcagataatggaagggatgtgacaagtgtggaacccccaagtgtgagtccagcacgtcaccagcttacaagtgcactcagtcgtatgactcaggggctacgctgggtacgttttacattaggacgatcaagttccctaagtcagaaccagagtcctttgagacaacttgataatggggtaagtggaagagaagatgatgatgatgttgaaatgctaattccaatttctgatggatcttcagactttgatgtgaatgactgctccagacctcttcttgatcttgcctcagatcaaggacaagggcttagacaaccatataatgcaacaaatcctggagtaaggccaagtaatcgagatggcccctgtgagcgctgtggtattgtccacactgcccagataccagacacttgcttagaagtaacactgaaaaacgaaacgagtgatgatgaggctttgttactttgttaggtacgaatcacataagggagattgtatacaagttggagcaatatccatttattattttgtaactttacagttaaactagttttagtttaaaaagaaaaaatgcagggtgatttcttattattatatgttagcctgcatggttaaattcgacaacttgtaactctatgaacttagagtttactattttagcagctaaaaatgcatcacatattcatattgttcaataatgtcctttcatttgtttctgattgttttcatcctgatactgtagttcactgtagaaatgtggctgctgaaactcatttgattgtcatttttatctatcctatgttaaatggtttgtttttacaaaataataccttattttaattgaaacgtttatgcttttgccaacacatcttgtaacttaatatactagatgttaaggttgttaatgtacaaaaaaaaaacccttatactcacctgcgttttcatttgtttgacatttgtctattattggatttcattatcatatgaacttgtcagtgggaaacaaactgtctaaaaatttttctcttacgtttaacatacaatcatgtgaaatttaggcagagttcgataaattactggcaaaaacaaaactcttttataaagattttctaatgttgactttaatactctaacatggtacaaaccaaatggtaaaatcccaagtcatttcttttttcatctctatttagcaacagaattaagtggatgaagatattctactatgcattaaatcttgaactttataaaacatgtacaaaaattgtacaagataagttccacctggtaatgtctttccctaatacagggttgcgcttgcattggaccctagggatttgcactaaaattatatcaaggtctcagatgagcttagtgcacaagcactatcactttaaatactattatttgctaccacagcaactatatatttccatagcttttggctgggggcgggggacatttttattacaacttgaaattgctttgctggtttcatatttatttgttgtatttaaaaaatacattgttgtaagagtgattttttcaatatattttattcctgggggggatcatgctacactctcaaaagaaaattaagaaatcattcagatcatcccccctttttaagtagtgtgaattgcaaaacccaacatattttttttactgtcagttgcggtttatttattctttaactgtctgttttagtagtttaatgattatgaaaaatgtatctgtgtgtgatttgctatttattaaattttaagtactttgctgaatgtcattttaaagcatgtttgaagtcttgtgtatttgtctgtgttaatgctgtcaggaggaactgactaagatgttttaatatgtatcaaaaattaaaatgattttttttattgccttgaggtactttttaaatcaaagctgttctttatttgttgaattttggtgcatatacaaattcaggccataaaatatgcaatatatctagaataaaaatgattagaaggagatcattccttaactactttatagtaaagtagtagcttttaccagtactcgagggtaaaattttctaaggacttgaatattattttgcttgagattgcccttcaattgatgtatctcacaagatgagagagtttaattgattaaactgccttttaattgacgtatctcacaagatgcagtaacacaatcagttctctttttaaattgttttcacatacattttagacccctataatatattctactggcagaatttgggttaccaaataatcttttatgccctagtactaatatattatcaagtacaagggttttggttttctagcatatgttttaatttattattttaattaactaatacatcatcctggttcaaacagtaaaatgtaaattcctcttctatcccaacacccatcttttagttcacttgaaagagacacatatcagtaccagattcttgtatatctctctagaaataaccatatatgtacataggcatatcagtaccatatatagtaatgcaaattgtaacataactatgcatacattttctgtaccttttctcaaagggaaataatacatcattagagtttgaatattaaaagtaagatcaagca

SEQ ID NO: 19145 - protein, 265 aa, Homo sapiens
MAGRSSNIWNRIFNFARSRHSGSLALVSADGDEVVPSQSTSREPERNHTHRSLFSVESDDTDTENERRDMAGASGGVAAPLPQKVPPTTAVEATVGACASSSTQSTRGGHADNGRDVTSVEPPSVSPARHQLTSALSRMTQGLRWVRFTLGRSSSLSQNQSPLRQLDNGVSGREDDDDVEMLIPISDGSSDFDVNDCSRPLLDLASDQGQGLRQPYNATNPGVRPSNRDGPCERCGIVHTAQIPDTCLEVTLKNETSDDEALLLC

SEQ ID NO: 19146 - DNA, 4836 bp, Homo sapiens
ggtggctcggcggcggcggcggcggcggcggcggcgtcggcgtcgtctacctccagcttctcctccctcctcctccgtctcctcctctctctctccatctgctgtggttatggcctgtcgctggagcacaaaagagtctccgcggtggaggtctgcgttgctcttgcttttcctcgctggggtgtacggaaatggtgctcttgcagaacattctgaaaatgtgcatatttcaggagtgtcaactgcttgtggagagactccagagcaaatacgagcaccaagtggcataatcacaagcccaggctggccttctgaatatcctgcaaaaatcaactgtagctggttcataagggcaaacccaggcgaaatcattactataagttttcaggattttgatattcaaggatccagaaggtgcaatttggactggttgacaatagaaacatacaagaatattgaaagttacagagcttgtggttccacaattccacctccgtatatctcttcacaagaccacatctggattaggtttcattcggatgacaacatctctagaaagggtttcagactggcatatttttcagggaaatctgaggaaccaaattgtgcttgtgatcagtttcgttgtggtaatggaaagtgtataccagaagcctggaaatgtaataacatggatgaatgtggagatagttccgatgaagagatctgtgccaaagaagcaaatcctccaactgctgctgcttttcaaccctgtgcttacaaccagttccagtgtttatcccgttttaccaaagtttacacttgcctccccgaatctttaaaatgtgatgggaacattgactgccttgacctaggagatgagatagactgtgatgtgccaacatgtgggcaatggctaaaatatttttatggtacttttaattctcccaattatccagacttttatcctcctggaagcaattgcacctggttaatagacactggtgatcaccgtaaagtcattttacgcttcactgactttaaacttgatggtactggttatggtgattatgtcaaaatatatgatggattagaggagaatccacacaagcttttgcgtgtgttgacagcttttgattctcatgcacctcttacagttgtttcttcttctggacagataagggtacatttttgtgctgataaagtgaatgctgcaaggggatttaatgctacttaccaagtagatgggttctgtttgccatgggaaataccctgtggaggtaactgggggtgttatactgagcagcagcgttgtgatgggtattggcattgcccaaatggaagggatgaaaccaattgtaccatgtgccagaaggaagaatttccatgttcccgaaatggtgtctgttatcctcgttctgatcgctgcaactaccagaatcattgcccaaatggctcagatgaaaaaaactgctttttttgccaaccaggaaatttccattgtaaaaacaatcgttgtgtgtttgaaagttgggtgtgtgattctcaagatgactgtggtgatggcagcgatgaagaaaattgcccagtaatcgtgcctacaagagtcatcactgctgccgtcatagggagcctcatctgtggcctgttactcgtcatagcattgggatgtacttgtaagctttattctctgagaatgtttgaaagaagatcatttgaaacacagttgtcaagagtggaagcagaattgttaagaagagaagctcctccctcgtatggacaattgattgctcagggtttaattccaccagttgaagattttcctgtttgttcacctaatcaggcttctgttttggaaaatctgaggctagcggtacgatctcagcttggatttacttcagtcaggcttcctatggcaggcagatcaagcaacatttggaaccgtatttttaattttgcaagatcacgtcattctgggtcattggctttggtctcagcagatggagatgaggttgtccctagtcagagtaccagtagagaacctgagagaaatcatactcacagaagtttgttttccgtggagtctgatgatacagacacagaaaatgagagaagagatatggcaggagcatctggtggggttgcagctcctttgcctcaaaaagtccctcccacaacggcagtagaagcgacagtaggagcatgtgcaagttcctcaactcagagtacccgaggtggtcatgcagataatggaagggatgtgacaagtgtggaacccccaagtgtgagtccagcacgtcaccagcttacaagtgcactcagtcgtatgactcaggggctacgctgggtacgttttacattaggacgatcaagttccctaagtcagaaccagagtcctttgagacaacttgataatggggtaagtggaagagaagatgatgatgatgttgaaatgctaattccaatttctgatggatcttcagactttgatgtgaatgactgctccagacctcttcttgatcttgcctcagatcaaggacaagggcttagacaaccatataatgcaacaaatcctggagtaaggccaagtaatcgagatggcccctgtgagcgctgtggtattgtccacactgcccagataccagacacttgcttagaagtaacactgaaaaacgaaacgagtgatgatgaggctttgttactttgttaggtacgaatcacataagggagattgtatacaagttggagcaatatccatttattattttgtaactttacagttaaactagttttagtttaaaaagaaaaaatgcagggtgatttcttattattatatgttagcctgcatggttaaattcgacaacttgtaactctatgaacttagagtttactattttagcagctaaaaatgcatcacatattcatattgttcaataatgtcctttcatttgtttctgattgttttcatcctgatactgtagttcactgtagaaatgtggctgctgaaactcatttgattgtcatttttatctatcctatgttaaatggtttgtttttacaaaataataccttattttaattgaaacgtttatgcttttgccaacacatcttgtaacttaatatactagatgttaaggttgttaatgtacaaaaaaaaaacccttatactcacctgcgttttcatttgtttgacatttgtctattattggatttcattatcatatgaacttgtcagtgggaaacaaactgtctaaaaatttttctcttacgtttaacatacaatcatgtgaaatttaggcagagttcgataaattactggcaaaaacaaaactcttttataaagattttctaatgttgactttaatactctaacatggtacaaaccaaatggtaaaatcccaagtcatttcttttttcatctctatttagcaacagaattaagtggatgaagatattctactatgcattaaatcttgaactttataaaacatgtacaaaaattgtacaagataagttccacctggtaatgtctttccctaatacagggttgcgcttgcattggaccctagggatttgcactaaaattatatcaaggtctcagatgagcttagtgcacaagcactatcactttaaatactattatttgctaccacagcaactatatatttccatagcttttggctgggggcgggggacatttttattacaacttgaaattgctttgctggtttcatatttatttgttgtatttaaaaaatacattgttgtaagagtgattttttcaatatattttattcctgggggggatcatgctacactctcaaaagaaaattaagaaatcattcagatcatcccccctttttaagtagtgtgaattgcaaaacccaacatattttttttactgtcagttgcggtttatttattctttaactgtctgttttagtagtttaatgattatgaaaaatgtatctgtgtgtgatttgctatttattaaattttaagtactttgctgaatgtcattttaaagcatgtttgaagtcttgtgtatttgtctgtgttaatgctgtcaggaggaactgactaagatgttttaatatgtatcaaaaattaaaatgattttttttattgccttgaggtactttttaaatcaaagctgttctttatttgttgaattttggtgcatatacaaattcaggccataaaatatgcaatatatctagaataaaaatgattagaaggagatcattccttaactactttatagtaaagtagtagcttttaccagtactcgagggtaaaattttctaaggacttgaatattattttgcttgagattgcccttcaattgatgtatctcacaagatgagagagtttaattgattaaactgccttttaattgacgtatctcacaagatgcagtaacacaatcagttctctttttaaattgttttcacatacattttagacccctataatatattctactggcagaatttgggttaccaaataatcttttatgccctagtactaatatattatcaagtacaagggttttggttttctagcatatgttttaatttattattttaattaactaatacatcatcctggttcaaacagtaaaatgtaaattcctcttctatcccaacacccatcttttagttcacttgaaagagacacatatcagtaccagattcttgtatatctctctagaaataaccatatatgtacataggcatatcagtaccatatatagtaatgcaaattgtaacataactatgcatacattttctgtaccttttctcaaagggaaataatacatcattagagtttgaatattaaaagtaagatcaagca

SEQ ID NO: 19147 - protein, 859 aa, Homo sapiens; identical to SEQ ID NO: 2334

SEQ ID NO: 19148 - DNA, 3363 bp, Homo sapiens
cagtttgatgcaggataaatgggacctggcagaagttaatggcagagatgtccctgtggagacaatgaccttcagtcccaggagaattacaaataatagatttaacaactttttacgtaacagatggctaataggtggcacacagatgcacagtatcgtaataaccattactgcatcttttcttttttttccttttttttttttttgttgtttgtttggagacgggagtcttgctctgtcacccgggctggagtgcactggtgcgatctcagctcactgcactccgtctcccaggttcaagcgattctcctgcctcagcctcccaagtagctgtgattacaggcgcccgccaccacgcctggctaattttttgtatttttagtagagacagggtttcactctgttggccaggctggtcccagactactgacctcgtgatccacccgccttggcctcccaaactgctgggattacaggtgtgagccacggcgcccgaccactgcatctttggccaagtgtaaatggccagaaaactttttaccacattgcaacaaaagagcacaatgaagagtcaaagatcccagctgggcgcagtggcttcaacgtatattcagtaaatacagtattcttaggagtttttaaatcttgtattatttctccctttaccttttacagggattttcatttattaaaactcagtgatctaggcttctactagcataaagccctatgaagacagactgcctgcgtcagctttgtattcccactgtagggataatacatatattcagtaaatgtttgtcaaatgactaagctttaaaatgatcaaatatgccaagactcagattgttttaattactgataatagaaaattgttctttttcttcgctcccccttttaatcatttttctttccatctactctcaaagatcatttgaaacacagttgtcaagagtggaagcagaattgttaagaagagaagctcctccctcgtatggacaattgattgctcagggtttaattccaccagttgaagattttcctgtttgttcacctaatcaggcttctgttttggaaaatctgaggctagcggtacgatctcagcttggatttacttcagtcaggcttcctatggcaggcagatcaagcaacatttggaaccgtatttttaattttgcaagatcacgtcattctgggtcattggctttggtctcagcagatggagatgaggttgtccctagtcagagtaccagtagagaacctgagagaaatcatactcacagaagtttgttttccgtggagtctgatgatacagacacagaaaatgagagaagagatatggcaggagcatctggtggggttgcagctcctttgcctcaaaaagtccctcccacaacggcagtagaagcgacagtaggagcatgtgcaagttcctcaactcagagtacccgaggtggtcatgcagataatggaagggatgtgacaagtgtggaacccccaagtgtgagtccagcacgtcaccagcttacaagtgcactcagtcgtatgactcaggggctacgctgggtacgttttacattaggacgatcaagttccctaagtcagaaccagagtcctttgagacaacttgataatggggtaagtggaagagaagatgatgatgatgttgaaatgctaattccaatttctgatggatcttcagactttgatgtgaatgactgctccagacctcttcttgatcttgcctcagatcaaggacaagggcttagacaaccatataatgcaacaaatcctggagtaaggccaagtaatcgagatggcccctgtgagcgctgtggtattgtccacactgcccagataccagacacttgcttagaagtaacactgaaaaacgaaacgagtgatgatgaggctttgttactttgttaggtacgaatcacataagggagattgtatacaagttggagcaatatccatttattattttgtaactttacagttaaactagttttagtttaaaaagaaaaaatgcagggtgatttcttattattatatgttagcctgcatggttaaattcgacaacttgtaactctatgaacttagagtttactattttagcagctaaaaatgcatcacatattcatattgttcaataatgtcctttcatttgtttctgattgttttcatcctgatactgtagttcactgtagaaatgtggctgctgaaactcatttgattgtcatttttatctatcctatgttaaatggtttgtttttacaaaataataccttattttaattgaaacgtttatgcttttgccaacacatcttgtaacttaatatactagatgttaaggttgttaatgtacaaaaaaaaaacccttatactcacctgcgttttcatttgtttgacatttgtctattattggatttcattatcatatgaacttgtcagtgggaaacaaactgtctaaaaatttttctcttacgtttaacatacaatcatgtgaaatttaggcagagttcgataaattactggcaaaaacaaaactcttttataaagattttctaatgttgactttaatactctaacatggtacaaaccaaatggtaaaatcccaagtcatttcttttttcatctctatttagcaacagaattaagtggatgaagatattctactatgcattaaatcttgaactttataaaacatgtacaaaaattgtacaagataagttccacctggtaatgtctttccctaatacagggttgcgcttgcattggaccctagggatttgcactaaaattatatcaaggtctcagatgagcttagtgcacaagcactatcactttaaatactattatttgctaccacagcaactatatatttccatagcttttggctgggggcgggggacatttttattacaacttgaaattgctttgctggtttcatatttatttgttgtatttaaaaaatacattgttgtaagagtgattttttcaatatattttattcctgggggggatcatgctacactctcaaaagaaaattaagaaatcattcagatcatcccccctttttaagtagtgtgaattgcaaaacccaacatattttttttactgtcagttgcggtttatttattctttaactgtctgttttagtagtttaatgattatgaaaaatgtatctgtgtgtgatttgctatttattaaattttaagtactttgctgaatgtcattttaaagcatgtttgaagtcttgtgtatttgtctgtgttaatgctgtcaggaggaactgactaagatgttttaatatgtatcaaaaattaaaatgattttttttattgccttgaggtacttttt

SEQ ID NO: 19149 - protein, 265 aa, Homo sapiens; identical to SEQ ID NO: 19145

SEQ ID NO: 19150 - DNA, 4123 bp, Homo sapiens
ggtggctcggcggcggcggcggcggcggcggcggcgtcggcgtcgtctacctccagcttctcctccctcctcctccgtctcctcctctctctctccatctgctgtggttatggcctgtcgctggagcacaaaagagtctccgcggtggaggtctgcgttgctcttgcttttcctcgctggggtgtacggaaatggtgctcttgcagaacattctgaaaatgtgcatatttcaggagtgtcaactgcttgtggagagactccagagcaaatacgagcaccaagtggcataatcacaagcccaggctggccttctgaatatcctgcaaaaatcaactgtagctggttcataagggcaaacccaggcgaaatcattactataagttttcaggattttgatattcaaggatccagaaggtgcaatttggactggttgacaatagaaacatacaagaatattgaaagttacagagcttgtggttccacaattccacctccgtatatctcttcacaagaccacatctggattaggtttcattcggatgacaacatctctagaaagggtttcagactggcatatttttcagggaaatctgaggaaccaaattgtgcttgtgatcagtttcgttgtggtaatggaaagtgtataccagaagcctggaaatgtaataacatggatgaatgtggagatagttccgatgaagagatctgtgccaaagaagcaaatcctccaactgctgctgcttttcaaccctgtgcttacaaccagttccagtgtttatcccgttttaccaaagtttacacttgcctccccgaatctttaaaatgtgatgggaacattgactgccttgacctaggagatgagatagactgtgatgtgccaacatgtgggcaatggctaaaatatttttatggtacttttaattctcccaattatccagacttttatcctcctggaagcaattgcacctggttaatagacactggtgatcaccgtaaagtcattttacgcttcactgactttaaacttgatggtactggttatggtgattatgtcaaaatatatgatggattagaggagaatccacacaagcttttgcgtgtgttgacagcttttgattctcatgcacctcttacagttgtttcttcttctggacagataagggtacatttttgtgctgataaagtgaatgctgcaaggggatttaatgctacttaccaagtagatgggttctgtttgccatgggaaataccctgtggaggtaactgggggtgttatactgagcagcagcgttgtgatgggtattggcattgcccaaatggaagggatgaaaccaattgtaccatgtgccagaaggaagaatttccatgttcccgaaatggtgtctgttatcctcgttctgatcgctgcaactaccagaatcattgcccaaatggctcagatgaaaaaaactgctttttttgccaaccaggaaatttccattgtaaaaacaatcgttgtgtgtttgaaagttgggtgtgtgattctcaagatgactgtggtgatggcagcgatgaagaaaattgcccagtaatcgtgcctacaagagtcatcactgctgccgtcatagggagcctcatctgtggcctgttactcgtcatagcattgggatgtacttgtaagctttattctctgagaatgtttgaaagaagatcatttgaaacacagttgtcaagagtggaagcagaattgttaagaagagaagctcctccctcgtatggacaattgattgctcagggtttaattccaccagttgaagattttcctgtttgttcacctaatcaggcttctgttttggaaaatctgaggctagcggtacgatctcagcttggatttacttcagtcaggcttcctatggcaggcagatcaagcaacatttggaaccgtatttttaattttgcaagatcacgtcattctgggtcattggctttggtctcagcagatggagatgaggttgtccctagtcagagtaccagtagagaacctgagagaaatcatactcacagaagtttgttttccgtggagtctgatgatacagacacagaaaatgagagaagagatatggcaggagcatctggtggggttgcagctcctttgcctcaaaaagtccctcccacaacggcagtagaagcgacagtaggagcatgtgcaagttcctcaactcagagtacccgaggtggtcatgcagataatggaagggatgtgacaagtgtggaacccccaagtgtgagtccagcacgtcaccagcttacaagtgcactcagtcgtatgactcaggggctacgctgggtacgttttacattaggacgatcaagttccctaagtcagaaccagagtcctttgagacaacttgataatggggtaagtggaagagaagatgatgatgatgttgaaatgctaattccaatttctgatggatcttcagactttgatgtgaatgactgctccagacctcttcttgatcttgcctcagatcaaggacaagggcttagacaaccatataatgcaacaaatcctggagtaaggccaagtaatcgagatggcccctgtgagcgctgtggtattgtccacactgcccagataccagacacttgcttagaagtaacactgaaaaacgaaacgagtgatgatgaggctttgttactttgttaggtacgaatcacataagggagattgtatacaagttggagcaatatccatttattattttgtaactttacagttaaactagttttagtttaaaaagaaaaaatgcagggtgatttcttattattatatgttagcctgcatggttaaattcgacaacttgtaactctatgaacttagagtttactattttagcagctaaaaatgcatcacatattcatattgttcaataatgtcctttcatttgtttctgattgttttcatcctgatactgtagttcactgtagaaatgtggctgctgaaactcatttgattgtcatttttatctatcctatgttaaatggtttgtttttacaaaataataccttattttaattgaaacgtttatgcttttgccaacacatcttgtaacttaatatactagatgttaaggttgttaatgtacaaaaaaaaaacccttatactcacctgcgttttcatttgtttgacatttgtctattattggatttcattatcatatgaacttgtcagtgggaaacaaactgtctaaaaatttttctcttacgtttaacatacaatcatgtgaaatttaggcagagttcgataaattactggcaaaaacaaaactcttttataaagattttctaatgttgactttaatactctaacatggtacaaaccaaatggtaaaatcccaagtcatttcttttttcatctctatttagcaacagaattaagtggatgaagatattctactatgcattaaatcttgaactttataaaacatgtacaaaaattgtacaagataagttccacctggtaatgtctttccctaatacagggttgcgcttgcattggaccctagggatttgcactaaaattatatcaaggtctcagatgagcttagtgcacaagcactatcactttaaatactattatttgctaccacagcaactatatatttccatagcttttggctgggggcgggggacatttttattacaacttgaaattgctttgctggtttcatatttatttgttgtatttaaaaaatacattgttgtaagagtgattttttcaatatattttattcctgggggggatcatgctacactctcaaaagaaaattaagaaatcattcagatcatcccccctttttaagtagtgtgaattgcaaaacccaacatattttttttactgtcagttgcggtttatttattctttaactgtctgttttagtagtttaatgattatgaaaaatgtatctgtgtgtgatttgctatttattaaattttaagtactttgctgaatgtcattttaaagcatgtttgaagtcttgtgtatttgtctgtgttaatgctgtcaggaggaactgactaagatgttttaatatgtatcaaaaattaaaatgattttttttattgccttgaggtacttttt

SEQ ID NO: 19151 - protein, 859 aa, Homo sapiens; identical to SEQ ID NO: 2334

SEQ ID NO: 19152 - DNA, 3128 bp, Homo sapiens
ggtggctcggcggcggcggcggcggcggcggcggcgtcggcgtcgtctacctccagcttctcctccctcctcctccgtctcctcctctctctctccatctgctgtggttatggcctgtcgctggagcacaaaagagtctccgcggtggaggtctgcgttgctcttgcttttcctcgctggggtgtacggaaatggtgctcttgcagaacattctgaaaatgtgcatatttcaggagtgtcaactgcttgtggagagactccagagcaaatacgagcaccaagtggcataatcacaagcccaggctggccttctgaatatcctgcaaaaatcaactgtagctggttcataagggcaaacccaggcgaaatcattactataagttttcaggattttgatattcaaggatccagaaggtgcaatttggactggttgacaatagaaacatacaagaatattgaaagttacagagcttgtggttccacaattccacctccgtatatctcttcacaagaccacatctggattaggtttcattcggatgacaacatctctagaaagggtttcagactggcatatttttcagggaaatctgaggaaccaaattgtgcttgtgatcagtttcgttgtggtaatggaaagtgtataccagaagcctggaaatgtaataacatggatgaatgtggagatagttccgatgaagagatctgtgccaaagaagcaaatcctccaactgctgctgcttttcaaccctgtgcttacaaccagttccagtgtttatcccgttttaccaaagtttacacttgcctccccgaatctttaaaatgtgatgggaacattgactgccttgacctaggagatgagatagactgtgatgtgccaacatgtgggcaatggctaaaatatttttatggtacttttaattctcccaattatccagacttttatcctcctggaagcaattgcacctggttaatagacactggtgatcaccgtaaagtcattttacgcttcactgactttaaacttgatggtactggttatggtgattatgtcaaaatatatgatggattagaggagaatccacacaagcttttgcgtgtgttgacagcttttgattctcatgcacctcttacagttgtttcttcttctggacagataagggtacatttttgtgctgataaagtgaatgctgcaaggggatttaatgctacttaccaagtagatgggttctgtttgccatgggaaataccctgtggaggtaactgggggtgttatactgagcagcagcgttgtgatgggtattggcattgcccaaatggaagggatgaaaccaattgtaccatgtgccagaaggaagaatttccatgttcccgaaatggtgtctgttatcctcgttctgatcgctgcaactaccagaatcattgcccaaatggctcagatgaaaaaaactgctttttttgccaaccaggaaatttccattgtaaaaacaatcgttgtgtgtttgaaagttgggtgtgtgattctcaagatgactgtggtgatggcagcgatgaagaaaattgcccagtaatcgtgcctacaagagtcatcactgctgccgtcatagggagcctcatctgtggcctgttactcgtcatagcattgggatgtacttgtaagctttattctctgagaatgtttgaaagaagatcatttgaaacacagttgtcaagagtggaagcagaattgttaagaagagaagctcctccctcgtatggacaattgattgctcagggtttaattccaccagttgaagattttcctgtttgttcacctaatcaggcttctgttttggaaaatctgaggctagcggtacgatctcagcttggatttacttcagtcaggcttcctatggcaggcagatcaagcaacatttggaaccgtatttttaattttgcaagatcacgtcattctgggtcattggctttggtctcagcagatggagatgaggttgtccctagtcagagtaccagtagagaacctgagagaaatcatactcacagaagtttgttttccgtggagtctgatgatacagacacagaaaatgagagaagagatatggcaggagcatctggtggggttgcagctcctttgcctcaaaaagtccctcccacaacggcagtagaagcgacagtaggagcatgtgcaagttcctcaactcagagtacccgaggtggtcatgcagataatggaagggatgtgacaagtgtggaacccccaagtgtgagtccagcacgtcaccagcttacaagtgcactcagtcgtatgactcaggggctacgctgggtacgttttacattaggacgatcaagttccctaagtcagaaccagagtcctttgagacaacttgataatggggtaagtggaagagaagatgatgatgatgttgaaatgctaattccaatttctgatggatcttcagactttgatgtgaatgactgctccagacctcttcttgatcttgcctcagatcaaggacaagggcttagacaaccatataatgcaacaaatcctggagtaaggccaagtaatcgagatggcccctgtgagcgctgtggtattgtccacactgcccagataccagacacttgcttagaagtaacactgaaaaacgaaacgagtgatgatgaggctttgttactttgttaggtacgaatcacataagggagattgtatacaagttggagcaatatccatttattattttgtaactttacagttaaactagttttagtttaaaaagaaaaaatgcagggtgatttcttattattatatgttagcctgcatggttaaattcgacaacttgtaactctatgaacttagagtttactattttagcagctaaaaatgcatcacatattcatattgttcaataatgtcctttcatttgtttctgattgttttcatcctgatactgtagttcactgtagaaatgtggctgctgaaactcatttgattgtcatttttatctatcctatgttaaatggtttgtttttacaaaataataccttattttaattgaaacgtttatgcttttgccaacacatcttgtaacttaatatactagatgttaaggttgttaatgtac

SEQ ID NO: 19153 - protein, 859 aa, Homo sapiens; identical to SEQ ID NO: 2334

SEQ ID NO: 19154 - DNA, 1410 bp, Homo sapiens
ggcggctgggaagtccagcatcgaggcactggcagatttgatgtctgcttgtggagagactccagagcaaatacgagcaccaagtggcataatcacaagcccaggctggccttctgaatatcctgcaaaaatcaactgtagctggttcataagggcaaacccaggcgaaatcattactataagttttcaggattttgatattcaaggatccagaaggtgcaatttggactggttgacaatagaaacatacaagaatattgaaagttacagagcttgtggttccacaattccacctccgtatatctcttcacaagaccacatctggattaggtttcattcggatgacaacatctctagaaagggtttcagactggcatatttttcagggaaatctgaggaaccaaattgtgcttgtgatcagtttcgttgtggtaatggaaagtgtataccagaagcctggaaatgtaataacatggatgaatgtggagatagttccgatgaagagatctgtgccaaagaagcaaatcctccaactgctgctgcttttcaaccctgtgcttacaaccagttccagtgtttatcccgttttaccaaagtttacacttgcctccccgaatctttaaaatgtgatgggaacattgactgccttgacctaggagatgagatagactgtgatgtgccaacatgtgggcaatggctaaaatatttttatggtacttttaattctcccaattatccagacttttatcctcctggaagcaattgcacctggttaatagacactggtgatcaccgtaaagtcattttacgcttcactgactttaaacttgatggtactggttatggtgattatgtcaaaatatatgatggattagaggagaatccacacaagcttttgcgtgtgttgacagcttttgattctcatgcacctcttacagttgtttcttcttctggacagataagggtacatttttgtgctgataaagtgaatgctgcaaggggatttaatgctacttaccaagtagatgggttctgtttgccatgggaaataccctgtggaggtaactgggggtgttatactgagcagcagcgttgtgatgggtattggcattgcccaaatggaagggatgaaaccaattgtaccatgtgccagaaggaagaatttccatgttcccgaaatggtgtctgttatcctcgttctgatcgctgcaactaccagaatcattgcccaaatggctcagatgaaaaaaactgctttttttgccaaccaggaaatttccattgtaaaaacaatcgttgtgtgtttgaaagttgggtgtgtgattctcaagatgactgtggtgatggcagcgatgaagaaaattgcccagtaatcgtgcctacaagagtcatcactgctgccgtcatagg

SEQ ID NO: 19155 - protein, 455 aa, Homo sapiens
MSACGETPEQIRAPSGIITSPGWPSEYPAKINCSWFIRANPGEIITISFQDFDIQGSRRCNLDWLTIETYKNIESYRACGSTIPPPYISSQDHIWIRFHSDDNISRKGFRLAYFSGKSEEPNCACDQFRCGNGKCIPEAWKCNNMDECGDSSDEEICAKEANPPTAAAFQPCAYNQFQCLSRFTKVYTCLPESLKCDGNIDCLDLGDEIDCDVPTCGQWLKYFYGTFNSPNYPDFYPPGSNCTWLIDTGDHRKVILRFTDFKLDGTGYGDYVKIYDGLEENPHKLLRVLTAFDSHAPLTVVSSSGQIRVHFCADKVNAARGFNATYQVDGFCLPWEIPCGGNWGCYTEQQRCDGYWHCPNGRDETNCTMCQKEEFPCSRNGVCYPRSDRCNYQNHCPNGSDEKNCFFCQPGNFHCKNNRCVFESWVCDSQDDCGDGSDEENCPVIVPTRVITAAV

SEQ ID NO: 19156 - DNA, 853 bp, Homo sapiens
gccggtggctcggcggcggcggcggcggcggcggcggcgtcggcgtcgtctacctccagcttctcctccctcctcctccgtctcctcctctctctctccatctgctgtggttatggcctgtcgctggagcacaaaagagtctccgcggtggaggtctgcgttgctcttgcttttcctcgctggggtgtacgcttgtggagagactccagagcaaatacgagcaccaagtggcataatcacaagcccaggctggccttctgaatatcctgcaaaaatcaactgtagctggttcataagggcaaacccaggcgaaatcattactataagttttcaggattttgatattcaaggatccagaaggtgcaatttggactggttgacaatagaaacatacaagaatattgaaagttacagagcttgtggttccacaattccacctccgtatatctcttcacaagaccacatctggattaggtttcattcggatgacaacatctctagaaagggtttcagactggcatatttttcagggaaatctgaggaaccaaattgtgcttgtgatcagtttcgttgtggtaatggaaagtgtataccagaagcctggaaatgtaataacatggatgaatgtggagatagttccgatgaagagatctgtgccaaagaagcaaatcctccaactgctgctgcttttcaaccctgtgcttacaaccagttccagtgtttatcccgttttaccaaagtttacacttgcctccccgaatctttaaaatgtgatgggaacattgactgccttgacctaggagatgagatagactgtgatgtgccaacatgtgggcaatggctaaaatatttt

SEQ ID NO: 19157 - protein, 246 aa, Homo sapiens
MACRWSTKESPRWRSALLLLFLAGVYACGETPEQIRAPSGIITSPGWPSEYPAKINCSWFIRANPGEIITISFQDFDIQGSRRCNLDWLTIETYKNIESYRACGSTIPPPYISSQDHIWIRFHSDDNISRKGFRLAYFSGKSEEPNCACDQFRCGNGKCIPEAWKCNNMDECGDSSDEEICAKEANPPTAAAFQPCAYNQFQCLSRFTKVYTCLPESLKCDGNIDCLDLGDEIDCDVPTCGQWLKY

SEQ ID NO: 19158 - DNA, 718 bp, Homo sapiens
actggacccaggaagttcagctggcctcacctctcaattcatcaagaaagacatctgagatgtatgaatatcctgtaagactgacccaaatcctgctggcttggtgagctcatctcccagttgcctgattatcttagaacattgaagagctccagtgaagatgaagacagggacttgctatggtacccaggctggacttgaactctggggctcaagcattcctcccacctcagcctcccaagtagctgggcctacaagtcttcttggcttcaagtcttcttcctcagcggtctcactctgtcaccaaggctggagtgcagtggtgctgcgatctcggctcactgcaacttccacctccaaggcccaagcgatcctcccaccacagcctcctgagtggctgggactagaggaaacattcaaatcagttgacaaagaatggctgatgctgaaatgacttgctgtctcggtgtggagtggaaacaatcctgctaaatttcatattgcagtgacaccaaagcaaaggacagatctcaagacaacttttattgaaatggaaaacagttaattttaactaaagaataagagaaatgccaacagaaataaaagacccagaaatcagaggacaatgtgcgaaactctatatactgagacacacaaattgaaacaacccaaataaatgccaaatgcacaagaaaataaatgtaacttatcagaggtt

SEQ ID NO: 19159 - protein, 97 aa, Homo sapiens
MKTGTCYGTQAGLELWGSSIPPTSASQVAGPTSLLGFKSSSSAVSLCHQGWSAVVLRSRLTATSTSKAQAILPPQPPEWLGLEETFKSVDKEWLMLK

SEQ ID NO: 19160 - DNA, 1117 bp, Homo sapiens
caacagtgaaagatttaatacccacatgacaagggccttccagacatggtccagctggggtctgatgctgatttggatagatccatggcaaactgatgaagaaattttggtcagagagatgaagtagctctgccagtacacagcatggaattgaaagcaatgggcctggcactgactgagaggtactcacagcttggggcagactcccatttggagatgggatcctgaagaagcctggatgtttgtgatggcggtcaacagagcttccagaatggggacctagatgcagtcgtcttcaagttccataggagggctgtggctgaccttgtctcgtctgataaaccactgaagaagaatgctgtgtatctatctagtggggccttctagggaactacggggggcaagggcaagttcattggcctgtcattactgtttcctaatctagggagcctctcagaaaagactcccctgaagcgattggtcttctctggctcgggccaggggctgaggagtgacgctgggtggaggcaacacccagggagataggaagcctgttctgtggggcttatctcaggactgtgaggcaactgaagacagaagccatgagaggagaagtttggtaatctcatctgcaattgttgtttttgtacttatctaaggatgggggtggggatggaagggtgggaatgggtttgagttgcagccaaaggaatttagattagacacctgaaagaactttccaacatacaacgctgtaaggccaaaaggagatagtacagttgccttttatctggatccatagtataatacttaagtttaggtgttcaataagtactgaacacacaagactgggagtctggagagttgggccaaaagctcttatttgtccttcattcccactggggacatttctcctctttatttcactctctgagcctctgtgtccttgtcagccttgtagggctgcgatgagaattaaatgagacaatatgtgaatgtgaccagtccagtcaatgcctagcacatagtacatgcttaagaaatacctatgtcatctggattctggaaatcctgtacaccatggtagtccaataaaaatatacccaatgaatcatta

SEQ ID NO: 19161 - protein, 33 aa, Homo sapiens
MTRAFQTWSSWGLMLIWIDPWQTDEEILVREMK

SEQ ID NO: 19162 - DNA, 644 bp, Homo sapiens
ttggaagtggatcctgccccagttgaaccttcagatggctgtggtctcagctgacatcttgattgtagctttgtaagagactttgacccagaggactcagagatggataagctgaggattggagaggtgaggtcagtgcagcagtcccacagcacaccagagctggatttgaacccaggtgcatttgcatggcttctggctcctctgtggactgacagcctgtgtgggccagcgcttcccttctctgggactcaattcttccacttataaaatgagggggttggaccagatgactttttaagagtcttcccatccctggtattccctgagtcgccatcttggaaattctgacctcattcctgctttgtgcagctgtttatttgcttgtctctcttacactgtggagctgtggagcagttcaggccagtcttgctgggataaaggcatagcttcctctgtggcctctgggtttgagaaggtctccgagaatcctcactccacagaggacatagcatctttttcggagccctcccactggctcgagagggaacttgtaatttcgttttatttttggttttctctctcttgctctttttactggagtaagatatacataatataaaacttaccatttatctattttc

SEQ ID NO: 19163 - protein, 55 aa, Homo sapiens [sequence omitted]

SEQ ID NO: 19164 - DNA, 1600 bp, Homo sapiens
tttattcttagtgatttttgcatgggagacagctgacgttcaggtccgggctcataatcttccactttcgtcgatcctgcaggaagagcgggctttggccaatggccattaacctcccgctgcctggcagaccttttgtaaggctcagggatgaacgacaggatggctgagggaatggcctttgagttagacctcccccgacaccccggggagcccaggctctcccctcaccagttgtgtcactttgggaaagctattcaccttcctcagcttcggtttccatatctgaaaaagagtacccatgctcatctcatagggagtaagtgataccatgatagtacagtgcttgaggcatgctcagtgcacagtaagagctccagaggaggctccgtgcatgctgtgttcatgacgacactacatatgcccagattgtgttcacacaggcgcatgccaagaatccatcagcgttctcagtctgggggggaggtagacatggggtgttttgggaaaacaaggaagagattcctaactcactttcagatgtgtgtgtgtgtgtgtttgtgaggatgtgtatgtgttgactggtgtgagcataagtgcatgagtggatgtgtgtgtctgagcataggtgtgtaaatatgtgtgtgacagagttgagtgtacgtggtgtgtgtgaatgtgagtacaggtatctgtgtgagggtgtgcatgtgttgggtgtgtgtatgtgtgtgtaaatgtaggtgtctacatgttgggttgagcctaagtgtgaataatatgtgcgtgtgagagagttgagtgtatgtggtgtatgtgcgagtgtgtatgtaagcgtgagttaagcctgtgtggtctgtatgtgtgagggagagtcgtgtgtgtgtatgagagttgtgtgcgggtggcataggtgtctgtgtgtgtgtgcaagtgtgtgtgaaagttaggtgtgaggggctgcgtgtgtgtgtgacaggtgtgagagggggctgcattgtgtgtgtaagggtcaggtgtgaggggggctgcgtgtgagtgtgtgtgcgaaggcttttaggcgcctttggcgcttgcttgtgccgagttgaggatggaacagtttgcagagcatgcacgctaggaggcgttaggggatgcctgacaagcatttattcattcagtcattcagcaaatacgtatttggggtctagtctgtgctgggttttgcgccatgcagtggggacatcgctggttactgcacaccttctttgcggttcttctccgtggcccgcctggctccattcctagcctgcttggagccctggaggctgaccctgccagctgtgcccccaggctccctgtcactgtcttctggttgagtcgggtctgtcgagggctctggcaggagaccaaagggcaaagggagagggaggttcacatcttgggcagcagctgggcccctccacaactgcggttcctgcccctcttctgagtctccagtaacactatctcctccccttgctccttcagctgagtgaggggcccccacttggtatttctgggagccccagcatccagaatggttctttcattacatgatcttcatttgcacagtctg

SEQ ID NO: 19165 - protein, 86 aa, Homo sapiens
MQWGHRWLLHTFFAVLLRGPPGSIPSLLGALEADPASCAPRLPVTVFWLSRVCRGLWQETKGQREREVHILGSSWAPPQLRFLPLF

SEQ ID NO: 19166 - DNA, 641 bp, Homo sapiens
gttgccgctgccacacagcaattaccatgcagaaaaaggagttgagaagggagtagcctctgatatgtagtcagcatgaatcagccttaggttccctgcctccatacccaattcttctgcctcattatgattccactatgaggcatccagagtagtcaaacttataaagacagaaagtagagctgtggctgccaggtgggtggaaggagagagaagtagttattgcttaatgagtaggaaatttcagtttgggaagacgaaaaatgttctgaagatggatggtggtgatggtcgtgcaacaatgtgaatgtacttgatgccacataaaaagtggctaacatgaccacatggaaggagagaaaacacctgaacagctccaactgtggcagccataccagcccagatgccagacagtgaatgaagacgggcatcccattcccagtagaaatgacgtgaagaaccgaaaaaaactcaccgacagccctagatatacacctccaggtgaccaacccagacaccaccaacagttagcgctactccagctgaatactccccaacaaaaatctatccttgctatgtgttgcctgaattcatgaccaacaacggtatgaacataataaaatgattgttattttatgcca

SEQ ID NO: 19167 - protein, 82 aa, Homo sapiens
MEGEKTPEQLQLWQPYQPRCQTVNEDGHPIPSRNDVKNRKKLTDSPRYTPPGDQPRHHQQLALLQLNTPQQKSILAMCCLNS

SEQ ID NO: 19168 - DNA, 5325 bp, Homo sapiens
acaggtatcttaaaagctttgctcactcatcccttctctgacttaggatttgagcatctttctgttatgctgttgccccactcctattgcaatactccccttcttaagaaagtttttctagactaatgtctagattaaacttcttttctttgacaataatgatgccatgacttggacaaaatgcccattgcctctgggtcctgctttcttcacccagtgctgccttattggactccttgtgcctctccttggctggggaaatcagaatacacagtggtatcccacttctaagatgcctgatctgaaggacagtaaaacaactgacctttgccagcatgtaaaacacatggtttaactagtcctccaggaacaacactgagcaatcctgacctgggactactttactcggccatctcctacttgagatgctccttgtctctctgttcaaggacaccttttctgagcctttcttgaacaagagtggaggaccgatagggcgattaaactgtccttgacacaactttaggttggtttgcctaaactactaggttctcaatctatatgaacctcctccagcattctaatttgtttgctctgtcttagacccagaatcccaccccatgtgcctaaccatagaccaatcttcctgccttaacttctctgctaccaattttgatgtagcccagtaagtttcagcatcatccctcaccaccccacagtccctcaccctgcccccacccccaccacacacacacataccagctcttagcatcaaatccccttccattttccataagcatctcttcccaggtctctgcatataaaagctatgtttgctcaccccatgcctgagactttcctggcttagatcttgagcatctttctattataagattctcccttagtaatgatttcctcacttaacttcagatttgtacatttttttttcattgacagtgcaaaagataccatttaggatttgattttcagaaggtaaaatataaaacattgtcaggaaattcgaatacttaattaagtaggataatggattactgagaaatagtacttggttatctatttaatcaaatgatgtaaaataattttagagtagatataggaggtaacataattgcaaagaacttcatctcttttatatgaagactgttctcttaaataatcaaggactcgaaaaagtcagcacaaagcatggaaaattattctgatgagattctgaatgtttatcttctaagaagattactcagaaggtaaagaaaaatattttacaagctcttactaagagaatacactaatccaaaaaaattattttaatagagaataaaacaaattctagttttgcatctgcatatttgatactaatgcttatattaaacattttgtaaacaaacccattaaacttcagccagctgtgactacaagaaataaaatttcctatccatgaaccttctacagctttctctatctagttagggttttgtagggttttgccctacactttcccctttctcatcctggaataactactcattttacttcagaaaaaaattactcttgttttccttaacaaaaaaatatcctgcataccttgcactcaaaatgttcctttctgccacagtcacttctactagagtctcattcatcttattgacatatattgattataacttttttttttttttgagacagtctcgctctatcacccaggctgagtgcagtggtgtaattttggctcactgcaacctccgcctcccgggttcaagcagttctcctgcctcagtctcctgagtagttgggattacaggcgtgcgccaccatgcccagttactttttttatttttagtagaggcggggtttcaccattttggtcaggctggtctcaaactcctgacctcatgatccgcccgcctcggcctcccaaagtgctgggattacaggtgttagccaccgtgcccggccttgattatttttaactacggtaactcctattgcatagagaaactttggaggtagtataaaagaaaagttactggatatgtattaaaacagccagatagatcttattcaaactgctgcagtaggagagagaggtttctgtatggaactgagctcaacttctaatacagcaaagacagttgtggatttatagccaaggagtagagcaaggtggtaagcagatggaaatttactaagaacttacctagatatcaaaggtagagggattcttgctaaactggcttaataaaattattttaaataataaaactgttaattaataaaactattaataataaaactactttctaaaactaagatatccagagtggagagtgagaaacttgatcaaatatccagtagtctaatatcaagaattagtaaattcttgataaattcgctaagcaggaatctttactaaaactcggctgggcaggccaaggtcaaagtctacttaggaagaatgctccaaggagcctaactcaagtttggtcaagggaagagtctttttcagtggataattgtgaactattttcatacacactatttcgtagcagactaatagatcttatgaatatacatctcattatttttgcagtaataaacatccctataataaaactcactgtagcaaaaaataaacatgctcattaacacacccaaatatataggctctccgtattatataaaaaataagcagcaaaaagtctacaagcagaaaattatacttagtaattaatgcttcagtattttattatagttagataatctaggtatctaatgaatgcccattaattaaccaaatttagcatcagtctaaagttttatgttatcaaaagatcttggtcttgagccaggatgacacactataaaatgtaattagttacttttgaattaacatttgtcaaaacagtgattcaatttaactaaatgcaaatttatatttttataattataaacatatagtaactaaaatgatagattattaaaccaagaaagctgtataagctgaggaagaatgtgcataagtagattaaaatgtatgcttgtgtaatacctaatactgagaactcagaagacataactgttttaattaaaccaacaaaataaagctagtctcatttgccaaaatttacctaaattatgtaacttaaattcttagaatattcaagctagtatctataagcatattaaaagtagaaatgcaattatcttaatttccagaaatttttgaatattttatttatataagactttagttagttctaagtcaatcagaaaatagtacctttaaaaattttgataatctaatttagtaataccatctggaggcaggaaaatattacatacccacagacacataaatatacatacagatctagagaacttatcattttaattctaaaatctcagccatagaccaggcataacacagaaatacataactcacttgttcctataaaaagggctcttttcgttccactgggtagaaattcttgattgagttcaaaatagagaaaaaaatagacgaacaaaaataacaaacccaattttctggcatctttctgacgtaacagagacacaatatctgcaaaccatttaattcatttacagagattaccaagtgaccacatacacacacacacacacacacaaatccagcactagagatcaactgcatactcaatgaaaattaaattcctaccatgctaccaacagacaagagtctggaacattgaattaggaatagggctcacctttaggtccctgtattgccagtcacaaatggagcatgaaggctccaagtgtccttattacctgggtggagcagatggagatctgaaggcatggtcccattttgagtcatggcagcaatcctgtcaaagaaacagacaagttaaaagattgcttttatttgggctattgcaatagggaaaccacccttatctgaagatgatgggaatggctcagcctcttaggcagtttggcttttatagggaggggtaaacaaatgcaaatgatgtggtttaacactgtggtcagttgcaaactgcagatgtcacagtttgttaactttccaaaacatttggagatgtttttctcagtagtggttgtggtttttcttagtaagcttcggagagcagagattatctcagctaatcagctatgagacaaagaacaggatgtagatttttttgctttgtcagcaggttttgtcagcagatgaaaggggacagtttgtggtaggtcttgtcacacttgaccaaagatcttctagaatagtttcacacagagataacatcaaacagaaaaaccagaaacaggaagggggctgcggtcattcccacccccaccccccaccccaagtaaagctaagaggctgaggcatacctccttgcagcctagctcacttacttgcatgtgatgcacttccttcccatgcctgcctgtcccaaccccaccccaccttcttacacatagcctttcttgccctgtgaatacccatttctacacctctctatttgcactgatgctgactcaatcagtgtgtcacctcatccctccaaggctactgtactaccttccaaaatggctgccttcgttccactcttttttctcacaatttagtttccacagagaagccagaatgaacaaaagtgaaaatctgattttgttaccaacctgttcaaaatttttctgtctctccctattgcccttcaaggaaagcctatgctacatagcacaacattcaaacccttcatgttccaagtcaccccctttttttgccagcccttagccaactctacattccagctgtgcagaagctccagctgctttcctacaccccctgcaattctctatgtctaggactttgcttgtgcctttccttcaccccctgcaattctccatgtctaggaatttgcttgtgcctttccttccacctccaatgtcctccctccaactggctaagtcccaatgtatgtatataagaatttagaggatacctcttctggatttatcccaggccccaacttcagcccccagccttccccatcaccttgaagctgagtctggctgaaattcctctattccctaccctttccagtcacaacacctaccacactgtttagcaagttcctccttctttttctgtctcagcagctagaccaggagctccctgcaggtcaagaccatgtgttctctgatgctttctcatggcaaggggagacatagggttgcagtagtgagtgggcatctgttctcagaaggcagtgcctggagcactataagtacttaataaactcttgtgaaatt

SEQ ID NO: 19169 - protein, 62 aa, Homo sapiens
MTWTKCPLPLGPAFFTQCCLIGLLVPLLGWGNQNTQWYPTSKMPDLKDSKTTDLCQHVKHMV

SEQ ID NO: 19170 - DNA, 625 bp, Homo sapiens
ctgccttattggactccttgtgcctctccttggctggggaaatcagaatacacagtgatggagtctcactctgttgcccaggctggagtgcagtggcacgatctcggctcactacaacctccgcctcccaggttcaagagattctcctgcctcagcctcccgagtagctgggactacaggtatcccacttctaagatgcctgatctgaaggacagtaaaacaactgacctttgccagcatgtaaaacacatggtttaactagtcctccaggaacaacactgagcaatcctgacctgggactactttactcggccatctcctacttgagatgctccttgtctctctgttcaaggacaccttttctgagcctttcttgaacaagagtggaggaccgatagggcgattaaactgtccttgacacaactttaggttggtttgcctaaactactaggttctcaatctatatgaacctcctccagcattctaatttgtttgctctgtcttagacccagaatcccaccccatgtgcctaaccatagaccaatcttcctgccttaacttctctgctaccaattttgatgtagcccagtaagtttcagcatcatccctcaccaccccacagtcc

SEQ ID NO: 19171 - protein, 66 aa, Homo sapiens
MESHSVAQAGVQWHDLGSLQPPPPRFKRFSCLSLPSSWDYRYPTSKMPDLKDSKTTDLCQHVKHMV

SEQ ID NO: 19172 - DNA, 373 bp, Homo sapiens
agcttctagaggctgcctgggtgccttagattgtgccctcttcctccatcttcaaagccagcaatgacagacttttgagtttgccacatctgcgtcacaacttaattcttgaaaaggccgtataaaatgctgcttcctcaggatgcctgctctttatcagcatccctgtctccatggtgatagccttcttgccgtaatcagagggatgacctacttaaccatggaaatattggcttcattcgagttaactttgctggtaatatgcacgtatgtgtttaattccatttttgatccaaactgccacaattgtatctgtctatagtaggttctctaagaagaatgtaaaatccgtttttgtcttgcttgcccgaaa

SEQ ID NO: 19173 - protein, 59 aa, Homo sapiens
MPALYQHPCLHGDSLLAVIRGMTYLTMEILASFELTLLVICTYVFNSIFDPNCHNCICL

SEQ ID NO: 19174 - DNA, 457 bp, Homo sapiens
gagagattccaaaggcctgaggacttggcacaaaatgaagaggcagaggatgttgacacaaacttacagactgggactccaaggatcagccagatgaaatgctatgtgcagagtcttcatttcccagctcagtggtggacagcagaggactctaagaatcacctcataaatgaactaccttgacatgccctgacccaggctctttatttggaaacccaggctaggacaggaatgaagagaagccagaccttctgactcgaagatccagccacctcttgggatgcacacgtttctcttcaactgcgtgatgtgaactgcgtcacatggtcaaattataatgaagaaaggaacctctcttgagtacaaagagctacctatggtggtctggagccggaggaccacagcatcaaaggatataagatgcatagccaactgaggaacctgagcaattaaagag

SEQ ID NO: 19175 - protein, 32 aa, Homo sapiens
MKKGTSLEYKELPMVVWSRRTTASKDIRCIAN

SEQ ID NO: 19176 - DNA, 575 bp, Homo sapiens
actattttgtgtaataccatcatatcggctgctgttaactatcagtacctgaattttggagggaacacattcaaactatagcatttatttaggctaaaaagatagttcattgtcagtgtatgaaaaacctactgattttttacgttgattttatatactgcaactttattgaattctcaacaaatggtgttgaaaaaactggatgtcctcatgaagaagaatgaaattgaacacatcacatcccatatacaagaatcaactcaaaatatttccaaattcaaacattatgaagtttgagctatttaggaagttaaggagataatcagatcatttcgtcagacacccttaaggcactgatgctctcagttgatctagcaaataggcatctgtcacagaaaatagagaagatatcccaagagaagaggagaaactccacaatgtgaagagatttccagaggcatcagcactccgtctgtcactattggcatcctgtgacatggtttagtttatgcgtgctggttaggctgatttacataatacattatctagttataccttaaataaacctcaaaact

SEQ ID NO: 19177 - protein, 37 aa, Homo sapiens
MVLKKLDVLMKKNEIEHITSHIQESTQNISKFKHYEV

SEQ ID NO: 19178 - DNA, 586 bp, Homo sapiens
caaatggcattcgccctcatcacggcctcgagctcctcagacctcaagtcctccacccgttcgaagaggagcgtcgtcatcaccccaaagaaggcagtccccgtctccaagtactaggcccattaggagagtctccaggactccggaacctaaaaagataaaaaaaggctgcttccccaagcccacagtctgtaaggagggtctcatcctcccgatctgtctctgggtctcctgagccagcagctaaaaagcccccagcatctccatcccccatccagtctcagtcaccgtctacaaactggtcaccagctgtaccggtcaaaaaggccaaaagcccaacaccgagcccatcactgccaagaaattcagatcaagaaggagatggaaagaaaaagaagaaaaagaaggacaggaaacacaaaaaggataagaagcacaagaaccattgcagctgccacaaccacattagcacaggaagagccagtggcagcgccagagccgaagaaggagactgaaagtgaagctgaagataaccttgatgatttagaaaagcacctgcgtgaaacggccccgagatcaatgagga

SEQ ID NO: 19179 - protein, 67 aa, Homo sapiens
MERKRRKRRTGNTKRIRSTRTIAAATTTLAQEEPVAAPEPKKETESEAEDNLDDLEKHLRETAPRSM

SEQ ID NO: 19180 - DNA, 1411 bp, Homo sapiens
atgagagcaaagattcttttgactgcacaacagtggatgtcgcttcccgtggttgttcgggctcttcaggagacccacactgacctgctggttgatgaagaccagctccaccatgtgcacccatcatatgcttctcctgtccatgggcatggccatgagcatggtcagagacgccaatacagacgacaaaaccagcagtcttcatctgactctggttcctccttctcctcagaagatgaacgacccaagagatcccatgtgaagaatggtgaggttggcaagcggcggagacattccccttcccggagtgcttctccatcaccacgaaagcaccaaaaagagacttcccctcatggtagacggaggagaagtccatccccaccacccaccagaaggcgacggtctccttctcccgcccctcatcctcgacggctcaggactcccacaccaccaccaccacgacgaaggactccttctcctcccctacgtcggcgctcaccttctcctagaagatactctcctccaatacagaggagatactctccttctccacctccaaagagaagaacggcttcacctcctccccctcctaaacgaagagcatcaccatttccaccaccaaagcggcgggtctcccattctccaccttccaaagaagctccccagtcaccaagagacgttcaccttcactatcatccaagcataggaaagggtcttccccaagccgctctacccgggaggcccgatcaccgcatccaaacaaatggcattcgccctcatcacggcctcgagctcctcagacctcaagtcctccacccgttcgaagaggagcgtcgtcatcaccccaaagaaggcagtccccgtctccaagtactaggcccattaggagagtctccaggactccggaacctaaaaagataaaaaaaggctgcttccccaagcccacagtctgtaaggagggtctcatcctcccgatctgtctctgggtctcctgagccagcagctaaaaagcccccagcatctccatcccccatccagtctcagtcaccgtctacaaactggtcaccagctgtaccggtcaaaaaggccaaaagcccaacaccgagcccatcactgccaagaaattcagatcaagaaggagatggaaagaaaaagaagaaaaagaaggacaggaaacacaaaaaggataagaagcacaagaagcacaaaaaacacaagaaggaaaaggctgtggctgcagctgctgcagctgctgtgacccctgcagccattgcagctgccacaaccacattagcacaggaagagccagtggcagcgccagagccgaagaaggagactgaaagtgaagctgaagataaccttgatgatttagaaaagcacctgcgtgaaacggccccgagatcaatgagga

SEQ ID NO: 19181 - protein, 306 aa, Homo sapiens
MRAKILLTAQQWMSLPVVVRALQETHTDLLVDEDQLHHVHPSYASPVHGHGHEHGQRRQYRRQNQQSSSDSGSSFSSEDERPKRSHVKNGEVGKRRRHSPSRSASPSPRKHQKETSPHGRRRRSPSPPPTRRRRSPSPAPHPRRLRTPTPPPPRRRTPSPPLRRRSPSPRRYSPPIQRRYSPSPPPKRRTASPPPPPKRRASPFPPPKRRVSHSPPSKEAPQSPRDVHLHYHPSIGKGLPQAALPGRPDHRIQTNGIRPHHGLELLRPQVLHPFEEERRHHPKEGSPRLQVLGPLGESPGLRNLKR

SEQ ID NO: 19182 - DNA, 722 bp, Homo sapiens
agcttctttggaaggtggagaatgggagacccgccgctttggtggtggaaatggtgatgctcttcgtttaggagggggaggaggtgaagccgttcttctctttggaggtggagaaggagagtatctcctctgtattggaggagagtatcttctaggagaaggtgagcgccgacgtaggggaggagaaggagtccttcgtcgtggtggtggtggtgtgggagtcctgagccgtcgaggatgaggggcgggagaaggagaccgtcgccaacctcaccattcttcacatgggatctcttgggtcgttcatcttctgaggagaaggaggaaccagagtcagatgaagactgctggttttgtcgtctgtattggcgtctctgctgagatcaatgaggaaggcccaagtgtccccacagtcttagggggaaatgtttgttatgatgtaaattttatttggtttgtacgcagttcaatttcaaaattgctaaaatgtgtttgagctttagactataacatttgttgtaataattgctaggttgaagttcaacatgtaaaaaaagggggcatggatttacattgcaaaaggtgtccacagtgtattagtgacattctttcattgacagctgacataattcattgagtgaaatattttaagccaaaaaaaattccctttttaaaaaagggggtttaaatactgttgacacttttatggttcctttaaatgc

SEQ ID NO: 19183 - protein, 47 aa, Homo sapiens
MRGGRRRPSPTSPFFTWDLLGRSSSEEKEEPESDEDCWFCRLYWRLC

SEQ ID NO: 19184 - DNA, 583 bp, Homo sapiens
tgacattaagtagtttaataacctcgggcaagtcacttgacttctctatacctcagtttccctatctgtaaaatggaagtaataagagtacttactcctttcagtggttgtgactatcaaatgaattgacataggtaaaacaattagaacagttcctgacacacggtaagagtcatgtaaatatcaatgcttatgaaagctctcatcccaggataagcatctcctagaaaacatcttcgtccatgtaccagattaatcatatttattctgcagttgatatttatgccacatgttctttctgggtagagaagcctgaagttattctgtttatcctgaccttggaaaagacaaagcagctcatgtccccagggatctaaaaatttcactgggaatgatcacccagtgtctccaaaacctcagccagcatttctctattcacagctgcactgaagagcttccttcctggcttgtgtctccaaaaggggatacgatggcaaggtctctggactgtgaacttcatgcctgcttctcaggtttcttccacttcccctttatgtgggacaagatagctgaagtgggctgg

SEQ ID NO: 19185 - protein, 63 aa, Homo sapiens
MITQCLQNLSQHFSIHSCTEELPSWLVSPKGDTMARSLDCELHACFSGFFHFPFMWDKIAEVG

SEQ ID NO: 19186 - DNA, 539 bp, Homo sapiens
caggaagagctggcacatttctttgatggcctagtggtttttatatttttctgcctgaagttcaccactttctacccatgtactcctctcctgttttcatgaccctccttatttcaggaccacttgaaacccttcatttctgcccaacttctggatgttcttccctatactctattagacctccaaacagcttgagaaggagatattattgcacaatgtttaagagccctggcttctgagttggactggcttggatttgtagtagttctattacctactaactttgaggctttgggctgattacttaatttcttggtacctgatttttcatacctgtaaactggtagaaattatgataacatctacttcataggatggttatcatgattaaaaatgccagggatttcttgtttctagtttgacgtagaagcagcttgaaggtccccactccatcgtaaaaacaagtaaatatctgaagaaatggtaaaaaaaaaaaaaaaaaaaaaaatcaacacttcttcttagatacataagagaag

SEQ ID NO: 19187 - protein, 53 aa, Homo sapiens
MYSSPVFMTLLISGPLETLHFCPTSGCSSLYSIRPPNSLRRRYYCTMFKSPGF

SEQ ID NO: 19188 - DNA, 364 bp, Homo sapiens
aggctgtggcttgccttttcacttcttgtgtcctgtttaagaaatatctgctatcccaagataacactaacaaagttgaccttagaattggagtgcctgggttagaaccctgctggtaccacctgcttactgcatgcttctgatgtgagttcaggagaagacactggcaaggacagcaaagaacaggagaacactctagcttccctgatagcattcaaggtgctgtccaaactgactgtgatggcaccctccagacagacagcgatgccacatgttcaagatggcagaatcactatcagcttcaattcctgaatgactgcagagcaaaatttcttacctgcaacatacactctattttcagcct

SEQ ID NO: 19189 - protein, 72 aa, Homo sapiens
CEFRRRHWQGQQRTGEHSSFPDSIQGAVQTDCDGTLQTDSDATCSRWQNHYQLQFLNDCRAKFLTCNIHSIF

SEQ ID NO: 19190 - DNA, 1492 bp, Homo sapiens
cgagacgcccggtgacttctgctggcacctgctgccctcggcatcacctccctcatccccctggagggcacgctggaaagctgcaactccccaccctccgcacaggagcgccccgtagacgcgcagatgggcccagccacccagcggggcggcagccctgagcacacaagtttggagagcgcgcgaggcacctgaaagtggttggggtttggaagcaaaagggtgacacctgctgttcgctgggaccgctctgcgggtgtgggcgtcggtttggaaacgtcctttgcctgagctctgcttgaacctgggtgccagagactacctgggacagctctactgacatcatcagcacgtgattctagcctcattaactctaacttgggaaaagtgcttctggaggaaagggaagagattctaaggctgtgtgccccattcttattactctatctcagtgggtctcaatcccggctacacattggaatcacttggaaagctttaaaaataaaaccaaacctgtgcttgggctccaccataggtgttcaccacagctgtcagtataaatcaatgcatcttggttccattcttcatcatttgctggtagctaaattatggtaaattcagctaaggacattttaaaatcctgtttaatttgtccacatgctaaatatcccagcacacaagagaaaaagcagcatgtacttggataagacaaacctagggcttccttcgagttaaggaacagtcttggaagtcttgttatagttaatggttttttgagtggatgagcaaatgaatgaatatacaaatggttatgcacacaattaagcaaactacttgatcacattcctccttttggttttgcttcctctacctgtcagttgtcctgaacacctgcggaggtattttgtgcaggatggtttaccacattggccttgggagttgaggaagcaccagcttaggttctgccacgtgctctttcctgacagcgagtgctgctggctgctgacgcctagaatctcagcacgggagctgcctttgtcacagaccttggttccccattcaatcgagcacctgtgcagttgccctgtggtctagcatcccaggctcagcagtgacagctcctgatgggctttcacctgactttctaaatcagtgctgttctaaatctgtgctaaatctggtgaccagccagagcctggtcacccctgcatggagtaggagtgaagcttatgaaaaggtgaggtgccaaacacacagaggagaacacggaggaggccatattgtaataaagagaaagcaagcagtcagaagtcaccccataaaacaccttccaccctctgagcatgaccagcaaagcggtttcttcttgcggacactgcatcagcccagctcaaagtgcattccattctgatgaacatccacaaacagttatgaagaagacccaaatgtcatgattttgttcctctcagataataaaaatatcatgattctg

SEQ ID NO: 19191 - protein, 36 aa, Homo sapiens
MTSKAVSSCGHCISPAQSAFHSDEHPQTVMKKTQMS

SEQ ID NO: 19192 - DNA, 2955 bp, Homo sapiens
cgtgcgagtgtctccctctccctctcgctctctctctctctccctctctctctctcttttgtgagttatagcaaccgttgccttgtgaatcaagcgccatagtcaccgtagtcctggcgactgttacccatcaacaacaactactcctctcctcctcctcctcctcttcctcctcctcctccccaccaccaccatctccatcacccaccaacaacaccacaataatccacagccaaggccacttggtcattctggcattttatggtagagaatacgttgagtttggctctggaaggaatatgagagaccatcatgcagacatcagagactgggtcggacacaggctcgacagtgaccttacaaacatctgtggctagtcaagcagcagtgcctacgcaggtggtacagcaagtaccagtacaacaacaggtacagcaggtacagactgtgcagcaggtacaacatgtctatcccgctcaggtgcagtatgtggaaggaagcgatactgtctataccaatggagcaatccgaacaacaacgtatccttacacagagacacagatgtacagccaaaatactggagggaattactttgatactcaagggagttccgcccaggtgactaccgtggtctcatcccacagtatggtgggcactggtgggattcagatgggcgtcacaggaggacaactcatcagcagctctggaggaacctatctgatcggcaactcaatggagaattctggtcactcagtgacacacacaactcgggcctccccagcgacaattgaaatggcgattgagacgctgcaaaagtctgacggtctgtccactcacagaagctctcttctcaacagccatctccagtggctgttggacaattatgagacagcagaaggagtgagccttcccagaagcactctgtacaaccactaccttcgacactgtcaggaacacaaactggacccagtcaatgctgcctcttttggaaaattaataagatcaatttttatggggctacgaaccaggagattgggcactagaggaaactccaaataccactactatgggattcgtgtcaagccagattcccctcttaatcgtctgcaagaagacatgcagtatatggctatgagacaacaacccatgcaacagaaacaaaggtacaagcctatgcagaaagtggatggggttgcagatggtttcacaggaagtggtcaacagacaggcacatctgttgagcaaactgtaattgcccaaagccaacatcatcaacagtttttagatgcatctcgagcacttccagagtttggagaagttgaaatctcttctctgccagatggtactacctttgaggatatcaagtcactgcagagtctttatagagagcactgtgaggcaatattggacgttgttgtgaatcttcaatttagcctgatagaaaaattgtggcaaacattctggcgctattctccctctactccaactgatggcactaccattaccgaatcgagcaatctgagtgaaatagaaagtcgacttccgaaagcaaagctgataactctgtgcaaacatgagtctatcctgaaatggatgtgtaactgtgaccatgggatgtaccaggctttggtggagattctcatccccgacgtccttagacctattcctagtgccttgacccaagccattcgaaattttgcaaaaagccttgaaggttggctttccaatgccatgaacaatattccacagagaatgatacaaaccaaggttgccgctgtaagtgcctttgcccagactctgcgaagatacacgtcgcttaatcacctggcccaggcagctcgtgcagtgcttcagaacacttcccaaatcaaccagatgcttagtgacctcaaccgtgtcgactttgccaatgtccaggagcaggcttcctgggtgtgccagtgtgatgacaacatggttcagagactagaaacagacttcaagatgactcttcagcagcagagcaccctggagcagtgggctgcgtggcttgacaatgtgatgatgcaagcactgaaaccctatgaaggaagacccagttttcctaaagccgccaggcagtttctgctaaaatggtctttctacagctcaatggttattcgggacttaaccttacgcagtgctgctagctttggctccttccacctgatccgtctactctacgacgaatatatgttttacttagtagaacatcgtgttgctcaggcaacaggagagactcctatagcagtcatgggcgagtttggtgatttaaatgccgtgtctcctggaaatctggataaagatgaaggcagtgaagtagaaagtgaaatggatgaagaactggatgactcttcagagcctcaagccaaaagagagaaaacagagctgagccaggcatttccagtgggctgcatgcagcctgttctcgagactggcgtgcaaccaagcctcctgaatccaattcacagcgagcacattgtcacaagtactcagactatcagacagtgcagcgctacaggaaatacctacactgcagtctaaagaatattaaagcgtatttttccagcttacattaaccctgttgatattgggcttaagttgaaaatttaataagcctgaaggtcgactgttgtcaaattctatctgtgctgaacattaactttttggagttgtgaaatggaatgggtgtatgtattttgccagatctttttttttaacgtaaacaaattatttgcttcttaataatgaattttttcccttagtttcaggtgtcaagaaggatttttacaacacttaatgtcaatgttttgttttcttataattaaaaagtaatttacattttttgtagcttaaaatattttattgttgattgttagtcttggtgtatgatttcatgtgtaagttttttaattagatgcacttctgtgaaatatc

SEQ ID NO: 19193 - protein, 749 aa, Homo sapiens; identical to SEQ ID NO: 2340

SEQ ID NO: 19194 - DNA, 1306 bp, Homo sapiens
agaaagtcgacttccgaaagcaaagctgataactctgtgcaaacatgagtctatcctgaaatggatgtgtaactgtgaccatgggatgtaccaggctttggtggagattctcatccccgacgtccttagacctattcctagtgccttgacccaagccattcgaaattttgcaaaaagccttgaaggttggctttccaatgccatgaacaatattccacagagaatgatacaaaccaaggttgccgctgtaagtgcctttgcccagactctgcgaagatacacgtcgcttaatcacctggcccaggcagctcgtgcagtgcttcagaacacttcccaaatcaaccagatgcttagtgacctcaaccgtgtcgactttgccaatgtccaggagcaggcttcctgggtgtgccagtgtgatgacaacatggttcagagactagaaacagacttcaagatgactcttcagcagcagagcaccctggagcagtgggctgcgtggcttgacaatgtgatgatgcaagcactgaaaccctatgaaggaagacccagttttcctaaagccgccaggcagtttctgctaaaatggtctttctacagctcaatggttattcgggacttaaccttacgcagtgctgctagctttggctccttccacctgatccgtctactctacgacgaatatatgttttacttagtagaacatcgtgttgctcaggcaacaggagagactcctatagcagtcatgggcgagagaaatactatgaagttggacttttgtgggtgcttacgacagcaatttccctaaagagcttagaagtggggaaataaaccaaaatagaagttgaagactttttaaaatatttcaaggactaaaatggtcactgtagacatcaggaaagaaatctcagcacacagtcctcttcagcaaagtccaccgctaagttatttgtttagtaaagagtttgtcaggtagcactgcagctatttgggcagacccaaccagagaaaaagattccctggcatagagtaagcatgacggtgccacctactggccactttgccacactctgtcatcctgtgcctagcccaagtggctcttggctttgacactgtctttatggtggttttgctctcaaccacaggtgaagatagtggttgctggcccccctgataaataaataactcttgtttgggataggcaaattcctaaactcacaggaattgttttctttctttataccatccttgtataaaatatactaccataaaatgtcataaaaattagagattctctgcaagaatatgg

SEQ ID NO: 19195 - protein, 246 aa, Homo sapiens
MCNCDHGMYQALVEILIPDVLRPIPSALTQAIRNFAKSLEGWLSNAMNNIPQRMIQTKVAAVSAFAQTLRRYTSLNHLAQAARAVLQNTSQINQMLSDLNRVDFANVQEQASWVCQCDDNMVQRLETDFKMTLQQQSTLEQWAAWLDNVMMQALKPYEGRPSFPKAARQFLLKWSFYSSMVIRDLTLRSAASFGSFHLIRLLYDEYMFYLVEHRVAQATGETPIAVMGERNTMKLDFCGCLRQQFP

SEQ ID NO: 19196 - DNA, 3267 bp, Homo sapiens
cgtgcgagtgtctccctctccctctcgctctctctctctctccctctctctctctcttttgtgagttatagcaaccgttgccttgtgaatcaagcgccatagtcaccgtagtcctggcgactgttacccatcaacaacaactactcctctcctcctcctcctcctcttcctcctcctcctccccaccaccaccatctccatcacccaccaacaacaccacaataatccacagccaaggccacttggtcattctggcattttatggtagagaatacgttgagtttggctctggaaggaatatgagagaccatcatgcagacatcagagactgggtcggacacaggctcgacagtgaccttacaaacatctgtggctagtcaagcagcagtgcctacgcaggtggtacagcaagtaccagtacaacaacaggtacagcaggtacagactgtgcagcaggtacaacatgtctatcccgctcaggtgcagtatgtggaaggaagcgatactgtctataccaatggagcaatccgaacaacaacgtatccttacacagagacacagatgtacagccaaaatactggagggaattactttgatactcaagggagttccgcccaggtgactaccgtggtctcatcccacagtatggtgggcactggtgggattcagatgggcgtcacaggaggacaactcatcagcagctctggaggaacctatctgatcggcaactcaatggagaattctggtcactcagtgacacacacaactcgggcctccccagcgacaattgaaatggcgattgagacgctgcaaaagtctgacggtctgtccactcacagaagctctcttctcaacagccatctccagtggctgttggacaattatgagacagcagaaggagtgagccttcccagaagcactctgtacaaccactaccttcgacactgtcaggaacacaaactggacccagtcaatgctgcctcttttggaaaattaataagatcaatttttatggggctacgaaccaggagattgggcactagaggaaactccaaataccactactatgggattcgtgtcaagccagattcccctcttaatcgtctgcaagaagacatgcagtatatggctatgagacaacaacccatgcaacagaaacaaaggtacaagcctatgcagaaagtggatggggttgcagatggtttcacaggaagtggtcaacagacaggcacatctgttgagcaaactgtaattgcccaaagccaacatcatcaacagtttttagatgcatctcgagcacttccagagtttggagaagttgaaatctcttctctgccagatggtactacctttgaggatatcaagtcactgcagagtctttatagagagcactgtgaggcaatattggacgttgttgtgaatcttcaatttagcctgatagaaaaattgtggcaaacattctggcgctattctccctctactccaactgatggcactaccattaccgaatcgagcaatctgagtgaaatagaaagtcgacttccgaaagcaaagctgataactctgtgcaaacatgagtctatcctgaaatggatgtgtaactgtgaccatgggatgtaccaggctttggtggagattctcatccccgacgtccttagacctattcctagtgccttgacccaagccattcgaaattttgcaaaaagccttgaaggttggctttccaatgccatgaacaatattccacagagaatgatacaaaccaaggttgccgctgtaagtgcctttgcccagactctgcgaagatacacgtcgcttaatcacctggcccaggcagctcgtgcagtgcttcagaacacttcccaaatcaaccagatgcttagtgacctcaaccgtgtcgactttgccaatgtccaggagcaggcttcctgggtgtgccagtgtgatgacaacatggttcagagactagaaacagacttcaagatgactcttcagcagcagagcaccctggagcagtgggctgcgtggcttgacaatgtgatgatgcaagcactgaaaccctatgaaggaagacccagttttcctaaagccgccaggcagtttctgctaaaatggtctttctacagctcaatggttattcgggacttaaccttacgcagtgctgctagctttggctccttccacctgatccgtctactctacgacgaatatatgttttacttagtagaacatcgtgttgctcaggcaacaggagagactcctatagcagtcatgggcgaggtaagagaggctgaaagagctgtgacccactgggttattaaaaataagccagaattacacttcagtctaaatacattattgattaaaaccatggttcctaaccaagtcagcctcagagccaggagggactgtggagttattgcaagagttccttaaattcctctgttcttatgtgcttaatcaaaagattctaaaattgtggattatatcatgtgaaagttcatggaatgtgtctctatattatacaggtacctatgtaaaagaaaaacttgagaaccactggaatatgaaaaatattttaagtgggaaaaagattggtgctcctgataaagcaaagggctgggaatacaatggaaaggattaaatatgtattttgtagactctttcccggtctccaagaacaaagtaaatgattctattttagaaggataaaaatggtaatgatgataactaacattttttggacacttactatgtgcgaggcacagttctatgttttttacatgtaataaagcacttaatgcaagtctttgagatacgttctactttattctgttttacaataagcatccgaggtttatgcagaaagctaaggcacagaaaggttaaatgattactcagctaaaaaatggtagagatttttttttcaaacacagtctgattttcaaacccatatgcttctaaccactaatgatgtaagggggaaaattctcttcttcagaatttctgaatagtcatcaaaatggcttatcaaaaagcttaaactctgaatataacaagggctggttaatataatgaggaatagatgcaaatgctcagatggttcagcactggcttattttgttatattgaatgcaggaggcgggggtagtttataccttgtcgaatcataccagattattaaatgtgacaaattacccaaggcggtaaaaaagacatgttcacttttaagctatgtgtatgtgcttatataaataaaaaagagtg

SEQ ID NO: 19197 - protein, 707 aa, Homo sapiens; identical to SEQ ID NO: 2338

SEQ ID NO: 19198 - DNA, 402 bp, Homo sapiens
aggttgccgctgtaagtgcctttgcccagactctgcgaagatacacgtcgcttaatcacctggcccaggcagctcgtgcagtgcttcagaacacttcccaaatcaaccagatgcttagtgacctcaaccgtgtcgactttgccaatgtccaggagcaggcttcctgggtgtgccagtgtgatgacaacatggttcagagactagaaacagacttcaagatgactcttcagcagcagagcaccctggagcagtgggctgcgtggcttgacaatgtgatgatgcaagcactgaaaccctatgaaggaagacccagttttcctaaagccgccaggcagtttctgctaaaatggtctttctacaggtatcatctaggtttttcctaggctttcttcttcatattct

SEQ ID NO: 19199 - protein, 90 aa, Homo sapiens
MLSDLNRVDFANVQEQASWVCQCDDNMVQRLETDFKMTLQQQSTLEQWAAWLDNVMMQALKPYEGRPSFPKAARQFLLKWSFYRYHLGFS

SEQ ID NO: 19200 - DNA, 1463 bp, Homo sapiens
acttctgcttccactacaaacagtactttaaagacaggccttccactgccattcagaaagcagccatggaggatactctagtttctttgggaagataaacactcaatctgctagttaagagacaaagctcaagagaaataagctgaagctgtaacctccatttcaaacttgtggttctgcagaccatcatgcagacatcagagactgggtcggacacaggctcgacagtgaccttacaaacatctgtggctagtcaagcagcagtgcctacgcaggtggtacagcaagtaccagtacaacaacaggtacagcaggtacagactgtgcagcaggtacaacatgtctatcccgctcaggtgcagtatgtggaaggaagcgatactgtctataccaatggagcaatccgaacaacaacgtatccttacacagagacacagatgtacagccaaaatactggagggaattactttgatactcaagggagttccgcccaggtgactaccgtggtctcatcccacagtatggtgggcactggtgggattcagatgggcgtcacaggaggacaactcatcagcagctctggaggaacctatctgatcggcaactcaatggagaattctggtcactcagtgacacacacaactcgggcctccccagcgacaattgaaatggcgattgagacgctgcaaaagtctgacggtctgtccactcacagaagctctcttctcaacagccatctccagtggctgttggacaattatgagacagcagaaggagtgagccttcccagaagcactctgtacaaccactaccttcgacactgtcaggaacacaaactggacccagtcaatgctgcctcttttggaaaattaataagatcaatttttatggggctacgaaccaggagattgggcactagaggaaactccaaataccactactatgggattcgtgtcaagccagattcccctcttaatcgtctgcaagaagacatgcagtatatggctatgagacaacaacccatgcaacagaaacaaaggtacaagcctatgcagaaagtggatggggttgcagatggtttcacaggaagtggtcaacagacaggcacatctgttgagcaaactgtaattgcccaaagccaacatcatcaacagtttttagatgcatctcgagcacttccagagtttggagaagttgaaatctcttctctgccagatggtactacctttgaggatatcaagtcactgcagagtctttatagagagcactgtgaggcaatattggacgttgttgtgaatcttcaatttagcctgatagaaaaattgtggcaaacattctggcgctattctccctctactccaactgatggcactaccattaccgaatcgaggtcagaatcaacatcttttccaattcattttcatggctgagtagatgtcacaactaataaattagagatatgt

SEQ ID NO: 19201 - protein, 413 aa, Homo sapiens
MQTSETGSDTGSTVTLQTSVASQAAVPTQVVQQVPVQQQVQQVQTVQQVQHVYPAQVQYVEGSDTVYTNGAIRTTTYPYTETQMYSQNTGGNYFDTQGSSAQVTTVVSSHSMVGTGGIQMGVTGGQLISSSGGTYLIGNSMENSGHSVTHTTRASPATIEMAIETLQKSDGLSTHRSSLLNSHLQWLLDNYETAEGVSLPRSTLYNHYLRHCQEHKLDPVNAASFGKLIRSIFMGLRTRRLGTRGNSKYHYYGIRVKPDSPLNRLQEDMQYMAMRQQPMQQKQRYKPMQKVDGVADGFTGSGQQTGTSVEQTVIAQSQHHQQFLDASRALPEFGEVEISSLPDGTTFEDIKSLQSLYREHCEAILDVVVNLQFSLIEKLWQTFWRYSPSTPTDGTTITESRSESTSFPIHFHG

SEQ ID NO: 19202 - DNA, 821 bp, Homo sapiens
actacaaacagtactttaaagacaggccttccactgccattcagaaagcagccatggaggatactctagtttctttgggaagataaacactcaatctgctagttaagagacaaagctcaagagaaataagctgaagctgtaacctccatttcaaacttgtggttctgcagaccatcatgcagacatcagagactgggtcggacacaggctcgacagtgaccttacaaacatctgtggctagtcaagcagcagtgcctacgcaggtggtacagcaagtaccagtacaacaacaggtacagcaggtacagactgtgcagcaggtacaacatgtctatcccgctcaggtgcagtatgtggaaggaagcgatactgtctataccaatggagcaatccgaacaacaacgtatccttacacagagacacagatgtacagccaaaatactggagggaattactttgatactcaagggagttccgcccaggtgactaccgtggtctcatcccacagtatggtgggcactggtgggattcagatgggcgtcacaggaggacaactcatcagcagctctggaggaacctatctgatcggcaactcaatggagaattctggtcactcagtgacacacacaactcgggcctccccagcgacactccagtggctgttggacaattatgagacagcagaaggagtgagccttcccagaagcactctgtacaaccactaccttcgacactgtcaggaacacaaactggacccagtcaatgctgcctcttttggaaaattaataagatcaatttttatggggctacgaaccaggaga

SEQ ID NO: 19203 - protein, 214 aa, Homo sapiens
MQTSETGSDTGSTVTLQTSVASQAAVPTQVVQQVPVQQQVQQVQTVQQVQHVYPAQVQYVEGSDTVYTNGAIRTTTYPYTETQMYSQNTGGNYFDTQGSSAQVTTVVSSHSMVGTGGIQMGVTGGQLISSSGGTYLIGNSMENSGHSVTHTTRASPATLQWLLDNYETAEGVSLPRSTLYNHYLRHCQEHKLDPVNAASFGKLIRSIFMGLRTR

SEQ ID NO: 19204 - DNA, 363 bp, Homo sapiens
atgcagacatcagagactgggtcggacacaggctcgacagtgaccttacaaacatctgtggctagtcaagcagcagtgcctacgcaggtggtacagcaagtaccagtacaacaacaggtacagcaggtacagactgtgcagcaggtacaacatgtctatcccgctcaggtgcagtatgtggaaggaagcgatactgtctataccaatggagcaatgtccagggccccctggagcatgattttggaatcttcaccataaacttaaactactgttggcatttataccaaatgaaaaagacgcctgccacttcgacctttatgctctcagggaaaataaatggctttgtagacactgctagaggtc

SEQ ID NO: 19205 - protein, 85 aa, Homo sapiens
MQTSETGSDTGSTVTLQTSVASQAAVPTQVVQQVPVQQQVQQVQTVQQVQHVYPAQVQYVEGSDTVYTNGAMSRAPWSMILESSP

SEQ ID NO: 19206 - DNA, 776 bp, Homo sapiens
cggcggtgttcctggtagcgtcagcctcctggcttttccttttcctggacgcttcagggctccgcggcctgcgctagactggagggtccgcgtcactctcgccctcctgctttccgcgctctcacccgctcccgcctcctgagggcacgacttgtggaggagcgcgggcggcggggcgtgagcgagctgcctctgccgccatcttagagaaggcgagcgtggggtgtgcgtgggcgcgagtcggcctcccgcggtgccgccgcagcgtggcgcggagaggcaggggcatccagtggttcaaggttacaataagctgtgatcgtgccactgcattctacctgggatgacagagtgggaccctgtgccacagagtgagaccctgtctcaaaaaaaaaaaaactatgtaaatccaagaaaaaaagaaaacagctcctgttgccttttgcctctcatccagaaaggtatccatttgcctttctaatatctcttcatcctgtcaggccacaaatggagacgactcacctgtattgtacctctccaagttctggaaagtcgatggagggtttactcagaacttcaatctatccagaactgagttttgtttatggtgtgtgccaggcagtggattaaacagtagtgcatatcacttggctgaagtgacaggaataaagaacagaatgcatccactcctccagtctcattaagctgcctctttctcctgaaattggattgggattccaggacacctctcaacctacaggaaacactggatctaa

SEQ ID NO: 19207 - protein, 45 aa, Homo sapiens
MTEWDPVPQSETLSQKKKNYVNPRKKENSSCCLLPLIQKGIHLPF

SEQ ID NO: 19208 - DNA, 578 bp, Homo sapiens
ctggtagcgtcagcctcctggcttttccttttcctggacgcttcagggctccgcggcctgcgctagactggagggtccgcgtcactctcgccctcctgctttccgcgctctcacccgctcccgcctcctgagggcacgacttgtggaggagcgcgggcggcggggcgtgagcgagctgcctctgccgccatcttagagaaggcgagcgtggggtgtgcgtgggcgcgagtcggcctcccgcggtgccgccgcagcgtggcgcggagagctttaaaaaaaaaagtctggggccgggcgtggtggctcacgcctttaatctcaacactttgggaggccgagcgggtggatcacctgacatcgggagttcgagaccagcctgaccaacatggagttaccccatctctactaaaaatacaaaattagctgggtgtggtggcacatacctgtaatcccagctacttgggaagctgaggcaggagaatcgcttgaacctgggaggcagaggttgcggtgggccgagatcgcaccattgcactccaccctgggcaacaagagcaaaactcggtctcaaaaaaaaa

SEQ ID NO: 19209 - protein, 118 aa, Homo sapiens
TGGSASLSPSCFPRSHPLPPPEGTTCGGARAAGRERAASAAILEKASVGCAWARVGLPRCRRSVARRALKKKVWGRAWWLTPLISTLWEAERVDHLTSGVRDQPDQHGVTPSLLKIQN

SEQ ID NO: 19210 - DNA, 701 bp, Homo sapiens
cagaataactacaaaacaaaatttgaagaggagtccaaggcattttctggttccatacttttttcattctcctgttggataccatttctcctgtctgatccaatgctgagctcagtggtaatgaagtgccacattgtgaaaggggagcctagaacggggctgccagagagacagtctgtaattgaaagttctttcaagagaaggacttctatcaggtctgctgagggaataggagctccacctgctgacttttttatgtttgctgactctgaaagaatgcaaaacatgaagaaattgaatggtgttatttcttttgtaatttctcagtggaaatattgttttcaaaattattgataagatgtaccagtctaaccagggctttcaagaagaaaatgcaatctatagcttgttttaagagtggggattatgttggcttccctgggccagtctaaataattactttaatctggaacaacatataaattcataaattgttgccaccacgactcttagggaatcctcgacttttcaaacattgcctctctcagccataaatttacactgcgccactcgcccatgtgtgttttgttttaagaagctgtagtctcttgttacatgtagtttggaagaaatgctagatgtttttgatctaaagaagaaagatcaagtcctagtcaaactttagtattttaaagggcata

SEQ ID NO: 19211 - protein, 83 aa, Homo sapiens
MLSSVVMKCHIVKGEPRTGLPERQSVIESSFKRRTSIRSAEGIGAPPADFFMFADSERMQNMKKLNGVISFVISQWKYCFQNY

SEQ ID NO: 19212 - DNA, 6501 bp, Homo sapiens
gttgtaaacttcacctcccgggggctcttccccttctgtacccctttgctgtttgtccccctcctcccgggtcctggagtccgtcgtgttccaacagtttttgctcttattcccgtgggctgcctgggcctcctttcacccgtgagacttggagcggcccctggggtcttgggtgtgcagcacggatcacgcgagacccctgagacctcaaatcatctaacgtgaagccacagacatcttgggcaattttaatcatcaagaaagaaatatgtcattaagaaatagcagggtattttgaaagagttggaaaacatcatgaatttgaatacttcaagtaatactggtgatacccaaaggttgaagattgcctcattggatgtaaaacaaatacttaaaaatgaaacagagttggatattactgataatctcaggaagaaactccattgggctaaaaaagaaaagttagaaataacaaccaaacacaatgcagagctggcaagctatgagagccagattgccaagctacggtccgaggttgaaaagggagaagcattgcgacaaagtctggaatatgacctagctgttgctagaaaggaagctggtcttggaagacgggctgctgaagaaagattagccgaggcacataggatccaagaaaaactctgtgcacagaattcagaacttcaagcaaagacaaatgagactgagaaagcatttcagacttctcagcaaaaatggaaagaagaatgcagaagatttgaacatgatttggaggaaagagacaatatgatccaaaattgcaatcgagaatatgatttacttatgaaagaaaaaagcagactagagaaaactctacaggaagcgttggaaaaacatcaacgggagaagaatgagatggagtctcatatcagggagacagcattggaggagtttagattacaagaagaacaatgggaagcagaaagaagagaattacaatttatagtacaggagcaagatactgctgtgcaaaatatgcataagaaagtagaaaaattagaaacagaacatatggactgctctgaccttttacggcgacaaacaagtgaacttgaatttagcactcaacgagaggaacgccttagaaaagaatttgaggcaactactctaagagtgaggaaattagaagaaaacattgaagcagaaagagcagcgcatttggaatcaaaatttaattctgaaattattcagttacggattcgagaccttgaaggagctttgcaagtagagaaggccagtcaagcagaagctgttgctgatttggaaattatcaagaatgaattcaaagaagttgaaagtgcatatgagcgagaaaagcataatgcacaagagagctttgcaaaactaaatttattagaaaaagagtatttctccaaaaataagaaactaaatgaagacatcgaggaacagaagaaagtaattatagacctttcaaagagactccagtataatgaaaaaagttgcagtgaattacaggaagaactagtaatggctaagaagcaccaggccttcctagtagagacatgtgaaaataacgtgaaagaattggaatcgatcttggacagctttactgtgtcgggccagtggacatcaggcatccacaaggacaaagataaacctcccagcttctctgttgtccttgagagattgaggcgtaccttgacagattaccagaacaagctggaagatgcatctaatgaggaaaaggcatgtaatgaacttgattctacgaaacagaagatagactctcacactaaaaatataaaggaacttcaggataaactggctgatgttaataaagagttaagtcatttacacactaaatgtgcagaccgagaggctttaataagcactttaaaagtggaactacaaaatgtgctgcactgttgggagaaagaaaaggctcaggcagcccagtctgaaagtgaactgcagaagctttcccaggctttccataaggatgcagaggagaagctaaccttccttcacaccttatatcagcacttggtagcaggctgtgtgctcataaaacaaccagaaggcatgctggataaattctcttggtctgagctttgtgcagtcttacaggagaatgttgatgccctgattgcagacctcaacagggctaatgagaagataaggcatctagagtatatctgtaaaaacaagtctgacacgatgagagagcttcagcagactcaggaagacacctttaccaaagtggcagaacagatcaaagcccaagagagctgctggcacagacaaaagaaggaactagagctgcagtattctgaactcttcctggaggtgcagaagagggcacagaaatttcaagaaattgctgaaaaaaacatggaaaaattgaaccatattgagaagtcacatgaacagttggttcttgaaaattcgcacttcaaaaaactgttatcacagactcaaagggaacagatgtccttgctggcagcctgtgcattaatggctggtgccttatatcccctctatagccgatcatgcgccttgtctacacagagagattttctccaggagcaggtcaacacctttgagttgttcaaactggaaattagaactctagcccaggctttgtcaactgtagaggaaaagaagcaagaggaagccaagatgaaaaagaaaacattcaaaggattgatacgtatatttcggaaaggtgttattgctgttttggcagcaaacagactcaagattttgggccaatcatgtgcctctctttttacctggatggagagtttcaaagaaggcataggcatgttagtgtgcacaggagagccccaagacaagcataaatttccaaaacatcaaaaggagcagttgcgttgtttacaagcgctcagttggctcaccagttctgaccttcttgctgcaataatcagttctatggctgaattacaagacgtcattggtaaagcagatccaaattccagaatttgtggacatttactcataggtgcagccaagaattcttttgcaaaactcatggataaaattagtctggtaatggaatgtatacctctgcacagtagcaggagtattacatatgtagaaaaagattccctggttcagaggctggcccatggacttcataaagtaaacacactggccctgaaatatggtttgcgtggccatgtgcccattacgaaaagcacagcatcgttgcagaagcaaatacttggatttacacaaagactgcatgctgcagaagtggagcgccgctcactacgcttagaggtcacagaattcaaacgaagtgtgaatgaaatgaaaaaggagcttgacaaagcccagggtctgcaaatgcaattaaatgaatttaagcagtctaaattgatcacccatgagaagtttgaaagtgcatgtgaagaactaaataatgcattacttcgggaagagcaggcacaaatgctattgaatgaacaggcacaacaactacaggaattgaattataaacttgaattgcactccagtgaggaagctgacaaaaaccaaactcttggagaagctgttaagagtctctccgaggcaaagatggagctgagaagaaaagatcaatctctgcgtcagctcaatagacatcttacccagctggagcaggacaagcgtcgactggaggagaacatccatgatgcagagagtgccctccgcatggcagccaaagacaaagaatgtgttgctaatcacatgagagcagtagaaaatacgcttcacaaggtcagagatcagatctcgctgtcatggtctgcggcaagtaggaatgacttcaccctacagctacccaaactgcacctggagacctttgcaatggaggggctcaagggcgggccagaggtggtagcatgccaggctatgattaaaagtttcatggatgtctaccagcttgcaagcactagaatcatgacattagagaaggaaatgacatctcatcgaagtcacattgcagccttgaaatcagaacttcacacagcttgtttacgtgaaaatgcaagtttacaatcaataggatcacgagaccattcaaatctctccattccttcaagagctcctcttcctgctgacacaactggtattggggatttcttaccattgaaagctgaacttgatactacttacactttcttaaaggagacatttataaatactgtgccccatgctctgacatcatctcactcctctccagtgactatgtctgctaatgccaacagaccaactcagattggattatgacttcatgaaattaaaaaatggaggaagagttaacagtacaattaaaattgttttgaatgggaattttcttatcagttgacttttgtttcagcagaagtggcagtggatttaaaaaatttgtgcgctatcttgatgtattctggtagctctgtctccttgaataaggaaatagccaacttttttctctccaagttttatttgttatcacagttgctcatttttatgtaacatatttttaaatgttaaggaatgacacattttgggtaatttccctcagacttaaaaaaatcaataagccattttagtctctatctatcaaagttgtttcatacttgtctattttaaagcaggactgcaatgctttaataggattgagagagctatttgaaatgtatgccaatgattcctgtcatttcatggcagcccggccatggttcactgagccccctcttctctcttgtcagctcaactgaagacaagcatttagttgcaaactttaagcaggttgtgcaaaacagaaatgatgtgactgcttctcctcctgcacaataatgtcactcctggtcaatgtgagaaggtcaggttgctccttgtaaagctacatgataccacttgcccatttgaacaagttaagttaactgctgaatctggtccctgaaggcactgaaaactcattcttttagcaagtctgcatttgataagaaagtagagcaattgtgctggaggatttctgtggtatgtttaggcacttcataaggacagttcccacactaggatagcaggtaatatatttagtataagctgaaaaacttcaaggtaatggctgttttgaccttcaaaatagactccttttttgtttttgttgttggtaggacccaagagtgacacccatctttgatgctgacagaatttaaaacaaggccattgccctgcattttctgccttgtagcacacaaaagtaaaattgtatgtcaggccgagatgtcggggagctgacaagatgccccagtgacatttcagctagaaagagcaagtgtcttgcaaccaagtggtcaaatatcaaataataggtcaagcaggaaggagctgagttctaaccacaaagaggtttctggtaacttacttgacaagcttttgggtgctttgtggcttgacaaagtgatgttctgttgggtatcgctagacagactgttctttatcgccttcagaagatcagacattgacattgattaaactctttaacccttaaaggttaaatccttgcagtttgcatcatggtaagtgaagaacaaaagaatatttgtagtaagaatttgtttttgtattaatcatttaactccctagtgctattaacttctgatgtgaactatagcttttgacaaagagtcttgatacataatctattttttatattatttttcattatggaatctttcattatggatacattagagtataacagtatgtattacagaagtttttttgtcttatctttacagtgacatttgattcaaattacccaactgctgagaatttttttattggccttggtaaataagattttatactaactatttattagtagccaaattagccaagtgatttatgccatctgagggaacacagcagtattactgtcgtactgtgtaacacatcctattcttgtaatactgaaccactataattagctttatataaaactttagaaagcttatatggagtaaaattatatctttaaccaaatttctcttaattctttccttggaattatttttaatatgacctgtgtaacatgacctgtatgaaattcaacttgcaaatttattataacatggaagtgctatttattgtttttatacagatcatataatttctgcacatttcagaacacctttctctgctgttccaaacaatgattaggatattgttcatacagaaattgatagacaattttttagttcatgtgatatcactgagcttacaattctcactagagaagaacaaggttactatatgtaacctctatgtctaagtgtttgtgtgtgtgtatgcttgtgttgaatctgttttcagatcctactgattttagaggaacaagcagctttgtaaaatgtgccttggaaaggccttggtcttcttgccttgattttataatctgttaatgggataactccaaaaataaatgtgtatgtgtctccatatata

SEQ ID NO: 19213 - protein, 1326 aa, Homo sapiens; identical to SEQ ID NO: 2342

SEQ ID NO: 19214 - DNA, 2551 bp, Homo sapiens
gaacttcaggataaactggctgatgttaataaagagttaagtcatttacacactaaatgtgcagaccgagaggctttaataagcactttaaaagtggaactacaaaatgtgctgcactgttgggagaaagaaaaggctcaggcagcccagtctgaaagtgaactgcagaagctttcccaggctttccataaggatgcagaggagaagctaaccttccttcacaccttatatcagcacttggtagcaggctgtgtgctcataaaacaaccagaaggcatgctggataaattctcttggtctgagctttgtgcagtcttacaggagaatgttgatgccctgattgcagacctcaacagggctaatgagaagataaggcatctagagtatatctgtaaaaacaagtctgacacgatgagagagcttcagcagactcaggaagacacctttaccaaagtggcagaacagatcaaagcccaagagagctgctggcacagacaaaagaaggaactagagctgcagtattctgaactcttcctggaggtgcagaagagggcacagaaatttcaagaaattgctgaaaaaaacatggaaaaattgaaccatattgagaagtcacatgaacagttggttcttgaaaattcgcacttcaaaaaactgttatcacagactcaaagggaacagatgtccttgctggcagcctgtgcattaatggctggtgccttatatcccctctatagccgatcatgcgccttgtctacacagagagattttctccaggagcaggtcaacacctttgagttgttcaaactggaaattagaactctagcccaggctttgtcaactgtagaggaaaagaagcaagaggaagccaagatgaaaaagaaaacattcaaaggattgatacgtatatttcggaaaggtgttattgctgttttggcagcaaacagactcaagattttgggccaatcatgtgcctctctttttacctggatggagagtttcaaagaaggcataggcatgttagtgtgcacaggagagccccaagacaagcataaatttccaaaacatcaaaaggagcagttgcgttgtttacaagcgctcagttggctcaccagttctgaccttcttgctgcaataatcagttctatggctgaattacaagacgtcattggtaaagcagatccaaattccagaatttgtggacatttactcataggtgcagccaagaattcttttgcaaaactcatggataaaattagtctggtaatggaatgtatacctctgcacagtagcaggagtattacatatgtagaaaaagattccctggttcagaggctggcccatggacttcataaagtaaacacactggccctgaaatatggtttgcgtggccatgtgcccattacgaaaagcacagcatcgttgcagaagcaaatacttggatttacacaaagactgcatgctgcagaagtggagcgccgctcactacgcttagaggtcacagaattcaaacgaagtgtgaatgaaatgaaaaaggagcttgacaaagcccagggtctgcaaatgcaattaaatgaatttaagcagtctaaattgatcacccatgagaagtttgaaagtgcatgtgaagaactaaataatgcattacttcgggaagagcaggcacaaatgctattgaatgaacaggcacaacaactacaggaattgaattataaacttgaattgcactccagtgaggaagctgacaaaaaccaaactcttggagaagctgttaagagtctctccgaggcaaagatggagctgagaagaaaagatcaatctctgcgtcagctcaatagacatcttacccagctggagcaggacaagcgtcgactggaggagaacatccatgatgcagagagtgccctccgcatggcagccaaagacaaagaatgtgttgctaatcacatgagagcagtagaaaatacgcttcacaaggtcagagatcagatctcgctgtcatggtctgcggcaagtaggaatgacttcaccctacagctacccaaactgcacctggagacctttgcaatggaggggctcaagggcgggccagaggtggtagcatgccaggctatgattaaaagtttcatggatgtctaccagcttgcaagcactagaatcatgacattagagaaggaaatgacatctcatcgaagtcacattgcagccttgaaatcagaacttcacacagcttgtttacgtgaaaatgcaagtttacaatcaataggatcacgagaccattcaaatctctccattccttcaagagctcctcttcctgctgacacaactggtattggggatttcttaccattgaaagctgaacttgatactacttacactttcttaaaggagacatttataaatactgtgccccatgctctgacatcatctcactcctctccagtgactatgtctgctaatgccaacagaccaactcagattggattatgacttcatgaaattaaaaaatggaggaagagttaacagtacaattaaaattgttttgaatggg

SEQ ID NO: 19215 - protein, 737 aa, Homo sapiens
MLDKFSWSELCAVLQENVDALIADLNRANEKIRHLEYICKNKSDTMRELQQTQEDTFTKVAEQIKAQESCWHRQKKELELQYSELFLEVQKRAQKFQEIAEKNMEKLNHIEKSHEQLVLENSHFKKLLSQTQREQMSLLAACALMAGALYPLYSRSCALSTQRDFLQEQVNTFELFKLEIRTLAQALSTVEEKKQEEAKMKKKTFKGLIRIFRKGVIAVLAANRLKILGQSCASLFTWMESFKEGIGMLVCTGEPQDKHKFPKHQKEQLRCLQALSWLTSSDLLAAIISSMAELQDVIGKADPNSRICGHLLIGAAKNSFAKLMDKISLVMECIPLHSSRSITYVEKDSLVQRLAHGLHKVNTLALKYGLRGHVPITKSTASLQKQILGFTQRLHAAEVERRSLRLEVTEFKRSVNEMKKELDKAQGLQMQLNEFKQSKLITHEKFESACEELNNALLREEQAQMLLNEQAQQLQELNYKLELHSSEEADKNQTLGEAVKSLSEAKMELRRKDQSLRQLNRHLTQLEQDKRRLEENIHDAESALRMAAKDKECVANHMRAVENTLHKVRDQISLSWSAASRNDFTLQLPKLHLETFAMEGLKGGPEVVACQAMIKSFMDVYQLASTRIMTLEKEMTSHRSHIAALKSELHTACLRENASLQSIGSRDHSNLSIPSRAPLPADTTGIGDFLPLKAELDTTYTFLKETFINTVPHALTSSHSSPVTMSANANRPTQIGL

SEQ ID NO: 19216 - DNA, 1257 bp, Homo sapiens
gtgttattgctgttttggcagcaaacagactcaagattttgggccaatcatgtgcctctctttttacctggatggagagtttcaaagaaggcataggcatgttagtgtgcacaggagagccccaagacaagcataaatttccaaaacatcaaaaggagcagttgcgttgtttacaagcgctcagttggctcaccagttctgaccttcttgctgcaataatcagttctatggctgaattacaagacgtcattggtaaagcagatccaaattccagaatttgtggacatttactcataggtgcagccaagaattcttttgcaaaactcatggataaaattagtctggtaatggaatgtatacctctgcacagtagcaggagtattacatatgtagaaaaagattccctggttcagaggctggcccatggacttcataaagtaaacacactggccctgaaatatggtttgcgtggccatgtgcccattacgaaaagcacagcatcgttgcagaagcaaatacttggatttacacaaagactgcatgctgcagaagtggagcgccgctcactacgcttagaggtcacagaattcaaacgaagtgtgaatgaaatgaaaaaggagcttgacaaagcccagggtctgcaaatgcaattaaatgaatttaagcagtctaaattgatcacccatgagaagtttgaaagtgcatgtgaagaactaaataatgcattacttcgggaagagcaggcacaaatgctattgaatgaacaggcacaacaactacaggaattgaattataaacttgaattgcactccagtgaggaagctgacaaaaaccaaactcttggagaagctgttaagagtctctccgaggcaaagatggagctgagaagaaaagatcaatctctgcgtcagctcaatagacatcttacccagctggagcaggacaagcgtcgactggaggagaacatccatgatgcagagagtgccctccgcatggcagccaaagacaaagaatgtgttgctaatcacatgagagcagtagaaaatacgcttcacaaggtcagagatcagatctcgctgtcatggtctgcggcaagtaggaatgacttcaccctacagctacccaaactgcacctggagacctttgcaatggaggggctcaagggcgggccagaggtggtagcatgccaggttagagtctaaataacattgtttgctactgagacatatagaaaaataaattgcactaactggagag

SEQ ID NO: 19217 - protein, 376 aa, Homo sapiens
MESFKEGIGMLVCTGEPQDKHKFPKHQKEQLRCLQALSWLTSSDLLAAIISSMAELQDVIGKADPNSRICGHLLIGAAKNSFAKLMDKISLVMECIPLHSSRSITYVEKDSLVQRLAHGLHKVNTLALKYGLRGHVPITKSTASLQKQILGFTQRLHAAEVERRSLRLEVTEFKRSVNEMKKELDKAQGLQMQLNEFKQSKLITHEKFESACEELNNALLREEQAQMLLNEQAQQLQELNYKLELHSSEEADKNQTLGEAVKSLSEAKMELRRKDQSLRQLNRHLTQLEQDKRRLEENIHDAESALRMAAKDKECVANHMRAVENTLHKVRDQISLSWSAASRNDFTLQLPKLHLETFAMEGLKGGPEVVACQVRV

SEQ ID NO: 19218 - DNA, 838 bp, Homo sapiens
atatttgaagcacagtgtggatgttaatgtgtggctaaactgagcaagaagaaaacattatgtagtctctccgaggcaaagatggagctgagaagaaaagatcaatctctgcgtcagctcaatagacatcttacccagctggagcaggacaagcgtcgactggaggagaacatccatgatgcagagagtgccctccgcatggcagccaaagacaaagaatgtgttgctaatcacatgagagcagtagaaaatacgcttcacaaggtcagagatcagatctcgctgtcatggtctgcggcaagtaggaatgacttcaccctacagctacccaaactgcacctggagacctttgcaatggaggggctcaagggcgggccagaggtggtagcatgccaggctatgattaaaagtttcatggatgtctaccagcttgcaagcactagaatcatgacattagagaaggaaatgacatctcatcgaagtcacattgcagccttgaaatcagaacttcacacagcttgtttacgtgaaaatgcaagtttacaatcaataggatcacgagaccattcaaatctctccattccttcaagagctcctcttcctgctgacacaactggtattggggatttcttaccattgaaagctgaacttgatactacttacactttcttaaaggagacatttataaatactgtgccccatgctctgacatcatctcactcctctccagtgactatgtctgctaatgccaacagaccaactcagattggattatgacttcatgaaattaaaaaatggaggaagagttaacagtacaattaaaattgttttgaatggg

SEQ ID NO: 19219 - protein, 231 aa, Homo sapiens
MELRRKDQSLRQLNRHLTQLEQDKRRLEENIHDAESALRMAAKDKECVANHMRAVENTLHKVRDQISLSWSAASRNDFTLQLPKLHLETFAMEGLKGGPEVVACQAMIKSFMDVYQLASTRIMTLEKEMTSHRSHIAALKSELHTACLRENASLQSIGSRDHSNLSIPSRAPLPADTTGIGDFLPLKAELDTTYTFLKETFINTVPHALTSSHSSPVTMSANANRPTQIGL

SEQ ID NO: 19220 - DNA, 1422 bp, Homo sapiens
atatttgaagcacagtgtggatgttaatgtgtggctaaactgagcaagaagaaaacattatgtagtctctccgaggcaaagatggagctgagaagaaaagatcaatctctgcgtcagctcaatagacatcttacccagctggagcaggacaagcgtcgactggaggagaacatccatgatgcagagagtgccctccgcatggcagccaaagacaaagaatgtgttgctaatcacatgagagcagtagaaaatacgcttcacaaggtcagagatcagatctcgctgtcatggtctgcggcaagtaggaatgacttcaccctacagctacccaaactgcacctggagacctttgcaatggaggggctcaagggcgggccagaggtggtagcatgccaggctatgattaaaagtttcatggatgtctaccagcttgcaagcactagaatcatgacattagagaaggaaatgacatctcatcgaagtcacattgcagccttgaaatcagaacttcacacagcttgtttacgtgaaaatgcaagtttacaatcaataggatcacgagaccattcaaatctctccattccttcaagagctcctcttcctgctgacacaactggtattggggatttcttaccattgaaagctgaacttgatactacttacactttcttaaaggagacatttataaatactgtgccccatgctctgacatcatctcactcctctccagtgactatgtctgctaatgccaacagaccaactcagattggattatgacttcatgaaattaaaaaatggaggaagagttaacagtacaattaaaattgttttgaatgggaattttcttatcagttgacttttgtttcagcagaagtggcagtggatttaaaaaatttgtgcgctatcttgatgtattctggtagctctgtctccttgaataaggaaatagccaacttttttctctccaagttttatttgttatcacagttgctcatttttatgtaacatatttttaaatgttaaggaatgacacattttgggtaatttccctcagacttaaaaaaatcaataagccattttagtctctatctatcaaagttgtttcatacttgtctattttaaagcaggactgcaatgctttaataggattgagagagctatttgaaatgtatgccaatgattcctgtcatttcatggcagcccggccatggttcactgagccccctcttctctcttgtcagctcaactgaagacaagcatttagttgcaaactttaagcaggttgtgcaaaacagaaatgatgtgactgcttctcctcctgcacaataatgtcactcctggtcaatgtgagaaggtcaggttgctccttgtaaagctacatgataccacttgcccatttgaacaagttaagttaactgctga

SEQ ID NO: 19221 - protein, 231 aa, Homo sapiens; identical to SEQ ID NO: 19219

SEQ ID NO: 19222 - DNA, 1244 bp, Homo sapiens
cccagttggagaaaaaaagagttagatagcagctaacttggggaatgaacttcgacgtcagggaaaaaccatcaccaatatgaaatgtcagagatcagatctcgctgtcatggtctgcggcaagtaggaatgacttcaccctacagctacccaaactgcacctggagacctttgcaatggaggggctcaagggcgggccagaggtggtagcatgccaggctatgattaaaagtttcatggatgtctaccagcttgcaagcactagaatcatgacattagagaaggaaatgacatctcatcgaagtcacattgcagccttgaaatcagaacttcacacagcttgtttacgtgaaaatgcaagtttacaatcaataggatcacgagaccattcaaatctctccattccttcaagagctcctcttcctgctgacacaactggtattggggatttcttaccattgaaagctgaacttgatactacttacactttcttaaaggagacatttataaatactgtgccccatgctctgacatcatctcactcctctccagtgactatgtctgctaatgccaacagaccaactcagattggattatgacttcatgaaattaaaaaatggaggaagagttaacagtacaattaaaattgttttgaatgggaattttcttatcagttgacttttgtttcagcagaagtggcagtggatttaaaaaatttgtgcgctatcttgatgtattctggtagctctgtctccttgaataaggaaatagccaacttttttctctccaagttttatttgttatcacagttgctcatttttatgtaacatatttttaaatgttaaggaatgacacattttgggtaatttccctcagacttaaaaaaatcaataagccattttagtctctatctatcaaagttgtttcatacttgtctattttaaagcaggactgcaatgctttaataggattgagagagctatttgaaatgtatgccaatgattcctgtcatttcatggcagcccggccatggttcactgagccccctcttctctcttgtcagctcaactgaagacaagcatttagttgcaaactttaagcaggttgtgcaaaacagaaatgatgtgactgcttctcctcctgcacaataatgtcactcctggtcaatgtgagaaggtcaggttgctccttgtaaagctacatgataccacttgcccatttgaacaagttaagttaactgctga

SEQ ID NO: 19223 - protein, 140 aa, Homo sapiens [sequence omitted]

SEQ ID NO: 19224 - DNA, 1106 bp, Homo sapiens
gttcattaaagaagatgagggaaaataaacacacatgtacacgcacaccagataaactgaatgcttccttctgctggggacacgctgtagatgaaaaggaagggaaaagagacttcatttccatacccactaaccatgccaacagaaggctttgtgaagaaggaagtaaaagctatcggtaggagttagaaaaaaacatttctagttacaagaacagcagaaaaagacctgaacttcagagtggaccacaaatgaatatgaattaataacacagatctcttttcaaaagccaacacaaaatgaggatgtgttttttgcaaaagcagttgttcttgccactgggcttatgcttgtcattctttcatgtgtcacagccagacctaggaaattccctggaaagtcccctccatcacacacctgcagtttttccatttgagtgtaattctgttggaccttgaaagactttttgatctttgggacgctcttatcaccaaatgtatctttctgcaggaagaagacagaagaaaggggtggactatgagatgggagcctgggtcccaatttcagttcaaccattaccaaccaggtggctttaggcaagtctggtcatttcctttgcctcagtggctttctataaaatggaattctatagggatgatgaaagcgaaaacgttagccactatgcttgctagtgctcaagaaatgattccttcctgcctgcctgcctcagttttccatctgtaaacaaggattcaactagaacatctttgaggttccttgagctctaacactctgtgattctgttggcagcaccttaagaaatttacaacaaacactccattgagtcttaatctattagatcccattcagttctaatagtgttgtgattttgactttgtagcctcatgtttattttctctcttcctgattttttatttatatattctatttaatagtttttgctttttcaagttgtcaccagttctttgtagaataagaaaaaagtataactaactggaggaaagaatgcattcacagaaagccaaggaatgataacactaatgctaatacaatactactgctaataaaaataactgcctttattg

SEQ ID NO: 19225 - protein, 55 aa, Homo sapiens
MRENKHTCTRTPDKLNASFCWGHAVDEKEGKRDFISIPTNHANRRLCEEGSKSYR

SEQ ID NO: 19226 - DNA, 312 bp, Homo sapiens
caggtggtgactgtagcaaaaaggaaaaacaggccaacatgcaggatggataaaaaccctgattattaccccaatgaatgccagttggctgaattgaattcaagtcccaacttctgagtcttaagtgttgtccacgtccctaatcttcttttgcctttatatttgtgcagactcttgctaacctatctcatggcctctagactttcttttaccacactatggaaacaatgatctttcaaaaaaccaaaatctgatcatgatcatgccattcctatactgaaaacatacaatgttcttcaaaataaaacttaa

SEQ ID NO: 19227 - DNA, 2086 bp, Homo sapiens
ttatcactgagaagtggctgctcattcatcgactacatttccaaaaccctcctgcagttagctgtggccatgtaactgagttttagcaaaagattgtgagcaaaagtaatgtgtgccactttaaagcttggccttgagaactctcaggaaacgctaagctctttgacccttctcactgcttggaatggtggattcccaaggagaatctggaagatttttcttggattttatttccctttcaatggcctactctcagtgttggtgtctgagcttcctctgtgtggaacagaagatttttaaacctgtatatttatagcaaacaatgaatctctaaatagttcttcagatcttgaagtgttcccacttattaattaatttgagaaggttttgccagatctgagggagattttcatattttttcttctcatatggcaaagaagttctcaggcctatgaatttatagaaagaaagtgaaatctggcaagatcatcagagactgtttaattgggatttttgtgcttcagaaaacaagaaaatcaagctcagagatgaaatcaggtcttccaaacctcctgaaaggagtctccctgttctatattcaggaaggcattggtcacattgaggtccttttgggattctctagttttcatgtttcagtggtagacaagggagtgtttgaagcatcaagagcattttcagtgtcactattctctgtcttaactctcctgaagcaccaaccatgatcaagcttgcagtctgagtgtaagatgtagaaggagacagaaatgaaatgcagttacccaagaaatatttaaatacaattgtattaaatactgtgatggagagatacagactactgcgagtgtgtatataaaaacggggggtcctgatctggtcaggtggaatggggaaagcttccaggaggaagacaaatttaagctgagacctgaagggcgattagaaattgtgcaactgagggagacaattctattaatagcgctatatcccctagtgactggaatgtagggtttgagaccttgggctcaaagactgactgcctgaacaaaattctctcctttaccacacttttagctctgttttctgtgggcaagacactgaagttttctgtttctccagccctttgtatgaaattagggaataatactattaaggtattgtgctcttaaaccattatcacacaattttgataatcccatgtgaaacttaaatgcaataatgcatgtaaagcattttaacagtgccaaacactcagtaaacaatcaacaaatattggctattattattgcaggattctgcagcttacaaaacattttcataggcatcatacattatctcatcaccaatgctttcctatagtactagttctcgggacacttcctctgctgatggtactatgattctatttggagaaaataagcaaatgctgtgaacccctttttagctttattaggggctaggagtattctgtgggagaatcgagacagagcttgggtctcggagtccccaagtatattcaagaatcctcctatgtagactggaagtttaccaatacttaaaattctagcagtgtcttagatgaatagaggcacacatttaaaggactaggttacattaaggattttgaaaacatgacatttatggtttaactgctcctcaggaatcatgtcctcaaactgttcaataatgatgtaagatgggtgaacaaacaatttaagcttcactctaaaataatctcggcgggagcacaatattgtaaacagtcattgctgcatctccattctgtgaagttccctttcattgttgtccatttattcctttaaactaaaagtctttgaccaagttacttagcatcttctaacaattcttaaaagttcttctaaagaaattcagcgtaaggcggtgtgagctattacactgactataaagaatgtcatttctattgaaaagagcaaactttccactaaacacatttgaccttcttctatctggtattgtggctcatctgagaatagggatggtggctgtattagttcattctcatgctgctaataaagacgtacccgag

SEQ ID NO: 19228 - protein, 63 aa, Homo sapiens
MCATLKLGLENSQETLSSLTLLTAWNGGFPRRIWKIFLGFYFPFNGLLSVLVSELPLCGTEDF

SEQ ID NO: 19229 - DNA, 813 bp, Homo sapiens
aaaaccctcctgcagttagctgtggccatgtaactgagttttagcaaaagattgtgagcaaaagtaatgtgtgccactttaaagcttggccttgagaactctcaggaaacgctaagctctttgacccttctcactgcttggaatggtggattcccaaggagaatctggaagaaaaacagaggggaaataaagaaacaatacttggcaaaccatgacagagatcttgcctagccgtccactgataagttcttcaatcaatctctttgaaagcaaataattggataccccttgactgagaagaggatttttaaagatccagtcactaaacttcttcattttctcaacactaacaccgatatttaaatcatccatttgtttgacatcccagagactgttaaaaaagaagcaaggaaacatggtaaaatagagatggatgagaagcaagactttaccaacttttttgagcttcagtttctgtgtaaaattgggataacagtgtacctatctcttatgtttattgtgagatattataaatgagttatgtatctatcatagcaatactaagaaccacccaagacgtagctattaaatgatgcactcgggcctgatttaggcagttaaccttaccttaccttactaaaggtgagtagggcacacaatggccaaatataaaacaggcagcacaatcaagattttcttatacatcacattttgaggtagaattttatctagtggtaacatctaatctctttggggaggagattggctaaggttaggttgggtgtcaggactctagaagcatgggcttaggta

SEQ ID NO: 19230 - protein, 54 aa, Homo sapiens
MCATLKLGLENSQETLSSLTLLTAWNGGFPRRIWKKNRGEIKKQYLANHDRDLA

SEQ ID NO: 19231 - DNA, 3241 bp, Homo sapiens
aatttagagaagatgtagggagtgttcaacatgttcgttgtggaagagaaagagctaagagagaggagcttaaagacacaaacgggtagaatcaaggagtgtgctctcaaatgagaggaacaggagtgacattaaccttgaaatgctcggagactctactccttcatgacagtaggaggataattaacaatagatacaaatgcaggaattgatgagtgccatcagaaagctgtatcatgagctgcctgcacttctaaagtgtccagtggatttttaatcacatgagcctggaaatagggttatgagaagaagctcagagcagagcaccgaaagtggccactaccagcatgaagagcccaacaattcaaactggtgaagtgagaaaaacagaatgcagctttcaaggttcgtttcaagcagttggcttgtgggactctgagagatgctgctgcccatgacatgcgggaattatcatgatcaactacccagcttggatttcacccagtggccaagagctttgtgtgggagacggcaagggttggatttttcaaaagagtaaaccaggataaatcatgaggaacctataacccttttggccacatgcaaaaaagcaagacccgtgaccaaggtgtagactaagaagtggagtcatgcttcacacggccatatcatgctggcagccattcctgggtctggctgtggtgttaatcttcatgggatccaccattggctgccccgctcgctgtgagtgctctgcccagaacaaatctgttagctgtcacagaaggcgattgatcgccatcccagagggcattcccatcgaaaccaaaatcttggacctcagtaaaaacaggctaaaaagcgtcaaccctgaagaattcatatcatatcctctgctggaagagatagacttgagtgacaacatcattgccaatgtggaaccaggagcattcaacaatctctttaacctgcgttccctccgcctaaaaggcaatcgtctaaagctggtccctttgggagtattcacggggctgtccaatctcactaagcttgacattagtgagaataagattgtcattttactagactacatgttccaagatctacataacctgaagtctctagaagtgggggacaatgatttggtttatatatcacacagggcattcagtgggcttcttagcttggagcagctcaccctggagaaatgcaacttaacagcagtaccaacagaagccctctcccacctccgcagcctcatcagcctgcatctgaagcatctcaatatcaacaatatgcctgtgtatgcctttaaaagattgttccacctgaaacacctagagattgactattggcctttactggatatgatgcctgccaatagcctctacggtctcaacctcacatccctttcagtcaccaacaccaatctgtctactgtacccttccttgcctttaaacacctggtatacctgactcaccttaacctctcctacaatcccatcagcactattgaagcaggcatgttctctgacctgatccgccttcaggagcttcatatagtgggggcccagcttcgcaccattgagcctcactccttccaagggctccgcttcctacgcgtgctcaatgtgtctcagaacctgctggaaactttggaagagaatgtcttctcctcccctagggctctggaggtcttgagcattaacaacaaccctctggcctgtgactgccgccttctctggatcttgcagcgacagcccaccctgcagtttggtggccagcaacctatgtgtgctggcccagacaccatccgtgagaggtctttcaaggatttccatagcactgccctttctttttactttacctgcaaaaaacccaaaatccgtgaaaagaagttgcagcatctgctagtagatgaagggcagacagtccagctagaatgcagtgcagatggagacccgcagcctgtgatttcctgggtgacaccccgaaggcgtttcatcaccaccaagtccaatggaagagccaccgtgttgggtgatggcaccttggaaatccgctttgcccaggatcaagacagcgggatgtatgtttgcatcgctagcaatgctgctgggaatgataccttcacagcctccttaactgtgaaaggattcgcttcagatcgttttctttatgcgaacaggacccctatgtacatgaccgactccaatgacaccatttccaatggcaccaatgccaatactttttccctggaccttaaaacaatactggtgtctacagctatgggctgcttcacattcctgggagtggttttattttgttttcttctcctttttgtgtggagccgagggaaaggcaagcacaaaaacagcattgaccttgagtatgtgcccagaaaaaacaatggtgctgttgtggaaggggaggtagctggacccaggaggttcaacatgaaaatgatttgaaggcccacccctcacattactgtctctttgtcaatgtgggtaatcagtaagacagtatggcacagtaaattactagattaagaggcagccatgtgcagctgcccctgtatcaaaagcagggtctatggaagcaggaggacttccaatggagactctccatcgaaaggcaggcaggcaggcatgtgtcagagcccttcacacagtgggatactaagtgtttgcgttgcaaatattggcgttctggggatctcagtaatgaacctgaatatttggctcacactcacggacaattattcagcattttctaccactgcaaaaaacaaaagaaaaaataaaaaagaacaacctacagtgtaggatttacatattaaaaagacacatttgtctaaaacatactctacagaaaaatttgtatctatgattatcatttgttaaagccttgcatcataccatattgttggttcagtaccacaaagagatcaatatattcttttcttccttttttgaaacatatatgctgtacatgttttaaagcaatatgaatgagaggttgtgcttttagttactcaccactatagatccaagtgtgatttcaccttccgttacctacagatgaccctgagactagatccctggagttatgggcggagatattttgagagatgtgtttgtctgatgtaggatgccaagaaacaggacccaaggcaaaactgctcaactctgttaacttctgttactataaataaaggcatgtgcctagttttgataca

SEQ ID NO: 19232 - protein, 36 aa, Homo sapiens
MKSPTIQTGEVRKTECSFQGSFQAVGLWDSERCCCP

SEQ ID NO: 19233 - DNA, 781 bp, Homo sapiens
cacatcctgattttattccctcctttttccaacatacgtagaagagtacttgtgtttaactttgaatgtttcaagaaacccaaaacttaacaccatgtcttatgacagaggcatttactgctaagtacccatgcactatcccaaatcatgtcactgcactccagtctgggcaacagagtgagactccgtctcaaaaaaaaaaataatttgatcctcataaaattcagcattccaaagaattgggggtaggaaacttgagccccactttgagatggggtggattcctcttgagatactctacagcacacatactcttgaccttttcatgtatctctgtctcctaatttggcaggaaatataggaaaaggaacaagggaaaaacatagtgacagccaggaatattgaatgtcaccttataatctgaaaatatgtggtagaattagtttggatgttttcccactatatagaagaagtgacttgttcaggaagaagaaatccacatccccttcaaatgtctagttcttggtctacacatgggaacaatacatggtgactggttaataaccaatggtccacacctaggagtctgccaggacccactagtctggctaaataaggtggttattgtatatcttctggtgaagagttctccagttgggtgtggtggctcacacctgtaatctcagcactttgagaggctgagtctggctgatggcttgagctcaggagtttgagaccaggctggtcaacatggcgaaacctcatctctacaaaaaatacc

SEQ ID NO: 19234 - protein, 46 aa, Homo sapiens [sequence omitted]

SEQ ID NO: 19235 - DNA, 4564 bp, Homo sapiens
cggaacccggtcgaaagggtcctctctggcgtccttctgcttccgtgggtttctggataggctgcgttttgttctcaggggatgcaagttcttcctttcagggttgaagcgtgagagaggttggtttttgaaacgggagtgtttcaggttattgaggtccaaaaagaaataaagtttttgtttacgtctgtatggcttgtaagatatctcccggggccaattcagcatctctacctggccatcctaacaaggtgatttgtgaaagggtgagacttcagagcctgttccctctcctcccaagtgatcagaacactaccgttcaagaggatgctcacttcaaagctttcttccagagtgaagatagtccaagtcctaagagacagcgcctctctcattcagtctttgattatacatcagcatcaccagctccctcaccaccaatgcgaccatgggagatgacatcaaataggcagcccccttcagttcgaccaagccaacatcacttctcaggggaacgatgcaacacacctgcacgcaacagaagaagtcctcctgtcaggcgccagagaggaagaagggatcgtctgtctcgacataattccattagtcaagatgaaaactatcaccatctcccttacgcacagcagcaagcaatagaggagcctcgagccttccaccctccgaatgtatctccccgtctgctacatcctgctgctcatccaccccagcagaatgcagtcatggttgacatacatgatcagctccatcaaggaacagtccctgtttcttacacagtaacaacagtggcaccacatgggattccactctgcacaggccagcacatccctgcttgtagtacacagcaggtcccaggatgctctgtggttttcagtggacagcacctccctgtctgtagtgtgcctcctccaatgcttcaggcatgttcagttcagcacttaccagtaccatatgctgcattcccaccccttatttctagtgatccatttcttatacatcctcctcacctttctccccatcatcctcctcatttgccaccaccaggccagtttgtccctttccaaacacagcaatcacgatcgcctctgcaaaggatagaaaatgaagtggaactcttaggagaacatcttccagtaggaggttttacttaccctccatcagcccaccccccaacattacctccatcagctcccttgcagttcttaacacatgatcctttgcatcaggaggtgtcctttggagtaccttatcctccatttatgcctcggaggcttacaggacgtagtagataccgatcccagcagccaataccacctcccccttatcatcccagcttactgccatatgtgttatcaatgcttccagtgccacctgcagtgggcccaactttcagctttgaattagatgtagaagatggagaagtagaaaattacgaggccctgttaaacctggcagagcgactgggagaggcaaagcctcgtggactgactaaagcagatattgaacaacttccttcttatcggttcaatcctaacaaccaccagtcagaacagactttgtgtgtagtatgcatgtgtgattttgagtcaaggcagctacttagagtcttaccctgtaaccacgagttccatgccaagtgtgttgacaaatggcttaaggcaaatcgtacttgcccaatttgccgagctgatgcttcagaagtgcatcgggattcagaatgaccaacctaagaagcacaaatttagtttgggtgttcctcatcacatgtatatacggactatccattgaacttaatctgtgtggcttccagccctccctttaccaaaagggtcaatggacctttctttgcactgtgtgacttaatcaactataaaagcttacaattagtcttcacagttatgggattgttatactaaccgtgtgattggaactccaaagactttttctttagcttaattttgtgtgtgcactaacattccctggtttttgtgtgatcattccgagtgttgctgcaagattacagtggacgtgatcttttagcatgtgcttttataaaaagtggtagctacagatgatatagcaatctaccttatatagagccttcagaaactgtgagtggaaatgaatgcgcagcgtatgactgttggtgataagtgtatctgtgtgagtgtgtgcaactacttgtgtgagggcatggtagctaacgtgtgtatgagatcctatataccagcatgtaccaagaatgtgtgtgtagttttaattatgctgcaatgtataatctggtgtgttatttaaacagcactagtactgtacactggtttttttcccttgtgtttgctgttgcacactgattgctgagggtgcatcaattacaagcattgaatactccatccccttccctcccagtgaatggaatgagaaaagccttcttcctttgcttcaggcagctgtcaccttctctttattggtggtcctaagtgggtcacttaagaaaaaaaagtgtaacaaattctcgctccatgaacctggtttttttttattctgttgtggaaatttttaaatctccaacttgctgtttccaaaaagaaggtgcaatatcatatatcatcagttagcaatattagcatttcaatcagtgatttgaatgttgatacttttttttcctttacatttccagtaagtttcttacagaaagtacctgtgattttttttaatgtttagatttgtagtctagtctattctgaagatatttgattaatatatttctaagaagaccactagtcccatgaagtctcaccttgttgacttccaccagaacaaaacctgttaattcagcttgacttctcatatgtgttctgtgttcaagctcctgtgggcaactcaattgttttaagaaaactctatttctgttcatattaattcacttgccagactccaattctgaaagttgtctagttcttccttcatcacacgtgcttctcatcgaaaccctggtttcaggatggatcaagtgctgttacagctcatgttccttagacctgatttgttttgatattttactgcctttccttttaatttttgtttgaatgagaaaagtttaatacaacaggtgtccagaatacttgcagtataaatgaagatttggtttttgtataaaaaaataatgctgttaaacaggagttgaccttcatttagttgatgtaatacatagctgtatggggttttttttagtaagttctttgagcataattcactttaaagtcatttttccagcaatgtttaaattactttctcattcttttagtgtattcaacattgtctgcctcttcctgcagttgatgtaattgctttgtttgcaatagcacaagctgcattattccagtcaggactgtgataacttgctgccagccccactcaactttcagttggctctgtgtcagttttccattcagtgttaactacttgttactgccatgctgcttgccctcccttgaagtgtctataagctcatcacagcctagagttaagtaaagtcaattcacagaagcacaattttgccctttgcgagacattgttgcctctatctagtcctacaagtagggttttgcatactgtgtttgcccctagggttgtcagtgcatcagaaatacttctaaatagtggtaaaaatgcacatggttaatgcacatgttacttttaaatcattaggatatccctcacctgttcctgatgaataaaaagtgtgttaaagaccaaaattcttggcataataatcagctacatacaaatcacatatagtttaatcttttttaatgaaaaaaaatcatgtttaaaatggcaaaagcccatcttatacacttttatatagctgcaaaaaatttcttaactcagctgtgggttttttgtgggttcttgtttgttttttggcatgaattgtcatctttggtgtttttttaacccccagcccctcaaaaaaataaggcctccaggtatcaagatctcatattaggattttctgtccttaattttttgagcaaaatctggaaaatgtgaaagcatatttagattttatatactatctgaaatgtgatttgttaagattcttaaatttgggcctcttagaataattttgaatgagatctaccgactcacttgtgagaatatttttcacagattatctttgggccttttcattagaaagctgtttgtttgtccccctgttggtacatttggttacctcattttgccgtttcagattgtgaaagctcacaggggtgttttttggaatcatttgctgagtcattttctcaaatcatattccattgtatcagttaacatatagttttaaatgtatgtattataaatatctgtaaccaaatcatttgaaggcttgataaatttttaacaaagtttgtacattttttatgaaagttactagtaatgctttactaagtagtgcaatgaatttttatttttaatccctgtgcccaattttggagttgagagggttgttggtaataaatgtatgatgtacacttaaaacatc

SEQ ID NO: 19236 - protein, 515 aa, Homo sapiens; identical to SEQ ID NO: 2346

SEQ ID NO: 19237 - DNA, 4414 bp, Homo sapiens
cggaacccggtcgaaagggtcctctctggcgtccttctgcttccgtgggtttctggataggctgcgttttgttctcaggggatgcaagttcttcctttcagggttgaagcgtgagagaggttggtttttgaaacgggagtgtttcaggttattgaggtccaaaaagaaataaagtttttgtttacgtctgtatggcttgtaagagtgaagatagtccaagtcctaagagacagcgcctctctcattcagtctttgattatacatcagcatcaccagctccctcaccaccaatgcgaccatgggagatgacatcaaataggcagcccccttcagttcgaccaagccaacatcacttctcaggggaacgatgcaacacacctgcacgcaacagaagaagtcctcctgtcaggcgccagagaggaagaagggatcgtctgtctcgacataattccattagtcaagatgaaaactatcaccatctcccttacgcacagcagcaagcaatagaggagcctcgagccttccaccctccgaatgtatctccccgtctgctacatcctgctgctcatccaccccagcagaatgcagtcatggttgacatacatgatcagctccatcaaggaacagtccctgtttcttacacagtaacaacagtggcaccacatgggattccactctgcacaggccagcacatccctgcttgtagtacacagcaggtcccaggatgctctgtggttttcagtggacagcacctccctgtctgtagtgtgcctcctccaatgcttcaggcatgttcagttcagcacttaccagtaccatatgctgcattcccaccccttatttctagtgatccatttcttatacatcctcctcacctttctccccatcatcctcctcatttgccaccaccaggccagtttgtccctttccaaacacagcaatcacgatcgcctctgcaaaggatagaaaatgaagtggaactcttaggagaacatcttccagtaggaggttttacttaccctccatcagcccaccccccaacattacctccatcagctcccttgcagttcttaacacatgatcctttgcatcaggaggtgtcctttggagtaccttatcctccatttatgcctcggaggcttacaggacgtagtagataccgatcccagcagccaataccacctcccccttatcatcccagcttactgccatatgtgttatcaatgcttccagtgccacctgcagtgggcccaactttcagctttgaattagatgtagaagatggagaagtagaaaattacgaggccctgttaaacctggcagagcgactgggagaggcaaagcctcgtggactgactaaagcagatattgaacaacttccttcttatcggttcaatcctaacaaccaccagtcagaacagactttgtgtgtagtatgcatgtgtgattttgagtcaaggcagctacttagagtcttaccctgtaaccacgagttccatgccaagtgtgttgacaaatggcttaaggcaaatcgtacttgcccaatttgccgagctgatgcttcagaagtgcatcgggattcagaatgaccaacctaagaagcacaaatttagtttgggtgttcctcatcacatgtatatacggactatccattgaacttaatctgtgtggcttccagccctccctttaccaaaagggtcaatggacctttctttgcactgtgtgacttaatcaactataaaagcttacaattagtcttcacagttatgggattgttatactaaccgtgtgattggaactccaaagactttttctttagcttaattttgtgtgtgcactaacattccctggtttttgtgtgatcattccgagtgttgctgcaagattacagtggacgtgatcttttagcatgtgcttttataaaaagtggtagctacagatgatatagcaatctaccttatatagagccttcagaaactgtgagtggaaatgaatgcgcagcgtatgactgttggtgataagtgtatctgtgtgagtgtgtgcaactacttgtgtgagggcatggtagctaacgtgtgtatgagatcctatataccagcatgtaccaagaatgtgtgtgtagttttaattatgctgcaatgtataatctggtgtgttatttaaacagcactagtactgtacactggtttttttcccttgtgtttgctgttgcacactgattgctgagggtgcatcaattacaagcattgaatactccatccccttccctcccagtgaatggaatgagaaaagccttcttcctttgcttcaggcagctgtcaccttctctttattggtggtcctaagtgggtcacttaagaaaaaaaagtgtaacaaattctcgctccatgaacctggtttttttttattctgttgtggaaatttttaaatctccaacttgctgtttccaaaaagaaggtgcaatatcatatatcatcagttagcaatattagcatttcaatcagtgatttgaatgttgatacttttttttcctttacatttccagtaagtttcttacagaaagtacctgtgattttttttaatgtttagatttgtagtctagtctattctgaagatatttgattaatatatttctaagaagaccactagtcccatgaagtctcaccttgttgacttccaccagaacaaaacctgttaattcagcttgacttctcatatgtgttctgtgttcaagctcctgtgggcaactcaattgttttaagaaaactctatttctgttcatattaattcacttgccagactccaattctgaaagttgtctagttcttccttcatcacacgtgcttctcatcgaaaccctggtttcaggatggatcaagtgctgttacagctcatgttccttagacctgatttgttttgatattttactgcctttccttttaatttttgtttgaatgagaaaagtttaatacaacaggtgtccagaatacttgcagtataaatgaagatttggtttttgtataaaaaaataatgctgttaaacaggagttgaccttcatttagttgatgtaatacatagctgtatggggttttttttagtaagttctttgagcataattcactttaaagtcatttttccagcaatgtttaaattactttctcattcttttagtgtattcaacattgtctgcctcttcctgcagttgatgtaattgctttgtttgcaatagcacaagctgcattattccagtcaggactgtgataacttgctgccagccccactcaactttcagttggctctgtgtcagttttccattcagtgttaactacttgttactgccatgctgcttgccctcccttgaagtgtctataagctcatcacagcctagagttaagtaaagtcaattcacagaagcacaattttgccctttgcgagacattgttgcctctatctagtcctacaagtagggttttgcatactgtgtttgcccctagggttgtcagtgcatcagaaatacttctaaatagtggtaaaaatgcacatggttaatgcacatgttacttttaaatcattaggatatccctcacctgttcctgatgaataaaaagtgtgttaaagaccaaaattcttggcataataatcagctacatacaaatcacatatagtttaatcttttttaatgaaaaaaaatcatgtttaaaatggcaaaagcccatcttatacacttttatatagctgcaaaaaatttcttaactcagctgtgggttttttgtgggttcttgtttgttttttggcatgaattgtcatctttggtgtttttttaacccccagcccctcaaaaaaataaggcctccaggtatcaagatctcatattaggattttctgtccttaattttttgagcaaaatctggaaaatgtgaaagcatatttagattttatatactatctgaaatgtgatttgttaagattcttaaatttgggcctcttagaataattttgaatgagatctaccgactcacttgtgagaatatttttcacagattatctttgggccttttcattagaaagctgtttgtttgtccccctgttggtacatttggttacctcattttgccgtttcagattgtgaaagctcacaggggtgttttttggaatcatttgctgagtcattttctcaaatcatattccattgtatcagttaacatatagttttaaatgtatgtattataaatatctgtaaccaaatcatttgaaggcttgataaatttttaacaaagtttgtacattttttatgaaagttactagtaatgctttactaagtagtgcaatgaatttttatttttaatccctgtgcccaattttggagttgagagggttgttggtaataaatgtatgatgtacacttaaaacatc

SEQ ID NO: 19238 - protein, 465 aa, Homo sapiens; identical to SEQ ID NO: 2350

SEQ ID NO: 19239 - DNA, 5176 bp, Homo sapiens
ccgggccgggcccctagtgcggtgttgcgggacggggccgaggcccggtcggttggggcgtgggggcggagaggatggagcctccgaggcgttaggcgactctgtcatctctgggcgtgcagccgtcgtttcctggcgcggcccgtgtgatggtgccgggaggaaggaagcgcagtgacagtgcctaagttggagccggggttccgggggtgaggaggcccgcggacggcggatctggcgagctggccgcgggctgggcgagcagtcacaataggaggcggcggcccagcgaggatccgcgggagctgcccggcagggcggagcctcccctcgcagagtgaagatagtccaagtcctaagagacagcgcctctctcattcagtctttgattatacatcagcatcaccagctccctcaccaccaatgcgaccatgggagatgacatcaaataggcagcccccttcagttcgaccaagccaacatcacttctcaggggaacgatgcaacacacctgcacgcaacagaagaaggttacctataagcatattgccagattttctcccagaaacaggctgtgccaagcagatgcagtttttaacaataatctagcaggatttcagttacagagtcctcctgtcaggcgccagagaggaagaagggatcgtctgtctcgacataattccattagtcaagatgaaaactatcaccatctcccttacgcacagcagcaagcaatagaggagcctcgagccttccaccctccgaatgtatctccccgtctgctacatcctgctgctcatccaccccagcagaatgcagtcatggttgacatacatgatcagctccatcaaggaacagtccctgtttcttacacagtaacaacagtggcaccacatgggattccactctgcacaggccagcacatccctgcttgtagtacacagcaggtcccaggatgctctgtggttttcagtggacagcacctccctgtctgtagtgtgcctcctccaatgcttcaggcatgttcagttcagcacttaccagtaccatatgctgcattcccaccccttatttctagtgatccatttcttatacatcctcctcacctttctccccatcatcctcctcatttgccaccaccaggccagtttgtccctttccaaacacagcaatcacgatcgcctctgcaaaggatagaaaatgaagtggaactcttaggagaacatcttccagtaggaggttttacttaccctccatcagcccaccccccaacattacctccatcagctcccttgcagttcttaacacatgatcctttgcatcaggaggtgtcctttggagtaccttatcctccatttatgcctcggaggcttacaggacgtagtagataccgatcccagcagccaataccacctcccccttatcatcccagcttactgccatatgtgttatcaatgcttccagtgccacctgcagtgggcccaactttcagctttgaattagatgtagaagatggagaagtagaaaattacgaggccctgttaaacctggcagagcgactgggagaggcaaagcctcgtggactgactaaagcagatattgaacaacttccttcttatcggttcaatcctaacaaccaccagtcagaacagactttgtgtgtagtatgcatgtgtgattttgagtcaaggcagctacttagagtcttaccctgtaaccacgagttccatgccaagtgtgttgacaaatggcttaaggcaaatcgtacttgcccaatttgccgagctgatgcttcagaagtgcatcgggattcagaatgaccaacctaagaagcacaaatttagtttgggtgttcctcatcacatgtatatacggactatccattgaacttaatctgtgtggcttccagccctccctttaccaaaagggtcaatggacctttctttgcactgtgtgacttaatcaactataaaagcttacaattagtcttcacagttatgggattgttatactaaccgtgtgattggaactccaaagactttttctttagcttaattttgtgtgtgcactaacattccctggtttttgtgtgatcattccgagtgttgctgcaagattacagtggacgtgatcttttagcatgtgcttttataaaaagtggtagctacagatgatatagcaatctaccttatatagagccttcagaaactgtgagtggaaatgaatgcgcagcgtatgactgttggtgataagtgtatctgtgtgagtgtgtgcaactacttgtgtgagggcatggtagctaacgtgtgtatgagatcctatataccagcatgtaccaagaatgtgtgtgtagttttaattatgctgcaatgtataatctggtgtgttatttaaacagcactagtactgtacactggtttttttcccttgtgtttgctgttgcacactgattgctgagggtgcatcaattacaagcattgaatactccatccccttccctcccagtgaatggaatgagaaaagccttcttcctttgcttcaggcagctgtcaccttctctttattggtggtcctaagtgggtcacttaagaaaaaaaagtgtaacaaattctcgctccatgaacctggtttttttttattctgttgtggaaatttttaaatctccaacttgctgtttccaaaaagaaggtgcaatatcatatatcatcagttagcaatattagcatttcaatcagtgatttgaatgttgatacttttttttcctttacatttccagtaagtttcttacagaaagtacctgtgattttttttaatgtttagatttgtagtctagtctattctgaagatatttgattaatatatttctaagaagaccactagtcccatgaagtctcaccttgttgacttccaccagaacaaaacctgttaattcagcttgacttctcatatgtgttctgtgttcaagctcctgtgggcaactcaattgttttaagaaaactctatttctgttcatattaattcacttgccagactccaattctgaaagttgtctagttcttccttcatcacacgtgcttctcatcgaaaccctggtttcaggatggatcaagtgctgttacagctcatgttccttagacctgatttgttttgatattttactgcctttccttttaatttttgtttgaatgagaaaagtttaatacaacaggtgtccagaatacttgcagtataaatgaagatttggtttttgtataaaaaaataatgctgttaaacaggagttgaccttcatttagttgatgtaatacatagctgtatggggttttttttagtaagttctttgagcataattcactttaaagtcatttttccagcaatgtttaaattactttctcattcttttagtgtattcaacattgtctgcctcttcctgcagttgatgtaattgctttgtttgcaatagcacaagctgcattattccagtcaggactgtgataacttgctgccagccccactcaactttcagttggctctgtgtcagttttccattcagtgttaactacttgttactgccatgctgcttgccctcccttgaagtgtctataagctcatcacagcctagagttaagtaaagtcaattcacagaagcacaattttgccctttgcgagacattgttgcctctatctagtcctacaagtagggttttgcatactgtgtttgcccctagggttgtcagtgcatcagaaatacttctaaatagtggtaaaaatgcacatggttaatgcacatgttacttttaaatcattaggatatccctcacctgttcctgatgaataaaaagtgtgttaaagaccaaaattcttggcataataatcagctacatacaaatcacatatagtttaatcttttttaatgaaaaaaaatcatgtttaaaatggcaaaagcccatcttatacacttttatatagctgcaaaaaatttatatctgtacagatctaacactacgacactcagtattcattttattgaagcatgcaagtaaagcactttttctaatttatatagaggtatctaattaacacagcacattgtactaatgactaggagtagcagctttttcttctctccctctatgaattcttataatgtccctttttctgtaagtttttgagaggcaattggcaatttaggaggcagcagggtctgttttggtcaaatcttgaatttcgttgttgcactctagtgactgatctttgggaatgtcttgtctttgcatggggctcatagagatgtgtgcagacttgcttattgtggttagtgtgtatcaggaacacacacacaggtgttctgaccagctcaggcttgccacagtgagcaactctgtggctagcaaaagagaagtttatttgtgcccagccattggtcaccttgggtgatgcaccagatagcaggcagatgttggttcattggccttcgtcctctttcctcctaaaataatattggctttaccatcttaactcagctgtgggttttttgtgggttcttgtttgttttttggcatgaattgtcatctttggtgtttttttaacccccagcccctcaaaaaaataaggcctccaggtatcaagatctcatattaggattttctgtccttaattttttgagcaaaatctggaaaatgtgaaagcatatttagattttatatactatctgaaatgtgatttgttaagattcttaaatttgggcctcttagaataattttgaatgagatctaccgactcacttgtgagaatatttttcacagattatctttgggccttttcattagaaagctgtttgtttgtccccctgttggtacatttggttacctcattttgccgtttcagattgtgaaagctcacaggggtgttttttggaatcatttgctgagtcattttctcaaatcatattccattgtatcagttaacatatagttttaaatgtatgtattataaatatctgtaaccaaatcatttgaaggcttgataaatttttaacaaagtttgtacattttttatgaaagttactagtaatgctttactaagtagtgcaatgaatttttatttttaatccctgtgcccaattttggagttgagagggttgttggtaataaatgtatgatgtacacttaaaacatc

SEQ ID NO: 19240 - protein, 439 aa, Homo sapiens
MQHTCTQQKKVTYKHIARFSPRNRLCQADAVFNNNLAGFQLQSPPVRRQRGRRDRLSRHNSISQDENYHHLPYAQQQAIEEPRAFHPPNVSPRLLHPAAHPPQQNAVMVDIHDQLHQGTVPVSYTVTTVAPHGIPLCTGQHIPACSTQQVPGCSVVFSGQHLPVCSVPPPMLQACSVQHLPVPYAAFPPLISSDPFLIHPPHLSPHHPPHLPPPGQFVPFQTQQSRSPLQRIENEVELLGEHLPVGGFTYPPSAHPPTLPPSAPLQFLTHDPLHQEVSFGVPYPPFMPRRLTGRSRYRSQQPIPPPPYHPSLLPYVLSMLPVPPAVGPTFSFELDVEDGEVENYEALLNLAERLGEAKPRGLTKADIEQLPSYRFNPNNHQSEQTLCVVCMCDFESRQLLRVLPCNHEFHAKCVDKWLKANRTCPICRADASEVHRDSE

SEQ ID NO: 19241 - DNA, 4731 bp, Homo sapiens
gcggcggggcgcggcggggcggggaggggcgtggccgggccgggcccctagtgcggtgttgcgggacggggccgaggcccggtcggttggggcgtgggggcggagaggatggagcctccgaggcgttaggcgactctgtcatctctgggcgtgcagccgtcgtttcctggcgcggcccgtgtgatggtgccgggaggaaggaagcgcagtgacagtgcctaagttggagccggggttccgggggtgaggaggcccgcggacggcggatctggcgagctggccgcgggctgggcgagcagtcacaataggaggcggcggcccagcgaggatccgcgggagctgcccggcagggcggagcctcccctcgcagatatctcccggggccaattcagcatctctacctggccatcctaacaaggtgatttgtgaaagggtgagacttcagagcctgttccctctcctcccaagtgatcagaacactaccgttcaagaggatgctcacttcaaagctttcttccagagtgaagatagtccaagtcctaagagacagcgcctctctcattcagtctttgattatacatcagcatcaccagctccctcaccaccaatgcgaccatgggagatgacatcaaataggcagcccccttcagttcgaccaagccaacatcacttctcaggggaacgatgcaacacacctgcacgcaacagaagaagtcctcctgtcaggcgccagagaggaagaagggatcgtctgtctcgacataattccattagtcaagatgaaaactatcaccatctcccttacgcacagcagcaagcaatagaggagcctcgagccttccaccctccgaatgtatctccccgtctgctacatcctgctgctcatccaccccagcagaatgcagtcatggttgacatacatgatcagctccatcaaggaacagtccctgtttcttacacagtaacaacagtggcaccacatgggattccactctgcacaggccagcacatccctgcttgtagtacacagcaggtcccaggatgctctgtggttttcagtggacagcacctccctgtctgtagtgtgcctcctccaatgcttcaggcatgttcagttcagcacttaccagtaccatatgctgcattcccaccccttatttctagtgatccatttcttatacatcctcctcacctttctccccatcatcctcctcatttgccaccaccaggccagtttgtccctttccaaacacagcaatcacgatcgcctctgcaaaggatagaaaatgaagtggaactcttaggagaacatcttccagtaggaggttttacttaccctccatcagcccaccccccaacattacctccatcagctcccttgcagttcttaacacatgatcctttgcatcaggaggtgtcctttggagtaccttatcctccatttatgcctcggaggcttacaggacgtagtagataccgatcccagcagccaataccacctcccccttatcatcccagcttactgccatatgtgttatcaatgcttccagtgccacctgcagtgggcccaactttcagctttgaattagatgtagaagatggagaagtagaaaattacgaggccctgttaaacctggcagagcgactgggagaggcaaagcctcgtggactgactaaagcagatattgaacaacttccttcttatcggttcaatcctaacaaccaccagtcagaacagactttgtgtgtagtatgcatgtgtgattttgagtcaaggcagctacttagagtcttaccctgtaaccacgagttccatgccaagtgtgttgacaaatggcttaaggcaaatcgtacttgcccaatttgccgagctgatgcttcagaagtgcatcgggattcagaatgaccaacctaagaagcacaaatttagtttgggtgttcctcatcacatgtatatacggactatccattgaacttaatctgtgtggcttccagccctccctttaccaaaagggtcaatggacctttctttgcactgtgtgacttaatcaactataaaagcttacaattagtcttcacagttatgggattgttatactaaccgtgtgattggaactccaaagactttttctttagcttaattttgtgtgtgcactaacattccctggtttttgtgtgatcattccgagtgttgctgcaagattacagtggacgtgatcttttagcatgtgcttttataaaaagtggtagctacagatgatatagcaatctaccttatatagagccttcagaaactgtgagtggaaatgaatgcgcagcgtatgactgttggtgataagtgtatctgtgtgagtgtgtgcaactacttgtgtgagggcatggtagctaacgtgtgtatgagatcctatataccagcatgtaccaagaatgtgtgtgtagttttaattatgctgcaatgtataatctggtgtgttatttaaacagcactagtactgtacactggtttttttcccttgtgtttgctgttgcacactgattgctgagggtgcatcaattacaagcattgaatactccatccccttccctcccagtgaatggaatgagaaaagccttcttcctttgcttcaggcagctgtcaccttctctttattggtggtcctaagtgggtcacttaagaaaaaaaagtgtaacaaattctcgctccatgaacctggtttttttttattctgttgtggaaatttttaaatctccaacttgctgtttccaaaaagaaggtgcaatatcatatatcatcagttagcaatattagcatttcaatcagtgatttgaatgttgatacttttttttcctttacatttccagtaagtttcttacagaaagtacctgtgattttttttaatgtttagatttgtagtctagtctattctgaagatatttgattaatatatttctaagaagaccactagtcccatgaagtctcaccttgttgacttccaccagaacaaaacctgttaattcagcttgacttctcatatgtgttctgtgttcaagctcctgtgggcaactcaattgttttaagaaaactctatttctgttcatattaattcacttgccagactccaattctgaaagttgtctagttcttccttcatcacacgtgcttctcatcgaaaccctggtttcaggatggatcaagtgctgttacagctcatgttccttagacctgatttgttttgatattttactgcctttccttttaatttttgtttgaatgagaaaagtttaatacaacaggtgtccagaatacttgcagtataaatgaagatttggtttttgtataaaaaaataatgctgttaaacaggagttgaccttcatttagttgatgtaatacatagctgtatggggttttttttagtaagttctttgagcataattcactttaaagtcatttttccagcaatgtttaaattactttctcattcttttagtgtattcaacattgtctgcctcttcctgcagttgatgtaattgctttgtttgcaatagcacaagctgcattattccagtcaggactgtgataacttgctgccagccccactcaactttcagttggctctgtgtcagttttccattcagtgttaactacttgttactgccatgctgcttgccctcccttgaagtgtctataagctcatcacagcctagagttaagtaaagtcaattcacagaagcacaattttgccctttgcgagacattgttgcctctatctagtcctacaagtagggttttgcatactgtgtttgcccctagggttgtcagtgcatcagaaatacttctaaatagtggtaaaaatgcacatggttaatgcacatgttacttttaaatcattaggatatccctcacctgttcctgatgaataaaaagtgtgttaaagaccaaaattcttggcataataatcagctacatacaaatcacatatagtttaatcttttttaatgaaaaaaaatcatgtttaaaatggcaaaagcccatcttatacacttttatatagctgcaaaaaatttcttaactcagctgtgggttttttgtgggttcttgtttgttttttggcatgaattgtcatctttggtgtttttttaacccccagcccctcaaaaaaataaggcctccaggtatcaagatctcatattaggattttctgtccttaattttttgagcaaaatctggaaaatgtgaaagcatatttagattttatatactatctgaaatgtgatttgttaagattcttaaatttgggcctcttagaataattttgaatgagatctaccgactcacttgtgagaatatttttcacagattatctttgggccttttcattagaaagctgtttgtttgtccccctgttggtacatttggttacctcattttgccgtttcagattgtgaaagctcacaggggtgttttttggaatcatttgctgagtcattttctcaaatcatattccattgtatcagttaacatatagttttaaatgtatgtattataaatatctgtaaccaaatcatttgaaggcttgataaatttttaacaaagtttgtacattttttatgaaagttactagtaatgctttactaagtagtgcaatgaatttttatttttaatccctgtgcccaattttggagttgagagggttgttggtaataaatgtatgatgtacacttaaaacatc

SEQ ID NO: 19242 - protein, 432 aa, Homo sapiens; identical to SEQ ID NO: 2348

SEQ ID NO: 19243 - DNA, 4601 bp, Homo sapiens
gaggcggggtgaggcggggtgcggcggggcgcggcggggcggggaggggcgtggccgggccgggcccctagtgcggtgttgcgggacggggccgaggcccggtcggttggggcgtgggggcggagaggatggagcctccgaggcgttaggcgactctgtcatctctgggcgtgcagccgtcgtttcctggcgcggcccgtgtgatggtgccgggaggaaggaagcgcagtgacagtgcctaagttggagccggggttccgggggtgaggaggcccgcggacggcggatctggcgagctggccgcgggctgggcgagcagtcacaataggaggcggcggcccagcgaggatccgcgggagctgcccggcagggcggagcctcccctcgcagagtgaagatagtccaagtcctaagagacagcgcctctctcattcagtctttgattatacatcagcatcaccagctccctcaccaccaatgcgaccatgggagatgacatcaaataggcagcccccttcagttcgaccaagccaacatcacttctcaggggaacgatgcaacacacctgcacgcaacagaagaagtcctcctgtcaggcgccagagaggaagaagggatcgtctgtctcgacataattccattagtcaagatgaaaactatcaccatctcccttacgcacagcagcaagcaatagaggagcctcgagccttccaccctccgaatgtatctccccgtctgctacatcctgctgctcatccaccccagcagaatgcagtcatggttgacatacatgatcagctccatcaaggaacagtccctgtttcttacacagtaacaacagtggcaccacatgggattccactctgcacaggccagcacatccctgcttgtagtacacagcaggtcccaggatgctctgtggttttcagtggacagcacctccctgtctgtagtgtgcctcctccaatgcttcaggcatgttcagttcagcacttaccagtaccatatgctgcattcccaccccttatttctagtgatccatttcttatacatcctcctcacctttctccccatcatcctcctcatttgccaccaccaggccagtttgtccctttccaaacacagcaatcacgatcgcctctgcaaaggatagaaaatgaagtggaactcttaggagaacatcttccagtaggaggttttacttaccctccatcagcccaccccccaacattacctccatcagctcccttgcagttcttaacacatgatcctttgcatcaggaggtgtcctttggagtaccttatcctccatttatgcctcggaggcttacaggacgtagtagataccgatcccagcagccaataccacctcccccttatcatcccagcttactgccatatgtgttatcaatgcttccagtgccacctgcagtgggcccaactttcagctttgaattagatgtagaagatggagaagtagaaaattacgaggccctgttaaacctggcagagcgactgggagaggcaaagcctcgtggactgactaaagcagatattgaacaacttccttcttatcggttcaatcctaacaaccaccagtcagaacagactttgtgtgtagtatgcatgtgtgattttgagtcaaggcagctacttagagtcttaccctgtaaccacgagttccatgccaagtgtgttgacaaatggcttaaggcaaatcgtacttgcccaatttgccgagctgatgcttcagaagtgcatcgggattcagaatgaccaacctaagaagcacaaatttagtttgggtgttcctcatcacatgtatatacggactatccattgaacttaatctgtgtggcttccagccctccctttaccaaaagggtcaatggacctttctttgcactgtgtgacttaatcaactataaaagcttacaattagtcttcacagttatgggattgttatactaaccgtgtgattggaactccaaagactttttctttagcttaattttgtgtgtgcactaacattccctggtttttgtgtgatcattccgagtgttgctgcaagattacagtggacgtgatcttttagcatgtgcttttataaaaagtggtagctacagatgatatagcaatctaccttatatagagccttcagaaactgtgagtggaaatgaatgcgcagcgtatgactgttggtgataagtgtatctgtgtgagtgtgtgcaactacttgtgtgagggcatggtagctaacgtgtgtatgagatcctatataccagcatgtaccaagaatgtgtgtgtagttttaattatgctgcaatgtataatctggtgtgttatttaaacagcactagtactgtacactggtttttttcccttgtgtttgctgttgcacactgattgctgagggtgcatcaattacaagcattgaatactccatccccttccctcccagtgaatggaatgagaaaagccttcttcctttgcttcaggcagctgtcaccttctctttattggtggtcctaagtgggtcacttaagaaaaaaaagtgtaacaaattctcgctccatgaacctggtttttttttattctgttgtggaaatttttaaatctccaacttgctgtttccaaaaagaaggtgcaatatcatatatcatcagttagcaatattagcatttcaatcagtgatttgaatgttgatacttttttttcctttacatttccagtaagtttcttacagaaagtacctgtgattttttttaatgtttagatttgtagtctagtctattctgaagatatttgattaatatatttctaagaagaccactagtcccatgaagtctcaccttgttgacttccaccagaacaaaacctgttaattcagcttgacttctcatatgtgttctgtgttcaagctcctgtgggcaactcaattgttttaagaaaactctatttctgttcatattaattcacttgccagactccaattctgaaagttgtctagttcttccttcatcacacgtgcttctcatcgaaaccctggtttcaggatggatcaagtgctgttacagctcatgttccttagacctgatttgttttgatattttactgcctttccttttaatttttgtttgaatgagaaaagtttaatacaacaggtgtccagaatacttgcagtataaatgaagatttggtttttgtataaaaaaataatgctgttaaacaggagttgaccttcatttagttgatgtaatacatagctgtatggggttttttttagtaagttctttgagcataattcactttaaagtcatttttccagcaatgtttaaattactttctcattcttttagtgtattcaacattgtctgcctcttcctgcagttgatgtaattgctttgtttgcaatagcacaagctgcattattccagtcaggactgtgataacttgctgccagccccactcaactttcagttggctctgtgtcagttttccattcagtgttaactacttgttactgccatgctgcttgccctcccttgaagtgtctataagctcatcacagcctagagttaagtaaagtcaattcacagaagcacaattttgccctttgcgagacattgttgcctctatctagtcctacaagtagggttttgcatactgtgtttgcccctagggttgtcagtgcatcagaaatacttctaaatagtggtaaaaatgcacatggttaatgcacatgttacttttaaatcattaggatatccctcacctgttcctgatgaataaaaagtgtgttaaagaccaaaattcttggcataataatcagctacatacaaatcacatatagtttaatcttttttaatgaaaaaaaatcatgtttaaaatggcaaaagcccatcttatacacttttatatagctgcaaaaaatttcttaactcagctgtgggttttttgtgggttcttgtttgttttttggcatgaattgtcatctttggtgtttttttaacccccagcccctcaaaaaaataaggcctccaggtatcaagatctcatattaggattttctgtccttaattttttgagcaaaatctggaaaatgtgaaagcatatttagattttatatactatctgaaatgtgatttgttaagattcttaaatttgggcctcttagaataattttgaatgagatctaccgactcacttgtgagaatatttttcacagattatctttgggccttttcattagaaagctgtttgtttgtccccctgttggtacatttggttacctcattttgccgtttcagattgtgaaagctcacaggggtgttttttggaatcatttgctgagtcattttctcaaatcatattccattgtatcagttaacatatagttttaaatgtatgtattataaatatctgtaaccaaatcatttgaaggcttgataaatttttaacaaagtttgtacattttttatgaaagttactagtaatgctttactaagtagtgcaatgaatttttatttttaatccctgtgcccaattttggagttgagagggttgttggtaataaatgtatgatgtacacttaaaacatc

SEQ ID NO: 19244 - protein, 432 aa, Homo sapiens; identical to SEQ ID NO: 2348

SEQ ID NO: 19245 - DNA, 4312 bp, Homo sapiens
cttccccctcggggtggaaacaaagggggttcggcgcgcggtgcggagcctgggggaaaagggaggagcgctccggtggtctggcgcgctgggctcgctagagtgaagatagtccaagtcctaagagacagcgcctctctcattcagtctttgattatacatcagcatcaccagctccctcaccaccaatgcgaccatgggagatgacatcaaataggcagcccccttcagttcgaccaagccaacatcacttctcaggggaacgatgcaacacacctgcacgcaacagaagaagtcctcctgtcaggcgccagagaggaagaagggatcgtctgtctcgacataattccattagtcaagatgaaaactatcaccatctcccttacgcacagcagcaagcaatagaggagcctcgagccttccaccctccgaatgtatctccccgtctgctacatcctgctgctcatccaccccagcagaatgcagtcatggttgacatacatgatcagctccatcaaggaacagtccctgtttcttacacagtaacaacagtggcaccacatgggattccactctgcacaggccagcacatccctgcttgtagtacacagcaggtcccaggatgctctgtggttttcagtggacagcacctccctgtctgtagtgtgcctcctccaatgcttcaggcatgttcagttcagcacttaccagtaccatatgctgcattcccaccccttatttctagtgatccatttcttatacatcctcctcacctttctccccatcatcctcctcatttgccaccaccaggccagtttgtccctttccaaacacagcaatcacgatcgcctctgcaaaggatagaaaatgaagtggaactcttaggagaacatcttccagtaggaggttttacttaccctccatcagcccaccccccaacattacctccatcagctcccttgcagttcttaacacatgatcctttgcatcaggaggtgtcctttggagtaccttatcctccatttatgcctcggaggcttacaggacgtagtagataccgatcccagcagccaataccacctcccccttatcatcccagcttactgccatatgtgttatcaatgcttccagtgccacctgcagtgggcccaactttcagctttgaattagatgtagaagatggagaagtagaaaattacgaggccctgttaaacctggcagagcgactgggagaggcaaagcctcgtggactgactaaagcagatattgaacaacttccttcttatcggttcaatcctaacaaccaccagtcagaacagactttgtgtgtagtatgcatgtgtgattttgagtcaaggcagctacttagagtcttaccctgtaaccacgagttccatgccaagtgtgttgacaaatggcttaaggcaaatcgtacttgcccaatttgccgagctgatgcttcagaagtgcatcgggattcagaatgaccaacctaagaagcacaaatttagtttgggtgttcctcatcacatgtatatacggactatccattgaacttaatctgtgtggcttccagccctccctttaccaaaagggtcaatggacctttctttgcactgtgtgacttaatcaactataaaagcttacaattagtcttcacagttatgggattgttatactaaccgtgtgattggaactccaaagactttttctttagcttaattttgtgtgtgcactaacattccctggtttttgtgtgatcattccgagtgttgctgcaagattacagtggacgtgatcttttagcatgtgcttttataaaaagtggtagctacagatgatatagcaatctaccttatatagagccttcagaaactgtgagtggaaatgaatgcgcagcgtatgactgttggtgataagtgtatctgtgtgagtgtgtgcaactacttgtgtgagggcatggtagctaacgtgtgtatgagatcctatataccagcatgtaccaagaatgtgtgtgtagttttaattatgctgcaatgtataatctggtgtgttatttaaacagcactagtactgtacactggtttttttcccttgtgtttgctgttgcacactgattgctgagggtgcatcaattacaagcattgaatactccatccccttccctcccagtgaatggaatgagaaaagccttcttcctttgcttcaggcagctgtcaccttctctttattggtggtcctaagtgggtcacttaagaaaaaaaagtgtaacaaattctcgctccatgaacctggtttttttttattctgttgtggaaatttttaaatctccaacttgctgtttccaaaaagaaggtgcaatatcatatatcatcagttagcaatattagcatttcaatcagtgatttgaatgttgatacttttttttcctttacatttccagtaagtttcttacagaaagtacctgtgattttttttaatgtttagatttgtagtctagtctattctgaagatatttgattaatatatttctaagaagaccactagtcccatgaagtctcaccttgttgacttccaccagaacaaaacctgttaattcagcttgacttctcatatgtgttctgtgttcaagctcctgtgggcaactcaattgttttaagaaaactctatttctgttcatattaattcacttgccagactccaattctgaaagttgtctagttcttccttcatcacacgtgcttctcatcgaaaccctggtttcaggatggatcaagtgctgttacagctcatgttccttagacctgatttgttttgatattttactgcctttccttttaatttttgtttgaatgagaaaagtttaatacaacaggtgtccagaatacttgcagtataaatgaagatttggtttttgtataaaaaaataatgctgttaaacaggagttgaccttcatttagttgatgtaatacatagctgtatggggttttttttagtaagttctttgagcataattcactttaaagtcatttttccagcaatgtttaaattactttctcattcttttagtgtattcaacattgtctgcctcttcctgcagttgatgtaattgctttgtttgcaatagcacaagctgcattattccagtcaggactgtgataacttgctgccagccccactcaactttcagttggctctgtgtcagttttccattcagtgttaactacttgttactgccatgctgcttgccctcccttgaagtgtctataagctcatcacagcctagagttaagtaaagtcaattcacagaagcacaattttgccctttgcgagacattgttgcctctatctagtcctacaagtagggttttgcatactgtgtttgcccctagggttgtcagtgcatcagaaatacttctaaatagtggtaaaaatgcacatggttaatgcacatgttacttttaaatcattaggatatccctcacctgttcctgatgaataaaaagtgtgttaaagaccaaaattcttggcataataatcagctacatacaaatcacatatagtttaatcttttttaatgaaaaaaaatcatgtttaaaatggcaaaagcccatcttatacacttttatatagctgcaaaaaatttcttaactcagctgtgggttttttgtgggttcttgtttgttttttggcatgaattgtcatctttggtgtttttttaacccccagcccctcaaaaaaataaggcctccaggtatcaagatctcatattaggattttctgtccttaattttttgagcaaaatctggaaaatgtgaaagcatatttagattttatatactatctgaaatgtgatttgttaagattcttaaatttgggcctcttagaataattttgaatgagatctaccgactcacttgtgagaatatttttcacagattatctttgggccttttcattagaaagctgtttgtttgtccccctgttggtacatttggttacctcattttgccgtttcagattgtgaaagctcacaggggtgttttttggaatcatttgctgagtcattttctcaaatcatattccattgtatcagttaacatatagttttaaatgtatgtattataaatatctgtaaccaaatcatttgaaggcttgataaatttttaacaaagtttgtacattttttatgaaagttactagtaatgctttactaagtagtgcaatgaatttttatttttaatccctgtgcccaattttggagttgagagggttgttggtaataaatgtatgatgtacacttaaaacatc

SEQ ID NO: 19246 - protein, 432 aa, Homo sapiens; identical to SEQ ID NO: 2348

SEQ ID NO: 19247 - DNA, 4462 bp, Homo sapiens
cttccccctcggggtggaaacaaagggggttcggcgcgcggtgcggagcctgggggaaaagggaggagcgctccggtggtctggcgcgctgggctcgctagatatctcccggggccaattcagcatctctacctggccatcctaacaaggtgatttgtgaaagggtgagacttcagagcctgttccctctcctcccaagtgatcagaacactaccgttcaagaggatgctcacttcaaagctttcttccagagtgaagatagtccaagtcctaagagacagcgcctctctcattcagtctttgattatacatcagcatcaccagctccctcaccaccaatgcgaccatgggagatgacatcaaataggcagcccccttcagttcgaccaagccaacatcacttctcaggggaacgatgcaacacacctgcacgcaacagaagaagtcctcctgtcaggcgccagagaggaagaagggatcgtctgtctcgacataattccattagtcaagatgaaaactatcaccatctcccttacgcacagcagcaagcaatagaggagcctcgagccttccaccctccgaatgtatctccccgtctgctacatcctgctgctcatccaccccagcagaatgcagtcatggttgacatacatgatcagctccatcaaggaacagtccctgtttcttacacagtaacaacagtggcaccacatgggattccactctgcacaggccagcacatccctgcttgtagtacacagcaggtcccaggatgctctgtggttttcagtggacagcacctccctgtctgtagtgtgcctcctccaatgcttcaggcatgttcagttcagcacttaccagtaccatatgctgcattcccaccccttatttctagtgatccatttcttatacatcctcctcacctttctccccatcatcctcctcatttgccaccaccaggccagtttgtccctttccaaacacagcaatcacgatcgcctctgcaaaggatagaaaatgaagtggaactcttaggagaacatcttccagtaggaggttttacttaccctccatcagcccaccccccaacattacctccatcagctcccttgcagttcttaacacatgatcctttgcatcaggaggtgtcctttggagtaccttatcctccatttatgcctcggaggcttacaggacgtagtagataccgatcccagcagccaataccacctcccccttatcatcccagcttactgccatatgtgttatcaatgcttccagtgccacctgcagtgggcccaactttcagctttgaattagatgtagaagatggagaagtagaaaattacgaggccctgttaaacctggcagagcgactgggagaggcaaagcctcgtggactgactaaagcagatattgaacaacttccttcttatcggttcaatcctaacaaccaccagtcagaacagactttgtgtgtagtatgcatgtgtgattttgagtcaaggcagctacttagagtcttaccctgtaaccacgagttccatgccaagtgtgttgacaaatggcttaaggcaaatcgtacttgcccaatttgccgagctgatgcttcagaagtgcatcgggattcagaatgaccaacctaagaagcacaaatttagtttgggtgttcctcatcacatgtatatacggactatccattgaacttaatctgtgtggcttccagccctccctttaccaaaagggtcaatggacctttctttgcactgtgtgacttaatcaactataaaagcttacaattagtcttcacagttatgggattgttatactaaccgtgtgattggaactccaaagactttttctttagcttaattttgtgtgtgcactaacattccctggtttttgtgtgatcattccgagtgttgctgcaagattacagtggacgtgatcttttagcatgtgcttttataaaaagtggtagctacagatgatatagcaatctaccttatatagagccttcagaaactgtgagtggaaatgaatgcgcagcgtatgactgttggtgataagtgtatctgtgtgagtgtgtgcaactacttgtgtgagggcatggtagctaacgtgtgtatgagatcctatataccagcatgtaccaagaatgtgtgtgtagttttaattatgctgcaatgtataatctggtgtgttatttaaacagcactagtactgtacactggtttttttcccttgtgtttgctgttgcacactgattgctgagggtgcatcaattacaagcattgaatactccatccccttccctcccagtgaatggaatgagaaaagccttcttcctttgcttcaggcagctgtcaccttctctttattggtggtcctaagtgggtcacttaagaaaaaaaagtgtaacaaattctcgctccatgaacctggtttttttttattctgttgtggaaatttttaaatctccaacttgctgtttccaaaaagaaggtgcaatatcatatatcatcagttagcaatattagcatttcaatcagtgatttgaatgttgatacttttttttcctttacatttccagtaagtttcttacagaaagtacctgtgattttttttaatgtttagatttgtagtctagtctattctgaagatatttgattaatatatttctaagaagaccactagtcccatgaagtctcaccttgttgacttccaccagaacaaaacctgttaattcagcttgacttctcatatgtgttctgtgttcaagctcctgtgggcaactcaattgttttaagaaaactctatttctgttcatattaattcacttgccagactccaattctgaaagttgtctagttcttccttcatcacacgtgcttctcatcgaaaccctggtttcaggatggatcaagtgctgttacagctcatgttccttagacctgatttgttttgatattttactgcctttccttttaatttttgtttgaatgagaaaagtttaatacaacaggtgtccagaatacttgcagtataaatgaagatttggtttttgtataaaaaaataatgctgttaaacaggagttgaccttcatttagttgatgtaatacatagctgtatggggttttttttagtaagttctttgagcataattcactttaaagtcatttttccagcaatgtttaaattactttctcattcttttagtgtattcaacattgtctgcctcttcctgcagttgatgtaattgctttgtttgcaatagcacaagctgcattattccagtcaggactgtgataacttgctgccagccccactcaactttcagttggctctgtgtcagttttccattcagtgttaactacttgttactgccatgctgcttgccctcccttgaagtgtctataagctcatcacagcctagagttaagtaaagtcaattcacagaagcacaattttgccctttgcgagacattgttgcctctatctagtcctacaagtagggttttgcatactgtgtttgcccctagggttgtcagtgcatcagaaatacttctaaatagtggtaaaaatgcacatggttaatgcacatgttacttttaaatcattaggatatccctcacctgttcctgatgaataaaaagtgtgttaaagaccaaaattcttggcataataatcagctacatacaaatcacatatagtttaatcttttttaatgaaaaaaaatcatgtttaaaatggcaaaagcccatcttatacacttttatatagctgcaaaaaatttcttaactcagctgtgggttttttgtgggttcttgtttgttttttggcatgaattgtcatctttggtgtttttttaacccccagcccctcaaaaaaataaggcctccaggtatcaagatctcatattaggattttctgtccttaattttttgagcaaaatctggaaaatgtgaaagcatatttagattttatatactatctgaaatgtgatttgttaagattcttaaatttgggcctcttagaataattttgaatgagatctaccgactcacttgtgagaatatttttcacagattatctttgggccttttcattagaaagctgtttgtttgtccccctgttggtacatttggttacctcattttgccgtttcagattgtgaaagctcacaggggtgttttttggaatcatttgctgagtcattttctcaaatcatattccattgtatcagttaacatatagttttaaatgtatgtattataaatatctgtaaccaaatcatttgaaggcttgataaatttttaacaaagtttgtacattttttatgaaagttactagtaatgctttactaagtagtgcaatgaatttttatttttaatccctgtgcccaattttggagttgagagggttgttggtaataaatgtatgatgtacacttaaaacatc

SEQ ID NO: 19248 - protein, 432 aa, Homo sapiens; identical to SEQ ID NO: 2348

SEQ ID NO: 19249 - DNA, 1878 bp, Homo sapiens
ttctgcttccgtgggtttctggataggctgcgttttgttctcaggggatgcaagttcttcctttcagggttgaagcgtgagagaggttggtttttgaaacgggagtgtttcaggttattgaggtccaaaaagaaataaagtttttgtttacgtctgtatggcttgtaagatatctcccggggccaattcagcatctctacctggccatcctaacaaggtgatttgtgaaagggtgagacttcagagcctgttccctctcctcccaagtgatcagaacactaccgttcaagaggatgctcacttcaaagctttcttccagagtgaagatagtccaagtcctaagagacagcgcctctctcattcagtctttgattatacatcagcatcaccagctccctcaccaccaatgcgaccatgggagatgacatcaaataggcagcccccttcagttcgaccaagccaacatcacttctcaggggaacgatgcaacacacctgcacgcaacagaagaagtcctcctgtcaggcgccagagaggaagaagggatcgtctgtctcgacataattccattagtcaagatgaaaactatcaccatctcccttacgcacagcagcaagcaatagaggagcctcgagccttccaccctccgaatgtatctccccgtctgctacatcctgctgctcatccaccccagcagaatgcagtcatggttgacatacatgatcagctccatcaaggaacagtccctgtttcttacacagtaacaacagtggcaccacatgggattccactctgcacaggccagcacatccctgcttgtagtacacagcaggtcccaggatgctctgtggttttcagtggacagcacctccctgtctgtagtgtgcctcctccaatgcttcaggcatgttcagttcagcacttaccagtaccatatgctgcattcccaccccttatttctagtgatccatttcttatacatcctcctcacctttctccccatcatcctcctcatttgccaccaccaggccagtttgtccctttccaaacacagcaatcacgatcgcctctgcaaaggatagaaaatgaagtggaactcttaggagaacatcttccagtaggaggttttacttaccctccatcagcccaccccccaacattacctccatcagctcccttgcagttcttaacacatgatcctttgcatcaggaggtgtcctttggagtaccttatcctccatttatgcctcggaggcttacaggacgtagtagataccgatcccagcagccaataccacctcccccttatcatcccagcttactgccatatgtgttatcaatgcttccagtgccacctgcagtgggcccaactttcagctttgaattagatgtagaagatggagaagtagaaaattacgaggccctgttaaacctggcagagcgactgggagaggcaaagcctcgtggactgactaaagcagatattgaacaacttccttcttatcggttcaatcctaacaaccaccagtcagaacagactttgtgtgtagtatgcatgtgtgattttgagtcaaggcagctacttagagtcttaccctgtaaccacgagttccatgccaagtgtgttgacaaatggcttaaggcaaatcgtacttgcccaatttgccgagctgatgcttcagaagtgcatcgggattcagaatgaccaacctaagaagcacaaatttagtttgggtgttcctcatcacatgtatatacggactatccattgaacttaatctgtgtggcttccagccctccctttaccaaaagggtcaatggacctttctttgcactgtgtgacttaatcaactataaaagcttacaattagtcttcac

SEQ ID NO: 19250 - protein, 515 aa, Homo sapiens; identical to SEQ ID NO: 2346

SEQ ID NO: 19251 - DNA, 1762 bp, Homo sapiens
cggaacccggtcgaaagggtcctctctggcgtccttctgcttccgtgggtttctggataggctgcgttttgttctcaggggatgcaagttcttcctttcagggttgaagcgtgagagaggttggtttttgaaacgggagtgtttcaggttattgaggtccaaaaagaaataaagtttttgtttacgtctgtatggcttgtaagagtgaagatagtccaagtcctaagagacagcgcctctctcattcagtctttgattatacatcagcatcaccagctccctcaccaccaatgcgaccatgggagatgacatcaaataggcagcccccttcagttcgaccaagccaacatcacttctcaggggaacgatgcaacacacctgcacgcaacagaagaagtcctcctgtcaggcgccagagaggaagaagggatcgtctgtctcgacataattccattagtcaagatgaaaactatcaccatctcccttacgcacagcagcaagcaatagaggagcctcgagccttccaccctccgaatgtatctccccgtctgctacatcctgctgctcatccaccccagcagaatgcagtcatggttgacatacatgatcagctccatcaaggaacagtccctgtttcttacacagtaacaacagtggcaccacatgggattccactctgcacaggccagcacatccctgcttgtagtacacagcaggtcccaggatgctctgtggttttcagtggacagcacctccctgtctgtagtgtgcctcctccaatgcttcaggcatgttcagttcagcacttaccagtaccatatgctgcattcccaccccttatttctagtgatccatttcttatacatcctcctcacctttctccccatcatcctcctcatttgccaccaccaggccagtttgtccctttccaaacacagcaatcacgatcgcctctgcaaaggatagaaaatgaagtggaactcttaggagaacatcttccagtaggaggttttacttaccctccatcagcccaccccccaacattacctccatcagctcccttgcagttcttaacacatgatcctttgcatcaggaggtgtcctttggagtaccttatcctccatttatgcctcggaggcttacaggacgtagtagataccgatcccagcagccaataccacctcccccttatcatcccagcttactgccatatgtgttatcaatgcttccagtgccacctgcagtgggcccaactttcagctttgaattagatgtagaagatggagaagtagaaaattacgaggccctgttaaacctggcagagcgactgggagaggcaaagcctcgtggactgactaaagcagatattgaacaacttccttcttatcggttcaatcctaacaaccaccagtcagaacagactttgtgtgtagtatgcatgtgtgattttgagtcaaggcagctacttagagtcttaccctgtaaccacgagttccatgccaagtgtgttgacaaatggcttaaggcaaatcgtacttgcccaatttgccgagctgatgcttcagaagtgcatcgggattcagaatgaccaacctaagaagcacaaatttagtttgggtgttcctcatcacatgtatatacggactatccattgaacttaatctgtgtggcttccagccctccctttaccaaaagggtcaatggacctttctttgcactgtgtgacttaatcaactataaaagcttacaattagtcttcac

SEQ ID NO: 19252 - protein, 465 aa, Homo sapiens; identical to SEQ ID NO: 2350

SEQ ID NO: 19253 - DNA, 2045 bp, Homo sapiens
ccgggccgggcccctagtgcggtgttgcgggacggggccgaggcccggtcggttggggcgtgggggcggagaggatggagcctccgaggcgttaggcgactctgtcatctctgggcgtgcagccgtcgtttcctggcgcggcccgtgtgatggtgccgggaggaaggaagcgcagtgacagtgcctaagttggagccggggttccgggggtgaggaggcccgcggacggcggatctggcgagctggccgcgggctgggcgagcagtcacaataggaggcggcggcccagcgaggatccgcgggagctgcccggcagggcggagcctcccctcgcagatatctcccggggccaattcagcatctctacctggccatcctaacaaggtgatttgtgaaagggtgagacttcagagcctgttccctctcctcccaagtgatcagaacactaccgttcaagaggatgctcacttcaaagctttcttccagagtgaagatagtccaagtcctaagagacagcgcctctctcattcagtctttgattatacatcagcatcaccagctccctcaccaccaatgcgaccatgggagatgacatcaaataggcagcccccttcagttcgaccaagccaacatcacttctcaggggaacgatgcaacacacctgcacgcaacagaagaagtcctcctgtcaggcgccagagaggaagaagggatcgtctgtctcgacataattccattagtcaagatgaaaactatcaccatctcccttacgcacagcagcaagcaatagaggagcctcgagccttccaccctccgaatgtatctccccgtctgctacatcctgctgctcatccaccccagcagaatgcagtcatggttgacatacatgatcagctccatcaaggaacagtccctgtttcttacacagtaacaacagtggcaccacatgggattccactctgcacaggccagcacatccctgcttgtagtacacagcaggtcccaggatgctctgtggttttcagtggacagcacctccctgtctgtagtgtgcctcctccaatgcttcaggcatgttcagttcagcacttaccagtaccatatgctgcattcccaccccttatttctagtgatccatttcttatacatcctcctcacctttctccccatcatcctcctcatttgccaccaccaggccagtttgtccctttccaaacacagcaatcacgatcgcctctgcaaaggatagaaaatgaagtggaactcttaggagaacatcttccagtaggaggttttacttaccctccatcagcccaccccccaacattacctccatcagctcccttgcagttcttaacacatgatcctttgcatcaggaggtgtcctttggagtaccttatcctccatttatgcctcggaggcttacaggacgtagtagataccgatcccagcagccaataccacctcccccttatcatcccagcttactgccatatgtgttatcaatgcttccagtgccacctgcagtgggcccaactttcagctttgaattagatgtagaagatggagaagtagaaaattacgaggccctgttaaacctggcagagcgactgggagaggcaaagcctcgtggactgactaaagcagatattgaacaacttccttcttatcggttcaatcctaacaaccaccagtcagaacagactttgtgtgtagtatgcatgtgtgattttgagtcaaggcagctacttagagtcttaccctgtaaccacgagttccatgccaagtgtgttgacaaatggcttaaggcaaatcgtacttgcccaatttgccgagctgatgcttcagaagtgcatcgggattcagaatgaccaacctaagaagcacaaatttagtttgggtgttcctcatcacatgtatatacggactatccattgaacttaatctgtgtggcttccagccctccctttaccaaaagggtcaatggacctttctttgcactgtgtgacttaatcaactataaaagcttacaattagtcttcac

SEQ ID NO: 19254 - protein, 432 aa, Homo sapiens; identical to SEQ ID NO: 2348

SEQ ID NO: 19255 - DNA, 1993 bp, Homo sapiens
ccgggccgggcccctagtgcggtgttgcgggacggggccgaggcccggtcggttggggcgtgggggcggagaggatggagcctccgaggcgttaggcgactctgtcatctctgggcgtgcagccgtcgtttcctggcgcggcccgtgtgatggtgccgggaggaaggaagcgcagtgacagtgcctaagttggagccggggttccgggggtgaggaggcccgcggacggcggatctggcgagctggccgcgggctgggcgagcagtcacaataggaggcggcggcccagcgaggatccgcgggagctgcccggcagggcggagcctcccctcgcagagtgaagatagtccaagtcctaagagacagcgcctctctcattcagtctttgattatacatcagcatcaccagctccctcaccaccaatgcgaccatgggagatgacatcaaataggcagcccccttcagttcgaccaagccaacatcacttctcaggggaacgatgcaacacacctgcacgcaacagaagaaggttacctataagcatattgccagattttctcccagaaacaggctgtgccaagcagatgcagtttttaacaataatctagcaggatttcagttacagagtcctcctgtcaggcgccagagaggaagaagggatcgtctgtctcgacataattccattagtcaagatgaaaactatcaccatctcccttacgcacagcagcaagcaatagaggagcctcgagccttccaccctccgaatgtatctccccgtctgctacatcctgctgctcatccaccccagcagaatgcagtcatggttgacatacatgatcagctccatcaaggaacagtccctgtttcttacacagtaacaacagtggcaccacatgggattccactctgcacaggccagcacatccctgcttgtagtacacagcaggtcccaggatgctctgtggttttcagtggacagcacctccctgtctgtagtgtgcctcctccaatgcttcaggcatgttcagttcagcacttaccagtaccatatgctgcattcccaccccttatttctagtgatccatttcttatacatcctcctcacctttctccccatcatcctcctcatttgccaccaccaggccagtttgtccctttccaaacacagcaatcacgatcgcctctgcaaaggatagaaaatgaagtggaactcttaggagaacatcttccagtaggaggttttacttaccctccatcagcccaccccccaacattacctccatcagctcccttgcagttcttaacacatgatcctttgcatcaggaggtgtcctttggagtaccttatcctccatttatgcctcggaggcttacaggacgtagtagataccgatcccagcagccaataccacctcccccttatcatcccagcttactgccatatgtgttatcaatgcttccagtgccacctgcagtgggcccaactttcagctttgaattagatgtagaagatggagaagtagaaaattacgaggccctgttaaacctggcagagcgactgggagaggcaaagcctcgtggactgactaaagcagatattgaacaacttccttcttatcggttcaatcctaacaaccaccagtcagaacagactttgtgtgtagtatgcatgtgtgattttgagtcaaggcagctacttagagtcttaccctgtaaccacgagttccatgccaagtgtgttgacaaatggcttaaggcaaatcgtacttgcccaatttgccgagctgatgcttcagaagtgcatcgggattcagaatgaccaacctaagaagcacaaatttagtttgggtgttcctcatcacatgtatatacggactatccattgaacttaatctgtgtggcttccagccctccctttaccaaaagggtcaatggacctttctttgcactgtgtgacttaatcaactataaaagcttacaattagtcttcac

SEQ ID NO: 19256 - protein, 439 aa, Homo sapiens; identical to SEQ ID NO: 19240

SEQ ID NO: 19257 - DNA, 2484 bp, Homo sapiens
agatttgattcccttggcgggcggaagcggccacaacccggcgatcgaaaagattcttaggaacgccgtaccagccgcgtctctcaggacagcaggcccctgtccttctgtcgggcgccgctcagccgtgccctccgcccctcaggttctttttctaattccaaataaacttgcaagaggactatgaaagattatgatgaacttctcaaatattatgaattacatgaaactattgggacaggtggctttgcaaaggtcaaacttgcctgccatatccttactggagagatggtagctataaaaatcatggataaaaacacactagggagtgatttgccccggatcaaaacggagattgaggccttgaagaacctgagacatcagcatatatgtcaactctaccatgtgctagagacagccaacaaaatattcatggttcttgagtactgccctggaggagagctgtttgactatataatttcccaggatcgcctgtcagaagaggagacccgggttgtcttccgtcagatagtatctgctgttgcttatgtgcacagccagggctatgctcacagggacctcaagccagaaaatttgctgtttgatgaatatcataaattaaagctgattgactttggtctctgtgcaaaacccaagggtaacaaggattaccatctacagacatgctgtgggagtctggcttatgcagcacctgagttaatacaaggcaaatcatatcttggatcagaggcagatgtttggagcatgggcatactgttatatgttcttatgtgtggatttctaccatttgatgatgataatgtaatggctttatacaagaagattatgagaggaaaatatgatgttcccaagtggctctctcccagtagcattctgcttcttcaacaaatgctgcaggtggacccaaagaaacggatttctatgaaaaatctattgaaccatccctggatcatgcaagattacaactatcctgttgagtggcaaagcaagaatccttttattcacctcgatgatgattgcgtaacagaactttctgtacatcacagaaacaacaggcaaacaatggaggatttaatttcactgtggcagtatgatcacctcacggctacctatcttctgcttctagccaagaaggctcggggaaaaccagttcgtttaaggctttcttctttctcctgtggacaagccagtgctaccccattcacagacatcaagtcaaataattggagtctggaagatgtgaccgcaagtgataaaaattatgtggcgggattaatagactatgattggtgtgaagatgatttatcaacaggtgctgctactccccgaacatcacagtttaccaagtactggacagaatcaaatggggtggaatctaaatcattaactccagccttatgcagaacacctgcaaataaattaaagaacaaagaaaatgtatatactcctaagtctgctgtaaagaatgaagagtactttatgtttcctgagccaaagactccagttaataagaaccagcataagagagaaatactcactacgccaaatcgttacactacaccctcaaaagctagaaaccagtgcctgaaagaaactccaattaaaataccagtaaattcaacaggaacagacaagttaatgacaggtgtcattagccctgagaggcggtgccgctcagtggaattggatctcaaccaagcacatatggaggagactccaaaaagaaagggagccaaagtgtttgggagccttgaaagggggttggataaggttatcactgtgctcaccaggagcaaaaggaagggttctgccagagacgggcccagaagactaaagcttcactataacgtgactacaactagattagtgaatccagatcaactgttgaatgaaataatgtctattcttccaaagaagcatgttgactttgtacaaaagggttatacactgaagtgtcaaacacagtcagattttgggaaagtgacaatgcaatttgaattagaagtgtgccagcttcaaaaacccgatgtggtgggtatcaggaggcagcggcttaagggcgatgcctgggtttacaaaagattagtggaagacatcctatctagctgcaaggtataattgatggattcttccatcctgccggatgagtgtgggtgtgatacagcctacataaagactgttatgatcgctttgattttaaagttcattggaactaccaacttgtttctaaagagctatcttaagaccaatatctctttgtttttaaacaaaagatattattttgtgtatgaatctaaatcaagcccatctgtcattatgttactgtcttttttaatcatgtggttttgtatattaataattgttgactttcttagattcacttccatatgtgaatgtaagctcttaactatgtctctttgtaatgtgtaatttctttctgaaataaaaccatttgtgaatata

SEQ ID NO: 19258 - protein, 651 aa, Homo sapiens; identical to SEQ ID NO: 2356

SEQ ID NO: 19259 - DNA, 3126 bp, Homo sapiens
acccaggtccatctgctcttcataaatatcacaggaattgatttgagactttatcttggccttagccaaagaagtcacagttcctgtttttattatttcagttttatgccttaaccaaaatgatttatgaatgagaacaacaaaaagaatgaaccacactaatttaccaaatcctaaactcaacacattatgtataaagtgttccaaggaatttttgagccaaaccaaatttcatccccccaaattacctatcgaactaattcaaaccagaaatcagctttgatatgttccacaacaatggaagcagggtatgacatatttcctaaagtgttactgcatttgacttaggacccttgaaggatagaaagaaaacagaaataactattcattttgtaatttatgttttaaggaaaagttactaattggaggaatatcccttttggccatgagctgatttgaggaattttgtaagtttttgagaataagtctaactacatggattggtttctgttttgtgcaggttactgtttttgtatctcaaagccaaaagccacaggcatggccacagttactgttcatctcagggatgtgaaagagtcaagatccaagcagccacagactcaaaggacatcagtaactgcatggccaaagcatacccacagtactacagaaagccgtcagtggtcaagcggatgccggccatgctcactggactctgtcaaggctgtggcactcggcaggtggtgtttactagtgatcctcataaaagttacctccctgtgcaattccagtcacctgataaagcagaaacccagcgtggagacccgtctgttatttctgtcaatggcactgactttaccttccgaagtgcaggcgtcctcctccttgttgtggatccgtgcagcgttccattccgcttgacggaaaaaacggtttttcctcttgctgatgtcagtcgcattgaagagtatttaaaaacaggcatccctccaaggtccattgttctgttgagcacaagaggagaaataaagcagttaaacatttcacacttactagtacctctgggattagccaaaccagctcatctttatgacaaagggagtaccatatttttgggattcagtggaaactttaaaccatcatggactaagctatttaccagtcctgctggacagggccttggggtgcttgaacaattcatacctttgcagctggacgaatatggttgtcccagagccaccactgtccgcagaagagacctggaactgctaaagcaagcttcaaaagcacattagagactaactgtaacttaagtgctgggggaaaaaaaatgtgaactaacttatttaatttatggcattttaaaatgacactgttaacccaacggaaccattttccagtttgatacagaatggggagaaaagaaagcgtttgaaattattgcttggataccagcttcatgcaccttctagttgtacaaaatgttaaagacgttgtttgtatttgtaaggctggtgtattcagagagcagatctcttattcctcactttccacccccgtattttgtaatgaccatgagcaatgtttttactttttgtataatggggtggggtggagtgggggcttctgagagtcagcctgaggtctttagaggaccagctattgtagcaccttggatacttgaagtttaatgctcagttgggtcgggtggcagttgacttggtggctggcatgttcagcagtgcctggggccctgtttctgggcagcctttgaggattttctatgatattgaatgacagttttaagtggcaactcaggcccagctcatgcccttttttgcctggacatgtgctatttttattcacttatatatcaattacttgtaagggttaaactttcaaacaggaagtatattgggacaaaagggctcttggggattagatatccctttaatctgtgaccattgggcaaaaaattttcctgcagcaaaagtctgaggctgttgggaccatttttgcagctttaatccttagcctcttttgactgtatatttgtgtttaaaatgcagagctcaactgaatatttccttttttgttttgttttgttttgttttaagaagtaggttgttttcctgaaccgtaaacttgtatcattttaacttgcacaaaggaagtctgttcttggtattgctcttgcacttgggttttttgttattgttttgtgtggattttttaaagcttttctgttcaccctcctgccaggaaaatcccagaaagcttaatgataccccaaaatgattacacccagggaggaaaaaaaggagcgctttctagggtcagaatcgtggagagaatactcagaaatgaacctctttaaagccttgcaggaatgagtcactcttacttaatgaaatgttaaagccaattaaaaagcatgctgtgatgcccagcttccctttccacagggtgcatgcgtctcctgctggtgaatcacatgcggcaagaggcaactggctccacagcctgggatgctgccgtaccaagaggaaagaagcagcaaaatgcctttacgttgttctaaacccccgacgcataaagtgtagaggagggatggccaagggtgggtggtagaaagtgtgttcaggctgacactggcaatgagtacagataatttcactttcctcttctaggggcaaaggctgatggcctctacctttgtatccaggagaaactgcagagcagccctgtgactttacaaaatatgctacctcaaagtgctaccgataaacctttctaattgtaagtgcccttactaagggcacatgtcttaatcaaagttagttttttgttttctggtttgttttttttttttgtatattgatgaatgagatcttacctattaaatatattattggattatggttcctgaaggtcattagagtgtgtgtgtgtgtgtgtgtgtgtgtgtgtgttttatgacttaaatatctttacgtgtgttttttagagcttggttctttaaagatttggagaagatatgtaaattaccaaggcacttggtttttctgttttatatactaataatcagggcctaagttaaataaaaatatgtgtgcatgtatttta

SEQ ID NO: 19260 - protein, 217 aa, Homo sapiens
MAKAYPQYYRKPSVVKRMPAMLTGLCQGCGTRQVVFTSDPHKSYLPVQFQSPDKAETQRGDPSVISVNGTDFTFRSAGVLLLVVDPCSVPFRLTEKTVFPLADVSRIEEYLKTGIPPRSIVLLSTRGEIKQLNISHLLVPLGLAKPAHLYDKGSTIFLGFSGNFKPSWTKLFTSPAGQGLGVLEQFIPLQLDEYGCPRATTVRRRDLELLKQASKAH

SEQ ID NO: 19261 - DNA, 6152 bp, Homo sapiens
agttgagtacgagcggcagctgcgggcgccggcaatcgagtggcttcctggccatggagaggagatctggacccgaggacgccagggactcctctccgtctccctggaccgctgtgtaggcacctgagttaacggacgctaagcggggtaggggaagtaacagtgtatcatgtatgccactgattccaggggacactcccctgctttcctccaacctcagaatggaaatagtcgtcacccatctggctatgttccagggaaggttgtcccattgcgtccccctcctcctccaaagagtcaagcttcagccaaatttacctccatcagacgagaagaccgggcaaccttcgcattctcacctgaagaacagcaagcccagagagaaagtcaaaagcaaaagagacacaaaaatactttcatttgttttgctattactagtttctcattttttattgcacttgcaatcattttaggaatatcctcaaaatatgctccagatgaaaattgcccagatcaaaatcctcgtctcaggaattgggatccaggacaagattctgcaaagcaagttgttatcaaggagggagatatgctccgtctgacctcagacgccaccgtgcattctatagtcattcaggatggaggactgcttgtatttggggacaataaagatggatccagaaatattactttgaggactcattacatcctgatccaggatggtggggcgcttcatattggagcagaaaaatgccgctataaatccaaagcgacaattaccttgtatggcaagtcagatgaaggtgaaagtatgccaacatttggcaaaaagtttattggtgtggaagctggcgggacactggagttacatggggcacggaaggcatcgtggacgttgttggcaaggaccctgaattcctcaggcttgccctttgggtcctatacctttgaaaaggacttttcccggggcctcaatgtgagggtcattgaccaagacacggccaaaattttggaaagtgagagatttgatacccatgaataccgcaatgagagcaggcggcttcaggagtttctgagattccaggatccaggtcggattgttgccatagctgtcggggattcagccgctaaaagtctcttacaaggaaccatccagatgatccaggaacggttgggaagtgaactgatccaaggactgggctacaggcaagcttgggctttagttggtgtcattgatggtggaagcacttcttgcaatgaatccgtgagaaactatgaaaatcatagcagtggcgggaaggctcttgcccaaagagaattttatactgtggatggccagaagttctctgtgacagcttatagtgaatggattgaaggcgtttctctttcaggattccgggtagaggttgtagatggagtgaagctaaatttgctagatgatgttagtagttggaaacctggagaccagattgtggtcgcaagcacagactattccatgtaccaagcagaggagttcactcttcttccctgttctgaatgcagccattttcaggtcaaagtcaaagaaacccctcagttcctgcacatgggtgagatcatagacggtgtagacatgagagctgaggttggaattcttacccggaatattgtgatccaaggagaagtggaggactcatgctacgcagaaaatcagtgccaattttttgattatgatacctttgggggacacattatgataatgaaaaattttacttcagtccatctttcttatgtggaattgaaacacatgggtcagcagcagatggggcgataccctgttcattttcacctgtgtggtgacgtggattataaaggaggatacagacatgcaacatttgtggacggcctgtctattcatcacagcttctcaaggtgcatcactgtgcatgggacaaatggcttgctaataaaagacaccattgggtttgacacactaggtcattgtttctttttggaagatggtattgaacagaggaatactttgttccacaatctgggactcctcaccaagccgggtactctcctgcccaccgataggaacaactccatgtgtaccaccatgcgagataaagtgtttggaaattacattcctgtgcctgctactgactgtatggctgtttcaactttctggattgctcatcccaacaataatctgattaataatgcagctgcaggctcacaggatgctggaatatggtatttattccacaaggaaccaactggggaatccagtggattgcagctcttggcaaaaccagaactcactccattgggtatattttataacaacagggtccattcaaattttaaggctggcttatttattgacaaaggtgtcaaaacaaccaactctagtgctgctgacccaagggaatacctctgtttggacaatagtgcaagatttcgacctcatcaggatgcaaaccccgaaaaaccacgtgttgctgctctaattgacaggctcattgcttttaaaaataatgataatggagcttgggtcagaggaggagatattatcgttcaaaattcagcatttgcagataatggaataggactgacctttgccagtgatggaagcttcccaagtgatgaaggttccagccaagaggtatctgaatctctctttgttggggagagcaggaattacggctttcagggtggtcagaacaagtatgtaggcactggaggaatagaccagaagcctcgaacattacccaggaacaggacgttcccaattagaggctttcagatttatgatgggcccattcatctcacaaggagcactttcaaaaaatatgtgccaactccagataggtacagcagtgcaattggcttcctcatgaagaattcctggcagataacccccaggaataatatctccctcgtgaagtttggtccacatgtctctctgaatgtcttttttggaaagcctggtccctggtttgaagattgtgagatggatggtgataagaactccatattccatgacattgatggctctgtgacaggatacaaggatgcttatgtgggaagaatggacaactacctgatccgccatccaagctgtgtaaatgtgtctaagtggaatgcagtgatctgcagtgggacctatgcacaggtctatgtacagacatggagcactcagaatctttctatgaccattacacgagatgagtatccgtccaaccctatggtgctccgaggtattaatcagaaggctgcctttccacagtaccagcctgtcgtcatgctggagaagggttataccatccactggaatgggccggcaccacggactacatttctatacctcgtcaacttcaacaagaatgactggattcgagttggcctttgctatccatcaaacacaagttttcaagttacctttggctatttgcagcggcagaatggctcattatccaaaatcgaagaatatgagcctgtgcattcactggaagaactgcaaagaaagcaatccgagaggaaattctattttgactccagcacggggttactgtttttgtatctcaaagccaaaagccacaggcatggccacagttactgttcatctcagggatgtgaaagagtcaagatccaagcagccacagactcaaaggacatcagtaactgcatggccaaagcatacccacagtactacagaaagccgtcagtggtcaagcggatgccggccatgctcactggactctgtcaaggctgtggcactcggcaggtggtgtttactagtgatcctcataaaagttacctccctgtgcaattccagtcacctgataaagcagaaacccagcgtggagacccgtctgttatttctgtcaatggcactgactttaccttccgaagtgcaggcgtcctcctccttgttgtggatccgtgcagcgttccattccgcttgacggaaaaaacggtttttcctcttgctgatgtcagtcgcattgaagagtatttaaaaacaggcatccctccaaggtccattgttctgttgagcacaagaggagaaataaagcagttaaacatttcacacttactagtacctctgggattagccaaaccagctcatctttatgacaaagggagtaccatatttttgggattcagtggaaactttaaaccatcatggactaagctatttaccagtcctgctggacagggccttggggtgcttgaacaattcatacctttgcagctggacgaatatggttgtcccagagccaccactgtccgcagaagagacctggaactgctaaagcaagcttcaaaagcacattagagactaactgtaacttaagtgctgggggaaaaaaaatgtgaactaacttatttaatttatggcattttaaaatgacactgttaacccaacggaaccattttccagtttgatacagaatggggagaaaagaaagcgtttgaaattattgcttggataccagcttcatgcaccttctagttgtacaaaatgttaaagacgttgtttgtatttgtaaggctggtgtattcagagagcagatctcttattcctcactttccacccccgtattttgtaatgaccatgagcaatgtttttactttttgtataatggggtggggtggagtgggggcttctgagagtcagcctgaggtctttagaggaccagctattgtagcaccttggatacttgaagtttaatgctcagttgggtcgggtggcagttgacttggtggctggcatgttcagcagtgcctggggccctgtttctgggcagcctttgaggattttctatgatattgaatgacagttttaagtggcaactcaggcccagctcatgcccttttttgcctggacatgtgctatttttattcacttatatatcaattacttgtaagggttaaactttcaaacaggaagtatattgggacaaaagggctcttggggattagatatccctttaatctgtgaccattgggcaaaaaattttcctgcagcaaaagtctgaggctgttgggaccatttttgcagctttaatccttagcctcttttgactgtatatttgtgtttaaaatgcagagctcaactgaatatttccttttttgttttgttttgttttgttttaagaagtaggttgttttcctgaaccgtaaacttgtatcattttaacttgcacaaaggaagtctgttcttggtattgctcttgcacttgggttttttgttattgttttgtgtggattttttaaagcttttctgttcaccctcctgccaggaaaatcccagaaagcttaatgataccccaaaatgattacacccagggaggaaaaaaaggagcgctttctagggtcagaatcgtggagagaatactcagaaatgaacctctttaaagccttgcaggaatgagtcactcttacttaatgaaatgttaaagccaattaaaaagcatgctgtgatgcccagcttccctttccacagggtgcatgcgtctcctgctggtgaatcacatgcggcaagaggcaactggctccacagcctgggatgctgccgtaccaagaggaaagaagcagcaaaatgcctttacgttgttctaaacccccgacgcataaagtgtagaggagggatggccaagggtgggtggtagaaagtgtgttcaggctgacactggcaatgagtacagataatttcactttcctcttctaggggcaaaggctgatggcctctacctttgtatccaggagaaactgcagagcagccctgtgactttacaaaatatgctacctcaaagtgctaccgataaacctttctaattgtaagtgcccttactaagggcacatgtcttaatcaaagttagttttttgttttctggtttgttttttttttttgtatattgatgaatgagatcttacctattaaatatattattggattatggttcctgaaggtcattagagtgtgtgtgtgtgtgtgtgtgtgtgtgtgtgttttatgacttaaatatctttacgtgtgttttttagagcttggttctttaaagatttggagaagatatgtaaattaccaaggcacttggtttttctgttttatatactaataatcagggcctaagttaaataaaaatatgtgtgcatgtatttta

SEQ ID NO: 19262 - protein, 1383 aa, Homo sapiens; identical to SEQ ID NO: 2358

SEQ ID NO: 19263 - DNA, 720 bp, Homo sapiens
acaggagagaaacctttctttttctgggttggtgagaccctgcctggaggcaaggagatgaactcagggtgttttctgcctttgccgcagatgttgatttatacacccgctttcatttaatggaaccattaaggaaggaacttaagctttccccaaattaaaggcctatctagctttagaatcattttccaatagcttatgctttatagaaccggatgccaataaattctatgaagtcactggattatttggatgtaacattaaatgtatatatgtcgttctgtcttctggcttaagacacttgtacagcctcaattttcttgcaggatttaaagatttttcctaatgttgaaaatacatgcactcacttcccctaaaacaatccaggacataaatctcaccacaagtatttaggacaacatggtagtcctgcaaggtaccccatagatttaagaggtaaaaccaactcattaacagaaaggcttttaagatactggtaatgctgtttcttgatctgcctctggttatgcagataggtttcgtttgcaaaaattcagtgtgttgtgttttatgacttaaatatctttacgtgtgttttttagagcttggttctttaaagatttggagaagatatgtaaattaccaaggcacttggtttttctgttttatatactaataatcagggcctaagttaaataaaaatatgtgtgcatgtatttt

SEQ ID NO: 19264 - protein, 66 aa, Homo sapiens
AFPKLKAYLALESFSNSLCFIEPDANKFYEVTGLFGCNIKCIYVVLSSGLRHLYSLNFLAGFKDFS

SEQ ID NO: 19265 - DNA, 3510 bp, Homo sapiens
ggatatgcaacagaagttgaataaaaggagagactctgtttctgaatggaaaattaataaatgttaatttcatggaccagtttcatggaagataatttttccatggactggaggtggagggggatggtttcaggatgattcaagtgcattacatttacttagttaaaatataaatttgacacatttccattagtgtcccaaaaggtacttttctactgtacttgacagttgatactgtagttcatctggaagaataaatgagaaagtagtaaaatataaacaaattacagtaatacaagggcttgtttttatcaaatattaaaatggaccgtgaagccataggccagcatagttttggcagagaagagcaagatcagagaagaacggagaatccacagataggtccaagtatgtatgttggcttactatgtgacaaaaatggtaattcaaaccatggaaaacacatttagtcgtttatttatttttagaattgtgtttatccatttatttaataaatagataatagaacttaaataaatagagtatttgaaacaaaacaaaaccattctcccatgttacagtagacttactccctgatagacaatggagaaggaagggtgaggggtggatgacaggaaattactgaataggcacagtgtacattatttgggtgatggataccctaagtgccctgacttcaccactatgcaatcctatgtatgtaatgaaattgcacttgtgcctcacaaatttatacaaattataaacaacaacaacaacaatagactattccctaaaagagctgtgccccagaccatccactaggtcagcagtccccagcctttttgacatcagggactggtttcatggaagataatttttccatggactggaggtgaagggggatggtttcaggatgattgaagcacattacatttactgtgcactttttttctattattattacattgcaatatataatgaaataattacacagctcaccataatgtaaagtcagtgggagccctgagcttgttttcctgcaactagatggtcccatctgggggtgatgatcaacagatcattgggcattagattctcaggagcacacaacctagatccctcacatgtgcagttcccaatagggttctgctcctatgagagttgaatgccacagctgacctgacaggaggcggagctcaggctgtaatgcaagtgttgtggggtggctgtaaatacagatgaagcttcgctcgcctgctcacctcctgctgtgcaacttggttcctaatctactggtacccatccatggcccaggggttgggaagccctgcactaggtgaacgtacgtaaatgatttggtttatgtatgcgttaccccttgtaagagcaacgtgtgaagcccatggtggtggggtggaagagtgggaattggatggaaaatcatctagacttttttctttttggagttctgcttttatctaatatttctattcagcagtcagttcagaaagatactcagtagaaagatactcatgctgaaggattgaaattggctctgactttctaaatttcacatacaggtccattgttctgttgagcacaagaggagaaataaagcagttaaacatttcacacttactagtacctctgggattagccaaaccagctcatctttatgacaaagggagtaccatatttttgggattcagtggaaactttaaaccatcatggactaagctatttaccagtcctgctggacagggccttggggtgcttgaacaattcatacctttgcagctggacgaatatggttgtcccagagccaccactgtccgcagaagagacctggaactgctaaagcaagcttcaaaagcacattagagactaactgtaacttaagtgctgggggaaaaaaaatgtgaactaacttatttaatttatggcattttaaaatgacactgttaacccaacggaaccattttccagtttgatacagaatggggagaaaagaaagcgtttgaaattattgcttggataccagcttcatgcaccttctagttgtacaaaatgttaaagacgttgtttgtatttgtaaggctggtgtattcagagagcagatctcttattcctcactttccacccccgtattttgtaatgaccatgagcaatgtttttactttttgtataatggggtggggtggagtgggggcttctgagagtcagcctgaggtctttagaggaccagctattgtagcaccttggatacttgaagtttaatgctcagttgggtcgggtggcagttgacttggtggctggcatgttcagcagtgcctggggccctgtttctgggcagcctttgaggattttctatgatattgaatgacagttttaagtggcaactcaggcccagctcatgcccttttttgcctggacatgtgctatttttattcacttatatatcaattacttgtaagggttaaactttcaaacaggaagtatattgggacaaaagggctcttggggattagatatccctttaatctgtgaccattgggcaaaaaattttcctgcagcaaaagtctgaggctgttgggaccatttttgcagctttaatccttagcctcttttgactgtatatttgtgtttaaaatgcagagctcaactgaatatttccttttttgttttgttttgttttgttttaagaagtaggttgttttcctgaaccgtaaacttgtatcattttaacttgcacaaaggaagtctgttcttggtattgctcttgcacttgggttttttgttattgttttgtgtggattttttaaagcttttctgttcaccctcctgccaggaaaatcccagaaagcttaatgataccccaaaatgattacacccagggaggaaaaaaaggagcgctttctagggtcagaatcgtggagagaatactcagaaatgaacctctttaaagccttgcaggaatgagtcactcttacttaatgaaatgttaaagccaattaaaaagcatgctgtgatgcccagcttccctttccacagggtgcatgcgtctcctgctggtgaatcacatgcggcaagaggcaactggctccacagcctgggatgctgccgtaccaagaggaaagaagcagcaaaatgcctttacgttgttctaaacccccgacgcataaagtgtagaggagggatggccaagggtgggtggtagaaagtgtgttcaggctgacactggcaatgagtacagataatttcactttcctcttctaggggcaaaggctgatggcctctacctttgtatccaggagaaactgcagagcagccctgtgactttacaaaatatgctacctcaaagtgctaccgataaacctttctaattgtaagtgcccttactaagggcacatgtcttaatcaaagttagttttttgttttctggtttgttttttttttttgtatattgatgaatgagatcttacctattaaatatattattggattatg

SEQ ID NO: 19266 - protein, 60 aa, Homo sapiens
MTKGVPYFWDSVETLNHHGLSYLPVLLDRALGCLNNSYLCSWTNMVVPEPPLSAEETWNC

SEQ ID NO: 19267 - DNA, 5947 bp, Homo sapiens
agttgagtacgagcggcagctgcgggcgccggcaatcgagtggcttcctggccatggagaggagatctggacccgaggacgccagggactcctctccgtctccctggaccgctgtgtaggcacctgagttaacggacgctaagcggggtaggggaagtaacagtgtatcatgtatgccactgattccaggggacactcccctgctttcctccaacctcagaatggaaatagtcgtcacccatctggctatgttccagggaaggttgtcccattgcgtccccctcctcctccaaagagtcaagcttcagccaaatttacctccatcagacgagaagaccgggcaaccttcgcattctcacctgaagaacagcaagcccagagagaaagtcaaaagcaaaagagacacaaaaatactttcatttgttttgctattactagtttctcattttttattgcacttgcaatcattttaggaatatcctcaaaatatgctccagatgaaaattgcccagatcaaaatcctcgtctcaggaattgggatccaggacaagattctgcaaagcaagttgttatcaaggagggagatatgctccgtctgacctcagacgccaccgtgcattctatagtcattcaggatggaggactgcttgtatttggggacaataaagatggatccagaaatattactttgaggactcattacatcctgatccaggatggtggggcgcttcatattggagcagaaaaatgccgctataaatccaaagcgacaattaccttgtatggcaagtcagatgaaggtgaaagtatgccaacatttggcaaaaagtttattggtgtggaagctggcgggacactggagttacatggggcacggaaggcatcgtggacgttgttggcaaggaccctgaattcctcaggcttgccctttgggtcctatacctttgaaaaggacttttcccggggcctcaatgtgagggtcattgaccaagacacggccaaaattttggaaagtgagagatttgatacccatgaataccgcaatgagagcaggcggcttcaggagtttctgagattccaggatccaggtcggattgttgccatagctgtcggggattcagccgctaaaagtctcttacaaggaaccatccagatgatccaggaacggttgggaagtgaactgatccaaggactgggctacaggcaagcttgggctttagttggtgtcattgatggtggaagcacttcttgcaatgaatccgtgagaaactatgaaaatcatagcagtggcgggaaggctcttgcccaaagagaattttatactgtggatggccagaagttctctgtgacagcttatagtgaatggattgaaggcgtttctctttcaggattccgggtagaggttgtagatggagtgaagctaaatttgctagatgatgttagtagttggaaacctggagaccagattgtggtcgcaagcacagactattccatgtaccaagcagaggagttcactcttcttccctgttctgaatgcagccattttcaggtcaaagtcaaagaaacccctcagttcctgcacatgggtgagatcatagacggtgtagacatgagagctgaggttggaattcttacccggaatattgtgatccaaggagaagtggaggactcatgctacgcagaaaatcagtgccaattttttgattatgatacctttgggggacacattatgataatgaaaaattttacttcagtccatctttcttatgtggaattgaaacacatgggtcagcagcagatggggcgataccctgttcattttcacctgtgtggtgacgtggattataaaggaggatacagacatgcaacatttgtggacggcctgtctattcatcacagcttctcaaggtgcatcactgtgcatgggacaaatggcttgctaataaaagacaccattgggtttgacacactaggtcattgtttctttttggaagatggtattgaacagaggaatactttgttccacaatctgggactcctcaccaagccgggtactctcctgcccaccgataggaacaactccatgtgtaccaccatgcgagataaagtgtttggaaattacattcctgtgcctgctactgactgtatggctgtttcaactttctggattgctcatcccaacaataatctgattaataatgcagctgcaggctcacaggatgctggaatatggtatttattccacaaggaaccaactggggaatccagtggattgcagctcttggcaaaaccagaactcactccattgggtatattttataacaacagggtccattcaaattttaaggctggcttatttattgacaaaggtgtcaaaacaaccaactctagtgctgctgacccaagggaatacctctgtttggacaatagtgcaagatttcgacctcatcaggatgcaaaccccgaaaaaccacgtgttgctgctctaattgacaggctcattgcttttaaaaataatgataatggagcttgggtcagaggaggagatattatcgttcaaaattcagcatttgcagataatggaataggactgacctttgccagtgatggaagcttcccaagtgatgaaggttccagccaagaggtatctgaatctctctttgttggggagagcaggaattacggctttcagggtggtcagaacaagtatgtaggcactggaggaatagaccagaagcctcgaacattacccaggaacaggacgttcccaattagaggctttcagatttatgatgggcccattcatctcacaaggagcactttcaaaaaatatgtgccaactccagataggtacagcagtgcaattggcttcctcatgaagaattcctggcagataacccccaggaataatatctccctcgtgaagtttggtccacatgtctctctgaatgtcttttttggaaagcctggtccctggtttgaagattgtgagatggatggtgataagaactccatattccatgacattgatggctctgtgacaggatacaaggatgcttatgtgggaagaatggacaactacctgatccgccatccaagctgtgtaaatgtgtctaagtggaatgcagtgatctgcagtgggacctatgcacaggtctatgtacagacatggagcactcagaatctttctatgaccattacacgagatgagtatccgtccaaccctatggtgctccgaggtattaatcagaaggctgcctttccacagtaccagcctgtcgtcatgctggagaagggttataccatccactggaatgggccggcaccacggactacatttctatacctcgtcaacttcaacaagaatgactggattcgagttggcctttgctatccatcaaacacaagttttcaagttacctttggctatttgcagcggcagaatggctcattatccaaaatcgaagaatatgagcctgtgcattcactggaagaactgcaaagaaagcaatccgagaggaaattctattttgactccagcacggggttactgtttttgtatctcaaagccaaaagccacaggcatggccacagttactgttcatctcagggatgtgaaagagtcaagatccaagcagccacagactcaaaggacatcagtaactgcatggccaaagcatacccacagtactacagaaagccgtcagtggtcaagcggatgccggccatgctcactggactctgtcaaggctgtggcactcggcaggtggtgtttactagtgatcctcataaaagttacctccctgtgcaattccagtcacctgataaagcagaaacccagcgtggagacccgtctgttatttctgtcaatggcactgactttaccttccgaagtgcaggcgtcctcctccttgttgtggatccgtgcagcgttccattccgcttgacggaaaaaacggtttttcctcttgctgatgtcagtcgcattgaagagtatttaaaaacaggcatccctccaaggtccattgttctgttgagcacaagaggagaaataaagcagttaaacatttcacacttactagtacctctgggattagccaaaccagctcatctttatgacaaagggagtaccatatttttgggattcagtggaaactttaaaccatcatggactaagctatttaccagtcctgctggacagggccttggggtgcttgaacaattcatacctttgcagctggacgaatatggttgtcccagagccaccactgtccgcagaagagacctggaactgctaaagcaagcttcaaaagcacattagagactaactgtaacttaagtgctgggggaaaaaaaatgtgaactaacttatttaatttatggcattttaaaatgacactgttaacccaacggaaccattttccagtttgatacagaatggggagaaaagaaagcgtttgaaattattgcttggataccagcttcatgcaccttctagttgtacaaaatgttaaagacgttgtttgtatttgtaaggctggtgtattcagagagcagatctcttattcctcactttccacccccgtattttgtaatgaccatgagcaatgtttttactttttgtataatggggtggggtggagtgggggcttctgagagtcagcctgaggtctttagaggaccagctattgtagcaccttggatacttgaagtttaatgctcagttgggtcgggtggcagttgacttggtggctggcatgttcagcagtgcctggggccctgtttctgggcagcctttgaggattttctatgatattgaatgacagttttaagtggcaactcaggcccagctcatgcccttttttgcctggacatgtgctatttttattcacttatatatcaattacttgtaagggttaaactttcaaacaggaagtatattgggacaaaagggctcttggggattagatatccctttaatctgtgaccattgggcaaaaaattttcctgcagcaaaagtctgaggctgttgggaccatttttgcagctttaatccttagcctcttttgactgtatatttgtgtttaaaatgcagagctcaactgaatatttccttttttgttttgttttgttttgttttaagaagtaggttgttttcctgaaccgtaaacttgtatcattttaacttgcacaaaggaagtctgttcttggtattgctcttgcacttgggttttttgttattgttttgtgtggattttttaaagcttttctgttcaccctcctgccaggaaaatcccagaaagcttaatgataccccaaaatgattacacccagggaggaaaaaaaggagcgctttctagggtcagaatcgtggagagaatactcagaaatgaacctctttaaagccttgcaggaatgagtcactcttacttaatgaaatgttaaagccaattaaaaagcatgctgtgatgcccagcttccctttccacagggtgcatgcgtctcctgctggtgaatcacatgcggcaagaggcaactggctccacagcctgggatgctgccgtaccaagaggaaagaagcagcaaaatgcctttacgttgttctaaacccccgacgcataaagtgtagaggagggatggccaagggtgggtggtagaaagtgtgttcaggctgacactggcaatgagtacagataatttcactttcctcttctaggggcaaaggctgatggcctctacctttgtatccaggagaaactgcagagcagccctgtgactttacaaaatatgctacctcaaagtgctaccgataaacctttctaattgtaagtgcccttactaagggcacatgtcttaatcaaagttagttttttgttttctggtttgttttttttttttgtatattgatgaatgagatcttacctattaaatatattattggattatg

SEQ ID NO: 19268 - protein, 1383 aa, Homo sapiens; identical to SEQ ID NO: 2358

SEQ ID NO: 19269 - DNA, 2194 bp, Homo sapiens
ggtggaagtgaggcaaggctgggctccgtctctccccccgcccgctagtaggctggagccggggtcagctttggcaccttcctccagtcagtggccaactcctggctcagtggggattgtgctcgtcccctccgttcccctccagtcttcctcccgctaccggaacgagcctcgcgcttggcaggctgaggaggagcaaagaaagcaggattaaagagaaggaagacctggctaggtctgggtggcgtctgcagtgccagaaagggaggcggtggcggcggcggctgcgaccacggccgcgcgggacgtgaggcccgagagcaaccgacgggcagcggcggccgctccagcgccccgcaccggggccgttagtcagcagaacgcgagctcttgtggaggagcagggccggcgcgaggcgagactcgggagcgtgagcggggcccctggggcgccgccgtccttcttcgccccggcgccgggggctgtagccctggtccccgctcctctgtcgggccagtctgcaggcggagagagtcggacggcgcccggagcgcggatctcgccttgtggaggacagcgcgtcggctgcggttctctctcgaccccttctgcccggcgcttcggcccgggccgctcaggtgcagagcatgaataatctttcatttagtgagctatgttgcctcttctgctgtccaccttgtccagggaagattgcttcaaaattagcgtttttgccacctgatccaacttacacactgatgtgtgatgaaagcggaagccgttggactttacatctgtctgaacgagcagactggcagtattcttctagagaaaaagatgctattgagtgtttcatgactagaaccagtaaaggcaacagaattgcttgtatgtttgtacgttgttcacccaatgcgaaatacactttactcttctcacatggaaatgctgttgatcttggtcaaatgagcagcttttacataggactaggatcacggattaattgtaatatattctcatatgattattctggatatggtgccagttccgggaaacccacagagaagaacctctatgcagacattgaagctgcttggcttgctcttaggacaagatatggcattcgccctgaaaatgtgattatatatggccaaagtatagggacagtaccgtctgtggatcttgctgctcgatatgagagtgctgctgttattcttcattctcctctgacttcgggaatgcgagttgcctttcctgataccaagaagacctactgttttgatgcattcccaaacattgacaaaatctctaagataacctctccagtattaataattcatgggactgaagatgaagtcattgacttttcacatggcctcgcattgtttgaacgttgccaaagacctgtggagcctctctgggttgaaggagcaggtcacaatgatgtggaactttatggacagtatcttgaaaggttgaaacagtttgtgtcacaggaactggtgcagaaacataaagaagggaagtgattttctcaaggtctacagttttcaatgacggtactatgtattccattatcttctctttaccaaacttaactggattaatataccaatgatcctttcaaattatatgacataaacttatttgctctccaatgttagtcacaattgtatttttttaatgggtaggttcctccttgtcagttattcattgaatagtaaattggtagattgtgccaattaattctcaagttaatgattatttaaagaatttaatactaattcattttactaggcacagttacagttagttatgttgaaacctagtgaggatggtagccacagacacatgaataaacaagtgtttacttcagaagctgatttactataaattgtaacacacagaataagcaattacattgaaaaaagtatcaatatagttactacgaattagcttttagcttgttgctttgttttaaaataggcaatttattcaaacatgataacatgttgtattctgataatgtgcaccccaaatgtccagtaaccaaaaaagtaacaatttatgcttacgatacttggaattaggctttgagtttgagcttgcagaatggagaagacatttgtctatcgtatctctaaatggattatgcctctgactgaatagttgaatgagtaatgctaaggaagg

SEQ ID NO: 19270 - protein, 293 aa, Homo sapiens; identical to SEQ ID NO: 2362

SEQ ID NO: 19271 - DNA, 3149 bp, Homo sapiens
ggtggaagtgaggcaaggctgggctccgtctctccccccgcccgctagtaggctggagccggggtcagctttggcaccttcctccagtcagtggccaactcctggctcagtggggattgtgctcgtcccctccgttcccctccagtcttcctcccgctaccggaacgagcctcgcgcttggcaggctgaggaggagcaaagaaagcaggattaaagagaaggaagacctggctaggtctgggtggcgtctgcagtgccagaaagggaggcggtggcggcggcggctgcgaccacggccgcgcgggacgtgaggcccgagagcaaccgacgggcagcggcggccgctccagcgccccgcaccggggccgttagtcagcagaacgcgagctcttgtggaggagcagggccggcgcgaggcgagactcgggagcgtgagcggggcccctggggcgccgccgtccttcttcgccccggcgccgggggctgtagccctggtccccgctcctctgtcgggccagtctgcaggcggagagagtcggacggcgcccggagcgcggatctcgccttgtggaggacagcgcgtcggctgcggttctctctcgaccccttctgcccggcgcttcggcccgggccgctcaggtgcagagcatgaataatctttcatttagtgagctatgttgcctcttctgctgtccaccttgtccagggaagattgcttcaaaattagcgtttttgccacctgatccaacttacacactgatgtgtgatgaaagcggaagccgttggactttacatctgtctgaacgagcagactggcagtattcttctagagaaaaagatgctattgagtgtttcatgactagaaccagtaaaggcaacagaattgcttgtatgtttgtacgttgttcacccaatgcgaaatacactttactcttctcacatggaaatgctgttgatcttggtcaaatgagcagcttttacataggactaggatcacggattaattgtaatatattctcatatgattattctggatatggtgccagttccgggaaacccacagagaagaacctctatgcagacattgaagctgcttggcttgctcttaggacaagatatggcattcgccctgaaaatgtgattatatatggccaaagtatagggacagtaccgtctgtggatcttgctgctcgatatgagagtgctgctgttattcttcattctcctctgacttcgggaatgcgagttgcctttcctgataccaagaagacctactgttttgatgcattcccaaacattgacaaaatctctaagataacctctccagtattaataattcatgggactgaagatgaagtcattgacttttcacatggcctcgcattgtttgaacgttgccaaagacctgtggagcctctctgggttgaaggagcaggtcacaatgatgtggaactttatggacagtatcttgaaaggttgaaacagtttgtgtcacaggaactggtaaatttgtaaaatattctgtaaatttgctactgggttttcctttcttgctgaactgcactctttggtaaataacataaaacctgaaggttttgtttgcaaatcatgtcagttgccttcataaatgtacaggtaatgatttgttaacagacttaatgaaggttttaattaccagaactaaaaactggaaataacagtaccgtgcagtcaggctgtgtaatttatattttttctgtgaatttttttttaacatcaagatgagtactgtatgagattttaattctataaaatcaaatgctgtaaaagtattgccaaatgcttttgcatactagaaacaaatttataaatatttttaaaacatctcaatatattaaatcttatcctggaatacaactgtaatattttgaaaaaagctatgtatctaaagcaatttaagtactcataatggaatgaactgtaaaagagatttaaaaccatgcaagttcactagaattaacctaaaccctgttgtacagggatagaggtttaaagttattttattgtaaaatacattgaattttctgtatactctgattacatacatttatcctttaaaaaagatgtaaatcttaatttttatgccatctattaatttaccaatgagttaccttgtaaatgagaagtcatgatagcactgaattttaactagttttgacttctaagtttggtactgtgaggcaagtacttaaaattttcatgctggttacttaaaaggcatttagagatttcaagaatgattttgtatacgatgttttaaattttgactgatctcatagtcttcatagaattgcagtagtcttcattgtatgaaatcccgaaagtccatgagttgatcttaaagaccactaacagactggctatcagatcccttttcactttggctatttttttcattttttgagatggagtcttgctgtgtcactgaggctggagtgcagtggcgcgatcttgattcactgcaacctctgcctcccgggatcaagtgattctcctgcctcagcctcctgagtagctggtattacagatgcttgccaccacgcctggctaatttttgtatttttagtagagacagggttttgccatgttgatcaggctggtcttgaactcctgacctcatgatctgcccttggcctcccaaagtgtcggaattacaggcatgagccactgcgcctggcccactttagctatttttaaaaataggacctattgttttggattactatctgagaatttcatggattcactcctgggtataggagataagaatacgtttaattcataacttttatattaaccaatatagtaaaaaaataaagctcacacatacaaaaactaagttgcctttccttgaatgaaccctgtctgaataaaacaatgaaaaataaaaataaaattaatggtatgtagtctaatttgtaaatgaatgaatatggaaataatacacactgtggatatattttaaggccttatgtagttttaattgttctgctcgttccgtggttatgtttaagactatagtatatgactctcttcaaagtatatcaagtattgtgaatgctttggttcagatgtgtcaaattaacagtaaaacaacaaatataccactg

SEQ ID NO: 19272 - protein, 288 aa, Homo sapiens; identical to SEQ ID NO: 2360

SEQ ID NO: 19273 - DNA, 2056 bp, Homo sapiens
gcgttctgctgactaacggccccggtgcggggcgctggagcggccgccgctgcccgtcggttgctctcgggcctcacgtcccgcgcggccgtggtcgcagccgccgccgccaccgcctccctttctggcactgcagacgccacccagacctagccaggtcttccttctctttaatcctgctttctttgctcctcctcagcctgccaagcgcgaggctcgttccggtagcgggaggaagactggaggggaacggaggggacgagcacaatccccactgagccaggagttggccactgactggaggaaggtgccaaagctgaccccggctccagcctactagcgggcggggggagagacggagcccagccttgcctcacttccaccaatcagaggccgcccggcagggtgggaggcgctctgagctcaaggagaggctgagctcgctcagcaggaggcggggattgcggaaaagaagaaccaataggaacaaaggttccccgcccctttgatttgatggactacacattcgggccaatgggggaattctcatttcgaagaaagtgggacttgttctccgggtttgagaaagaggctgcgcggagccggaggggtcgaggctgcgccgcgtggagtggcttggcttaacagcagggagggcagagcgatgctctttgacctcccagaagagtcacgtgggctgacccagagccggggcggaaaggctgcgtttgtttcttccgggtcattgacagaagcgtcaattcctgggagtagttcgttggttttctttcccctcatccttttgcctgctcccggcgaggggtggctttgatttcggcgatgagctcccagaaaggcaacgtggctcgttccagacctcagaagcaccagaatacgtttagcttcaaaaatgacaagttcgataaaagtgtgcagaccaagtctttatctgcaaactctagtcatgatgtttgagtttgtctccctgtggagcaggggtccccagcccccgacccccgcatcggtccatggcctgtcaggaactgggccacacagcaggagttgaactgcagaaaattaatgcaaaacttcatgatggagtatgtcagcgctgtaaagaagttcttgagtggcgtgtaaaatacagcaaatacaaaccattatcaaaacctaaaaagtgtgttaaatgtttacaaaagacagtgaaggattcttatcacataatgtgcaggccatgtgcctgtgaacttgaagtttgcgcaaaatgtggaaagaaagaagacattgttattccgttgaataaagaaacagaaaaaatagaacatactgaaaataatctaagttccaaccatagaagaagctgcagaagaaatgaagaaagtgatgatgatttagattttgatattgatttagaagacacaggaggagaccatcaaatgaattaatatcactgtattaaaagtctgccgggcacagtggctcacgcctgtaatcccaacactttgggaggccaaggagggtggatcacctgaggtcaggagttcgagaccagcctggccaacatggcggaaccccatctccactaaaagtacaaaaaattagctgggcgtggtggctcatgcctgtaatcccagctactcaggaggctgaggcaggaggattgcttgaaccctggaggcggagattgaagtgagctgagttcgtgccattacactccagcctgggtgacagagtgagactctgtctcaaaaaaaataaaataaaaagtcaatttagaatgtgaaattctgaccaccttttggctttgagtattttccaaaagatatttgaaatcctaatgaggaaatcagaaaaagctatggaaaaatagacaaatttcatacatgaacaatataaattgtgtatattacttaacatcaaactaaacaagattcagaattgatggttgtataagaactagctcatgtaaaaataaaataacattattacattgcctcaaaaattggtcctcggtaagtgccttttgataaatgatctcaaataaatgactcatagc

SEQ ID NO: 19274 - protein, 138 aa, Homo sapiens
MACQELGHTAGVELQKINAKLHDGVCQRCKEVLEWRVKYSKYKPLSKPKKCVKCLQKTVKDSYHIMCRPCACELEVCAKCGKKEDIVIPLNKETEKIEHTENNLSSNHRRSCRRNEESDDDLDFDIDLEDTGGDHQMN

SEQ ID NO: 19275 - DNA, 1925 bp, Homo sapiens
gcgttctgctgactaacggccccggtgcggggcgctggagcggccgccgctgcccgtcggttgctctcgggcctcacgtcccgcgcggccgtggtcgcagccgccgccgccaccgcctccctttctggcactgcagacgccacccagacctagccaggtcttccttctctttaatcctgctttctttgctcctcctcagcctgccaagcgcgaggctcgttccggtagcgggaggaagactggaggggaacggaggggacgagcacaatccccactgagccaggagttggccactgactggaggaaggtgccaaagctgaccccggctccagcctactagcgggcggggggagagacggagcccagccttgcctcacttccaccaatcagaggccgcccggcagggtgggaggcgctctgagctcaaggagaggctgagctcgctcagcaggaggcggggattgcggaaaagaagaaccaataggaacaaaggttccccgcccctttgatttgatggactacacattcgggccaatgggggaattctcatttcgaagaaagtgggacttgttctccgggtttgagaaagaggctgcgcggagccggaggggtcgaggctgcgccgcgtggagtggcttggcttaacagcagggagggcagagcgatgctctttgacctcccagaagagtcacgtgggctgacccagagccggggcggaaaggctgcgtttgtttcttccgggtcattgacagaagcgtcaattcctgggagtagttcgttggttttctttcccctcatccttttgcctgctcccggcgaggggtggctttgatttcggcgatgagctcccagaaaggcaacgtggctcgttccagacctcagaagcaccagaatacgtttagcttcaaaaatgacaagttcgataaaagtgtgcagaccaagaaaattaatgcaaaacttcatgatggagtatgtcagcgctgtaaagaagttcttgagtggcgtgtaaaatacagcaaatacaaaccattatcaaaacctaaaaagtgtgttaaatgtttacaaaagacagtgaaggattcttatcacataatgtgcaggccatgtgcctgtgaacttgaagtttgcgcaaaatgtggaaagaaagaagacattgttattccgttgaataaagaaacagaaaaaatagaacatactgaaaataatctaagttccaaccatagaagaagctgcagaagaaatgaagaaagtgatgatgatttagattttgatattgatttagaagacacaggaggagaccatcaaatgaattaatatcactgtattaaaagtctgccgggcacagtggctcacgcctgtaatcccaacactttgggaggccaaggagggtggatcacctgaggtcaggagttcgagaccagcctggccaacatggcggaaccccatctccactaaaagtacaaaaaattagctgggcgtggtggctcatgcctgtaatcccagctactcaggaggctgaggcaggaggattgcttgaaccctggaggcggagattgaagtgagctgagttcgtgccattacactccagcctgggtgacagagtgagactctgtctcaaaaaaaataaaataaaaagtcaatttagaatgtgaaattctgaccaccttttggctttgagtattttccaaaagatatttgaaatcctaatgaggaaatcagaaaaagctatggaaaaatagacaaatttcatacatgaacaatataaattgtgtatattacttaacatcaaactaaacaagattcagaattgatggttgtataagaactagctcatgtaaaaataaaataacattattacattgcctcaaaaattggtcctcggtaagtgccttttgataaatgatctcaaataaatgactcatagc

SEQ ID NO: 19276 - protein, 157 aa, Homo sapiens; identical to SEQ ID NO: 2364

SEQ ID NO: 19277 - DNA, 1818 bp, Homo sapiens
gcgttctgctgactaacggccccggtgcggggcgctggagcggccgccgctgcccgtcggttgctctcgggcctcacgtcccgcgcggccgtggtcgcagccgccgccgccaccgcctccctttctggcactgcagacgccacccagacctagccaggtcttccttctctttaatcctgctttctttgctcctcctcagcctgccaagcgcgaggctcgttccggtagcgggaggaagactggaggggaacggaggggacgagcacaatccccactgagccaggagttggccactgactggaggaaggtgccaaagctgaccccggctccagcctactagcgggcggggggagagacggagcccagccttgcctcacttccaccaatcagaggccgcccggcagggtgggaggcgctctgagctcaaggagaggctgagctcgctcagcaggaggcggggattgcggaaaagaagaaccaataggaacaaaggttccccgcccctttgatttgatggactacacattcgggccaatgggggaattctcatttcgaagaaagtgggacttgttctccgggtttgagaaagaggctgcgcggagccggaggggtcgaggctgcgccgcgtggagtggcttggcttaacagcagggagggcagagcgatgctctttgacctcccagaagagtcacgtgggctgacccagagccggggcggaaaggctgcgtttgtttcttccgggtcattgacagaagcgtcaattcctgggagtagttcgttggttttctttcccctcatccttttgcctgctcccggcgaggggtggctttgatttcggcgatgagctcccagaaaggcaacgtggctcgttccagacctcagaagcaccagaatacgtttagcttcaaaaatgacaagttcgataaaagtgtgcagaccaagtgttaaatgtttacaaaagacagtgaaggattcttatcacataatgtgcaggccatgtgcctgtgaacttgaagtttgcgcaaaatgtggaaagaaagaagacattgttattccgttgaataaagaaacagaaaaaatagaacatactgaaaataatctaagttccaaccatagaagaagctgcagaagaaatgaagaaagtgatgatgatttagattttgatattgatttagaagacacaggaggagaccatcaaatgaattaatatcactgtattaaaagtctgccgggcacagtggctcacgcctgtaatcccaacactttgggaggccaaggagggtggatcacctgaggtcaggagttcgagaccagcctggccaacatggcggaaccccatctccactaaaagtacaaaaaattagctgggcgtggtggctcatgcctgtaatcccagctactcaggaggctgaggcaggaggattgcttgaaccctggaggcggagattgaagtgagctgagttcgtgccattacactccagcctgggtgacagagtgagactctgtctcaaaaaaaataaaataaaaagtcaatttagaatgtgaaattctgaccaccttttggctttgagtattttccaaaagatatttgaaatcctaatgaggaaatcagaaaaagctatggaaaaatagacaaatttcatacatgaacaatataaattgtgtatattacttaacatcaaactaaacaagattcagaattgatggttgtataagaactagctcatgtaaaaataaaataacattattacattgcctcaaaaattggtcctcggtaagtgccttttgataaatgatctcaaataaatgactcatagc

SEQ ID NO: 19278 - protein, 98 aa, Homo sapiens
MTSSIKVCRPSVKCLQKTVKDSYHIMCRPCACELEVCAKCGKKEDIVIPLNKETEKIEHTENNLSSNHRRSCRRNEESDDDLDFDIDLEDTGGDHQMN

SEQ ID NO: 19279 - DNA, 2267 bp, Homo sapiens
gcgttctgctgactaacggccccggtgcggggcgctggagcggccgccgctgcccgtcggttgctctcgggcctcacgtcccgcgcggccgtggtcgcagccgccgccgccaccgcctccctttctggcactgcagacgccacccagacctagccaggtcttccttctctttaatcctgctttctttgctcctcctcagcctgccaagcgcgaggctcgttccggtagcgggaggaagactggaggggaacggaggggacgagcacaatccccactgagccaggagttggccactgactggaggaaggtgccaaagctgaccccggctccagcctactagcgggcggggggagagacggagcccagccttgcctcacttccaccaatcagaggccgcccggcagggtgggaggcgctctgagctcaaggagaggctgagctcgctcagcaggaggcggggattgcggaaaagaagaaccaataggaacaaaggttccccgcccctttgatttgatggactacacattcgggccaatgggggaattctcatttcgaagaaagtgggacttgttctccgggtttgagaaagaggctgcgcggagccggaggggtcgaggctgcgccgcgtggagtggcttggcttaacagcagggagggcagagcgatgctctttgacctcccagaagagtcacgtgggctgacccagagccggggcggaaaggctgcgtttgtttcttccgggtcattgacagaagcgtcaattcctgggagtagttcgttggttttctttcccctcatccttttgcctgctcccggcgaggggtggctttgatttcggcgatgagctcccagaaaggcaacgtggctcgttccagacctcagaagcaccagaatacgtttagcttcaaaaatgacaagttcgataaaagtgtgcagaccaagtctttatctgcaaactctagtcatgatgtttgagtttgtctccctgtggagcaggggtccccagcccccgacccccgcatcggtccatggcctgtcaggaactgggccacacagcaggagttgaactgcagaaaattaatgcaaaacttcatgatggagtatgtcagcgctgtaaagaagttcttgagtggcgtgtaaaatacagcaaatacaaaccattatcaaaacctaaaaagtgtgttaaatgtttacaaaagacagtgaaggattcttatcacataatgtgcaggccatgtgcctgtgaacttgaagtttgcgcaaaatgtggaaagaaagaagacattgttattccgttgaataaagaaacagaaaaaatagaacatactgaaaataatctaagttccaaccatagaagaagctgcagaagaaatgaagaaagtgatgatgatttagattttgatattgatttagaagacacaggaggagaccatcaaatgaattaatatcactgtattaaaagtctgccgggcacagtggctcacgcctgtaatcccaacactttgggaggccaaggagggtggatcacctgaggtcaggagttcgagaccagcctggccaacatggcggaaccccatctccactaaaagtacaaaaaattagctgggcgtggtggctcatgcctgtaatcccagctactcaggaggctgaggcaggaggattgcttgaaccctggaggcggagattgaagtgagctgagttcgtgccattacactccagcctgggtgacagagtgagactctgtctcaaaaaaaataaaataaaaagtcaatttagaatgtgaaattctgaccaccttttggctttgagtattttccaaaagatatttgaaatcctaatgaggaaatcagaaaaagctatggaaaaatagacaaatttcatacatgaacaatataaattgtgtatattacttaacatcaaactaaacaagattcagaattgatggttgtataagaactagctcatgtaaaaataaaataacattattacattgcctcaaaaattggtcctcggtaagtgccttttgataaatgatctcaaataaatgactcatagcaaaagccctgtcgcttatgtttaatttttacaaagtaaaagcaattttttccaaataataatgtttaacaagcgtatagcaattctgctttgtatttttatatatttcatcacattttaacttttttctcgtgaaatgtacatacagaaaaagtgcatataatttatacactttataagtgtatgcattttttataataattataaaggaa

SEQ ID NO: 19280 - protein, 138 aa, Homo sapiens; identical to SEQ ID NO: 19274

SEQ ID NO: 19281 - DNA, 2136 bp, Homo sapiens
gcgttctgctgactaacggccccggtgcggggcgctggagcggccgccgctgcccgtcggttgctctcgggcctcacgtcccgcgcggccgtggtcgcagccgccgccgccaccgcctccctttctggcactgcagacgccacccagacctagccaggtcttccttctctttaatcctgctttctttgctcctcctcagcctgccaagcgcgaggctcgttccggtagcgggaggaagactggaggggaacggaggggacgagcacaatccccactgagccaggagttggccactgactggaggaaggtgccaaagctgaccccggctccagcctactagcgggcggggggagagacggagcccagccttgcctcacttccaccaatcagaggccgcccggcagggtgggaggcgctctgagctcaaggagaggctgagctcgctcagcaggaggcggggattgcggaaaagaagaaccaataggaacaaaggttccccgcccctttgatttgatggactacacattcgggccaatgggggaattctcatttcgaagaaagtgggacttgttctccgggtttgagaaagaggctgcgcggagccggaggggtcgaggctgcgccgcgtggagtggcttggcttaacagcagggagggcagagcgatgctctttgacctcccagaagagtcacgtgggctgacccagagccggggcggaaaggctgcgtttgtttcttccgggtcattgacagaagcgtcaattcctgggagtagttcgttggttttctttcccctcatccttttgcctgctcccggcgaggggtggctttgatttcggcgatgagctcccagaaaggcaacgtggctcgttccagacctcagaagcaccagaatacgtttagcttcaaaaatgacaagttcgataaaagtgtgcagaccaagaaaattaatgcaaaacttcatgatggagtatgtcagcgctgtaaagaagttcttgagtggcgtgtaaaatacagcaaatacaaaccattatcaaaacctaaaaagtgtgttaaatgtttacaaaagacagtgaaggattcttatcacataatgtgcaggccatgtgcctgtgaacttgaagtttgcgcaaaatgtggaaagaaagaagacattgttattccgttgaataaagaaacagaaaaaatagaacatactgaaaataatctaagttccaaccatagaagaagctgcagaagaaatgaagaaagtgatgatgatttagattttgatattgatttagaagacacaggaggagaccatcaaatgaattaatatcactgtattaaaagtctgccgggcacagtggctcacgcctgtaatcccaacactttgggaggccaaggagggtggatcacctgaggtcaggagttcgagaccagcctggccaacatggcggaaccccatctccactaaaagtacaaaaaattagctgggcgtggtggctcatgcctgtaatcccagctactcaggaggctgaggcaggaggattgcttgaaccctggaggcggagattgaagtgagctgagttcgtgccattacactccagcctgggtgacagagtgagactctgtctcaaaaaaaataaaataaaaagtcaatttagaatgtgaaattctgaccaccttttggctttgagtattttccaaaagatatttgaaatcctaatgaggaaatcagaaaaagctatggaaaaatagacaaatttcatacatgaacaatataaattgtgtatattacttaacatcaaactaaacaagattcagaattgatggttgtataagaactagctcatgtaaaaataaaataacattattacattgcctcaaaaattggtcctcggtaagtgccttttgataaatgatctcaaataaatgactcatagcaaaagccctgtcgcttatgtttaatttttacaaagtaaaagcaattttttccaaataataatgtttaacaagcgtatagcaattctgctttgtatttttatatatttcatcacattttaacttttttctcgtgaaatgtacatacagaaaaagtgcatataatttatacactttataagtgtatgcattttttataataattataaaggaa

SEQ ID NO: 19282 - protein, 157 aa, Homo sapiens; identical to SEQ ID NO: 2364

SEQ ID NO: 19283 - DNA, 2029 bp, Homo sapiens
gcgttctgctgactaacggccccggtgcggggcgctggagcggccgccgctgcccgtcggttgctctcgggcctcacgtcccgcgcggccgtggtcgcagccgccgccgccaccgcctccctttctggcactgcagacgccacccagacctagccaggtcttccttctctttaatcctgctttctttgctcctcctcagcctgccaagcgcgaggctcgttccggtagcgggaggaagactggaggggaacggaggggacgagcacaatccccactgagccaggagttggccactgactggaggaaggtgccaaagctgaccccggctccagcctactagcgggcggggggagagacggagcccagccttgcctcacttccaccaatcagaggccgcccggcagggtgggaggcgctctgagctcaaggagaggctgagctcgctcagcaggaggcggggattgcggaaaagaagaaccaataggaacaaaggttccccgcccctttgatttgatggactacacattcgggccaatgggggaattctcatttcgaagaaagtgggacttgttctccgggtttgagaaagaggctgcgcggagccggaggggtcgaggctgcgccgcgtggagtggcttggcttaacagcagggagggcagagcgatgctctttgacctcccagaagagtcacgtgggctgacccagagccggggcggaaaggctgcgtttgtttcttccgggtcattgacagaagcgtcaattcctgggagtagttcgttggttttctttcccctcatccttttgcctgctcccggcgaggggtggctttgatttcggcgatgagctcccagaaaggcaacgtggctcgttccagacctcagaagcaccagaatacgtttagcttcaaaaatgacaagttcgataaaagtgtgcagaccaagtgttaaatgtttacaaaagacagtgaaggattcttatcacataatgtgcaggccatgtgcctgtgaacttgaagtttgcgcaaaatgtggaaagaaagaagacattgttattccgttgaataaagaaacagaaaaaatagaacatactgaaaataatctaagttccaaccatagaagaagctgcagaagaaatgaagaaagtgatgatgatttagattttgatattgatttagaagacacaggaggagaccatcaaatgaattaatatcactgtattaaaagtctgccgggcacagtggctcacgcctgtaatcccaacactttgggaggccaaggagggtggatcacctgaggtcaggagttcgagaccagcctggccaacatggcggaaccccatctccactaaaagtacaaaaaattagctgggcgtggtggctcatgcctgtaatcccagctactcaggaggctgaggcaggaggattgcttgaaccctggaggcggagattgaagtgagctgagttcgtgccattacactccagcctgggtgacagagtgagactctgtctcaaaaaaaataaaataaaaagtcaatttagaatgtgaaattctgaccaccttttggctttgagtattttccaaaagatatttgaaatcctaatgaggaaatcagaaaaagctatggaaaaatagacaaatttcatacatgaacaatataaattgtgtatattacttaacatcaaactaaacaagattcagaattgatggttgtataagaactagctcatgtaaaaataaaataacattattacattgcctcaaaaattggtcctcggtaagtgccttttgataaatgatctcaaataaatgactcatagcaaaagccctgtcgcttatgtttaatttttacaaagtaaaagcaattttttccaaataataatgtttaacaagcgtatagcaattctgctttgtatttttatatatttcatcacattttaacttttttctcgtgaaatgtacatacagaaaaagtgcatataatttatacactttataagtgtatgcattttttataataattataaaggaa

SEQ ID NO: 19284 - protein, 98 aa, Homo sapiens; identical to SEQ ID NO: 19278

SEQ ID NO: 19285 - DNA, 1252 bp, Homo sapiens
gcgttctgctgactaacggccccggtgcggggcgctggagcggccgccgctgcccgtcggttgctctcgggcctcacgtcccgcgcggccgtggtcgcagccgccgccgccaccgcctccctttctggcactgcagacgccacccagacctagccaggtcttccttctctttaatcctgctttctttgctcctcctcagcctgccaagcgcgaggctcgttccggtagcgggaggaagactggaggggaacggaggggacgagcacaatccccactgagccaggagttggccactgactggaggaaggtgccaaagctgaccccggctccagcctactagcgggcggggggagagacggagcccagccttgcctcacttccaccaatcagaggccgcccggcagggtgggaggcgctctgagctcaaggagaggctgagctcgctcagcaggaggcggggattgcggaaaagaagaaccaataggaacaaaggttccccgcccctttgatttgatggactacacattcgggccaatgggggaattctcatttcgaagaaagtgggacttgttctccgggtttgagaaagaggctgcgcggagccggaggggtcgaggctgcgccgcgtggagtggcttggcttaacagcagggagggcagagcgatgctctttgacctcccagaagagtcacgtgggctgacccagagccggggcggaaaggctgcgtttgtttcttccgggtcattgacagaagcgtcaattcctgggagtagttcgttggttttctttcccctcatccttttgcctgctcccggcgaggggtggctttgatttcggcgatgagctcccagaaaggcaacgtggctcgttccagacctcagaagcaccagaatacgtttagcttcaaaaatgacaagttcgataaaagtgtgcagaccaagaaaattaatgcaaaacttcatgatggagtatgtcagcgctgtaaagaagttcttgagtggcgtgtaaaatacagcaaatacaaaccattatcaaaacctaaaaagtgatggagtctccctctgttgcccaggctggagtgcagtggcaggatcttggctcaccacaacctccgcctcccttgttcaagtgattctcctgcctcagcctctcgagtagctgggactacaggcgcacaccaccatgcccagctaatctttgtatttttagtagagatggggtttcactatgttggccaggccggtctcgaac

SEQ ID NO: 19286 - protein, 69 aa, Homo sapiens
MSSQKGNVARSRPQKHQNTFSFKNDKFDKSVQTKKINAKLHDGVCQRCKEVLEWRVKYSKYKPLSKPKK

SEQ ID NO: 19287 - DNA, 1290 bp, Homo sapiens
gcgttctgctgactaacggccccggtgcggggcgctggagcggccgccgctgcccgtcggttgctctcgggcctcacgtcccgcgcggccgtggtcgcagccgccgccgccaccgcctccctttctggcactgcagacgccacccagacctagccaggtcttccttctctttaatcctgctttctttgctcctcctcagcctgccaagcgcgaggctcgttccggtagcgggaggaagactggaggggaacggaggggacgagcacaatccccactgagccaggagttggccactgactggaggaaggtgccaaagctgaccccggctccagcctactagcgggcggggggagagacggagcccagccttgcctcacttccaccaatcagaggccgcccggcagggtgggaggcgctctgagctcaaggagaggctgagctcgctcagcaggaggcggggattgcggaaaagaagaaccaataggaacaaaggttccccgcccctttgatttgatggactacacattcgggccaatgggggaattctcatttcgaagaaagtgggacttgttctccgggtttgagaaagaggctgcgcggagccggaggggtcgaggctgcgccgcgtggagtggcttggcttaacagcagggagggcagagcgatgctctttgacctcccagaagagtcacgtgggctgacccagagccggggcggaaaggctgcgtttgtttcttccgggtcattgacagaagcgtcaattcctgggagtagttcgttggttttctttcccctcatccttttgcctgctcccggcgaggggtggctttgatttcggcgatgagctcccagaaaggcaacgtggctcgttccagacctcagaagcaccagaatacgtttagcttcaaaaatgacaagttcgataaaagtgtgcagaccaaggcacatactgcatcatttacaaaactgtagagcacctgttgtgtgtgcagttgtgatttcttatagatttttagaattggaaggcatgtaaagaacacgtaatctggtacattgcttcagtaggtaagtcagtatgaacttctaagaatttttgttttcttctgtattgggtctattgtgggtatgtccaacgtgacaggggaggtaagggaagtggcatcccctgagatagtgactgaaatggctttcatcatctttaagtcaaagtgagatgccagtaataggatatatgtatgtatgtacttgtgtctctgtatgtatgtaaataaacaaacatgctggaaggag

SEQ ID NO: 19288 - protein, 43 aa, Homo sapiens
MSSQKGNVARSRPQKHQNTFSFKNDKFDKSVQTKAHTASFTKL

SEQ ID NO: 19289 - DNA, 4085 bp, Homo sapiens
gcgttctgctgactaacggccccggtgcggggcgctggagcggccgccgctgcccgtcggttgctctcgggcctcacgtcccgcgcggccgtggtcgcagccgccgccgccaccgcctccctttctggcactgcagacgccacccagacctagccaggtcttccttctctttaatcctgctttctttgctcctcctcagcctgccaagcgcgaggctcgttccggtagcgggaggaagactggaggggaacggaggggacgagcacaatccccactgagccaggagttggccactgactggaggaaggtgccaaagctgaccccggctccagcctactagcgggcggggggagagacggagcccagccttgcctcacttccaccaatcagaggccgcccggcagggtgggaggcgctctgagctcaaggagaggctgagctcgctcagcaggaggcggggattgcggaaaagaagaaccaataggaacaaaggttccccgcccctttgatttgatggactacacattcgggccaatgggggaattctcatttcgaagaaagtgggacttgttctccgggtttgagaaagaggctgcgcggagccggaggggtcgaggctgcgccgcgtggagtggcttggcttaacagcagggagggcagagcgatgctctttgacctcccagaagagtcacgtgggctgacccagagccggggcggaaaggctgcgtttgtttcttccgggtcattgacagaagcgtcaattcctgggagtagttcgttggttttctttcccctcatccttttgcctgctcccggcgaggggtggctttgatttcggcgatgagctcccagaaaggcaacgtggctcgttccagacctcagaagcaccagaatacgtttagcttcaaaaatgacaagttcgataaaagtgtgcagaccaagaaaattaatgcaaaacttcatgatggagtatgtcagcgctgtaaagaagttcttgagtggcgtgtaaaatacagcaaatacaaaccattatcaaaacctaaaaagtgatggagtcttgctctatagcccgggctggagtgcagtggcaccatttcagctcaatgcaacctctgcctcctaggttcaagtgattctcctgcctcagcctcccgagtagctgggattacaggcacacaccaccatgcccagctaatttttgtatttttagtagaaacaggttttcacaatgttggccaggatggtctccatctactgaccttgtgatccgcccccctaggcctcccaaagtgctgggcttacaggcatgagccactgcacccagccgactgaacatcttttcatgtgtttattagccaatcctatatcttcactggtgaaatgtctattcagatgtgttgcccattttaaaaattgggttgttttcttaccattgagttatgagtcttttatatatattctagatacaagtcctttatcagatataatttggaaatattttctcgctgtctgtaatgtgttatacatcaattttgagatatccttcacattaagaaactaacggtgtggataataatcctggtattgacagaggtttggactcctgaagcctgaaagtctatctgctgccacgcctgggcacatactgcatcatttacaaaactgtagagcacctgttgtgtgtgcagttgtgatttcttatagatttttagaattggaaggcatgtaaagaacacgtaatctggtacattgcttcagtaggtaagtcagtatgaacttctaagaatttttgttttcttctgtattgggtctattgtgggtatgtccaacgtgacaggggaggtaagggaagtggcatcccctgagatagtgactgaaatggctttcatcatctttaagtcaaagtgagatgccagtaataggatatatgtatgtatgtacttgtgtctctgtatgtatgtaaataaacaaacatgctggaaggaggaggtgattcaatcagggactttgtgaaagaaaaaaagaataactggaccttcctttaatgatgaaaactgtttatacagcaaaccatcaaagccaaaatgtgaattttggtattagcccgatttttcctaagaaactgttgatgtaaccactgtagttgcagagatcgttttggtatattctagaccctctttgttttgttctgtttggggtttcttccccctcaagttgctcttgtccaccactagactggctgccttttattccatagcagacagtccttaagtctttgcatatgtccttattcaaaaattaatcttcatcagtttttttctgcagaaaacagttttttaaatatcttacatgagaatgctctgcacctgcaatctctggttgatgcagtttcctttctctcttctctgttcccattggtagaataaatctgctccttcttaaatcctgagctgaaaatgtccacacttcccagaagtgtactttagaatcacctgtaacatgtatttaaaatacagattccccagctccacgggcaaagctctcctgccatgtgacaccctgatacagttcagggagccactaaggcaggccaaaatggctcagcaggcaaaggtccaagctgccagggtagtgtgtcattacagcatgcttagcatagctaggaggacaggctcacacccagccccacagctgttgcgctacagactcaggcacagggctgtctaactggcagatgtgggccacaactgttggagacaagccagccatatttgggaaaatcttattgtaaggggcaagtgtgagtgagatttaggagtcatgggaaaatacaccaacacagtaaatcttgtgttataggagagatgtggaagaaagagataaactactggccagggtgtctcctgactgggtgacttgccaccacatgggccaggcaggttgcggcagctctgcctttgggaggtggctggaggaggggaggagagagaggcatgatgaagacagatgcaccctttcctgagcaggggttaacattcagggtgccgaaaggaattccacagcctgtttcccatctctcttgtcctcatcaagtactggtcctcgtgtatgtgttctgcttccgctttctcaggatgtttacgtttttgcaaatacgtttatggaaaagagttacctcacccacctctccaaacatctatttgttttacatttttattgcgggggagtgatctctttacatagcttcaaatggcataacattcagcagtatccaagcttagatatatctgatgagaggaaagtaattgtgaggcctttgttctagttacaactttgtcactatctgactccatgactccagcaaattgcttcaactgtctggcctgcagtttttttcttgcgttaaataacagacttagtctagatcggtggttcttatcatgtggtttctggactagcagcatcaatattacctgggaaacttgttagaaatgcaaattcttgggctctgccctagacctactgaaacatactctgtgggcggggcccagcaatctgtgtttgaaacgcgattctgattatttgacaaaagtttgcaaaccactggtctagataagtagctcttagccttggctgcacattaaaatcatctgggcaacttttataacctaccaatcctggcctcttcctccaaagattctgacttaaatggtttcagatggggaccattgttatgcggttatagccgacgcctaggtgctacctgaggtcttcaaagctaaaggtcagtgtttcccagccgtaaatgcatacctctagacctggccttctcaagccactaggtgttgctataatagagaagaaaaggcattttcagaaccgtctttggatatggatgaggaggaggaaaatgtatttcttagcttctgataagagattattttgttattttaatctgagtgcaatttgctaaatattcatttgcaacttgttaaatttattcaaagaaattaaatgcccataagtgacagaaagaataaagaattgtgatatatatttacaataaaatactctttagcaataaa

SEQ ID NO: 19290 - protein, 69 aa, Homo sapiens; identical to SEQ ID NO: 19286

SEQ ID NO: 19291 - DNA, 735 bp, Homo sapiens
ataaagaaacagaaaaaatagaacatactgaaaataatctaagttccaaccatagaagaagctgcagaagaaatgaagaaagtgatgatgatttagattttgatattgatttagaagacacaggaggattgcttgaaccctggaggcggagattgaagtgagctgagttcgtgccattacactccagcctgggtgacagagtgagactctgtctcaaaaaaaataaaataaaaagtcaatttagaatgtgaaattctgaccaccttttggctttgagtattttccaaaagatatttgaaatcctaatgaggaaatcagaaaaagctatggaaaaatagacaaatttcatacatgaacaatataaattgtgtatattacttaacatcaaactaaacaagattcagaattgatggttgtataagaactagctcatgtaaaaataaaataacattattacattgcctcaaaaattggtcctcggtaagtgccttttgataaatgatctcaaataaatgactcatagcaaaagccctgtcgcttatgtttaatttttacaaagtaaaagcaattttttccaaataataatgtttaacaagcgtatagcaattctgctttgtatttttatatatttcatcacattttaacttttttctcgtgaaatgtacatacagaaaaagtgcatataatttatacactttataagtgtatgcattttttataataattataaaggaa

SEQ ID NO: 19292 - protein, 52 aa, Homo sapiens
KETEKIEHTENNLSSNHRRSCRRNEESDDDLDFDIDLEDTGGLLEPWRRRLK

SEQ ID NO: 19293 - DNA, 699 bp, Homo sapiens
tgcaatagtatctctttgtcttaataattgtatttctaattacaaataagcttgagcccctttttgtgtttattggctatttcacttttgataataggtgatattagggaataatttaagtggaatgttattttagaaatccatactgaaatacttaaggatgtaatactaatttactgtaaaatatttcagcataaaaaaagtgcagacatagataacatttcactgacatcagaaaatattacctgggaatacatcaaaaagtattcaagaacttccatctcaaaaaaaaaaaaaaaacgtggagacaaaaatgaatagaaatactatcttcacaatttgaaagtctcagtattctaaacatatagcctgactgaaagaaatgttctgtcccgctgggcgtgttgcctcacgcctgtaatcctagcacttttggaggccaaggcggacggatcacctgaggtcgggagttcgagaccagcctgaccaacacagagaaaccccatctctactaaaaacacaaaattaaccacgcctggtggcgcatccctgtaatcccagctagtccggaggctgaggcaggagaatcacttcaacccaagaggcagaggttgtggtgagccaagatagcgctattgcactccagcctggggaacaagagtgaaactctgtctcaaaagaaataaattttctgtccat

SEQ ID NO: 19294 - protein, 68 aa, Homo sapiens
FKWNVILEIHTEILKDVILIYCKIFQHKKSADIDNISLTSENITWEYIKKYSRTSISKKKKKRGDKNE

SEQ ID NO: 19295 - DNA, 1501 bp, Homo sapiens
gctttcagttgtaacggacttcatcacatcacaaattgtactcgttctcatccttttaagaaagttcagacccaggaaaatttccatagtaccttaatgaaaaagatagaaatcagtgggacgtgtctttcctttcatctccttttcggcttggaaatcagaatgagaaggattgtttttgctggtgttatcttattccgcctcttaggtgttatcttattccgcctcttaggtgttatcttattcggccgcttaggtgacctgggaacctgccagacaaaacctggtcagtactggaaagaagaggtccacattcaagatgttggaggtttgatttgcagagcatgcaatctttcactgcccttccatggatgtcttttagacctgggaacctgccaggcagaacctggtcagtactgtaaagaagaggtccacattcaaggtggcattcaatggtattcagtcaaaggctgcacaaagaacacatcagagtgcttcaagagtactctcgtcaagagaattctgcaactgcatgaacttgtaactactcactgctgcaatcattctttgtgcaatttctgagtcagtggcccatatctaaaatgcttggcagatcaatcagtctcgaagcctgacctggctatcacaaaatgatggctattgtcaattagcccacttcagaaacctcagacccttgtaggtagaaggaattttgatctgaaattgactttggttttcaatattcccaatatctcccccaccacctccaactcatctgagaaatagccctttcaacaccatttctctcctctcctccttctgcttaatttaccttcctaccacaaggctacaaagaaggaaaaatgttagtgattctccaagtcaaactaggcatgtcacctctaactactttcatttccctcaataattccatactccaaaatatggttacaaatgtttcacaagacagcaagtgacctgagaatattcatttggtttccaaagcaaactgccttgctcctttggggtgatttatggtatagaagaaactgacttaacatatactatagggaaaaaataagccatgaatcagcaagccaggcctgcgggaaaagtatgaacccaaacaggaaagggctgaggcaggtggtagggctggcacttatttcttccatctgcctcagagtttatccaaattttgaattttccgtaccttaaccatgcctaaatgctttggcttgttcaattttggcagattaagcagttcaaggtaagcagagaagtaagttcccaaccacaaggaatttaaaaggagtaggaacgtactttgaactacatttcccattttgcgatcattacgtcttctattacaatgccctactttggcagcatgaagagtactgcattaatttaatttaatttaaaatttaatttaaaactgtctttctctgtattttcaggagtttgaaaattcaaaaaataaataataaatgtcaataaa

SEQ ID NO: 19296 - protein, 161 aa, Homo sapiens
MKKIEISGTCLSFHLLFGLEIRMRRIVFAGVILFRLLGVILFRLLGVILFGRLGDLGTCQTKPGQYWKEEVHIQDVGGLICRACNLSLPFHGCLLDLGTCQAEPGQYCKEEVHIQGGIQWYSVKGCTKNTSECFKSTLVKRILQLHELVTTHCCNHSLCNF

SEQ ID NO: 19297 - DNA, 2145 bp, Homo sapiens
gtagggagccagcccctgggcgcggcctgcagggtaccggcaaccgcccgggtaagcgggggcaggacaaggccggagcctgtgtccgcccggcagccgcccgcagctgcagagagtcccgctgcgtctccgccgcgtgcgccctcctcgaccagcagacccgcgctgcgctccgccgctgacatgtgtgccgctcagatgccgcccctggcgcacatcttccgagggacgttcgtccactccacctggacctgccccatggaggtgctgcgggatcacctcctcggcgtgagcgacagcggcaaaatagtgtttttagaagaagcatctcaacaggaaaaactggccaaagaatggtgcttcaagccgtgtgaaataagagaactgagccaccatgagttcttcatgcctgggctggttgatacacacatccatgcctctcagtattcctttgctggaagtagcatagacctgccactcttggagtggctgaccaagtacacatttcctgcagaacacagattccagaacatcgactttgcagaagaagtatataccagagttgtcaggagaacactaaagaatggaacaaccacagcttgttactttgcaacaattcacactgactcatctctgctccttgccgacattacagataaatttggacagcgggcatttgtgggcaaagtttgcatggatttgaatgacacttttccagaatacaaggagaccactgaggaatcgatcaaggaaactgagagatttgtgtcagaaatgctccaaaagaactattctagagtgaagcccatagtgacaccacgtttttccctctcctgctctgagactttgatgggtgaactgggcaacattgctaaaacccgtgatttgcacattcagagccatataagtgaaaatcgtgatgaagttgaagctgtgaaaaacttataccccagttataaaaactacacatctgtgtatgataaaaacaatcttttgacaaataagacagtgatggcacacggctgctacctctctgcagaagaactgaacgtattccatgaacgaggagcatccatcgcacactgtcccaattctaatttatcgctcagcagtggatttctaaatgtgctagaagtcctgaaacatgaagtcaagatagggctgggtacagacgtggctggtggctattcatattccatgcttgatgcaatcagaagagcagtgatggtttccaatatccttttaattaataaggtaaatgagaaaagcctcaccctcaaagaagtcttcagactagctactcttggaggaagccaagccctggggctggatggtgagattggaaactttgaagtgggcaaggaatttgatgccatcctgatcaaccccaaagcatccgactctcccattgacctgttttatggggacttttttggtgatatttctgaggctgttatccagaagttcctctatctaggagatgatcgaaatattgaagaggtttatgtgggcggaaagcaggtggttccgttttccagctcagtgtaagaccctcgggcgtctacaaagttctcctgggattagcgtggttctgcatctcccttgtgcccaggtggagttagaaagtcaaaaaatagtaccttgttcttgggatgactatccctttctgtgtctagttacagtattcacttgacaaatagttcgaaggaagttgcactaattctcaactctggttgagagggttcataaatttcatgaaaatatctccctttggagctgctcagacttactttaagctcaaacagaagggaatgctattactggtggtgttcctacggtaagacttaagcaaagcctttttcatatttgaaaatgtggaaagaaaagatgttcctaaaaggttagatattttgagctaataattgcaaaaattagaagactgaaaatggacccatgagagtatatttttatgagggagcaaaagttagactgagaacaaacgttagaaaatcacttcagattgtgtttgaaaattatatactgagcatactaatttaaaaagagaacttgttgaaatttaaaacgtgtttctaggttgaccttgtgttttagaaatttgcacttaatggaatttgcatttcagag

SEQ ID NO: 19298 - protein, 454 aa, Homo sapiens; identical to SEQ ID NO: 2368

SEQ ID NO: 19299 - DNA, 2049 bp, Homo sapiens
gtagggagccagcccctgggcgcggcctgcagggtaccggcaaccgcccgggtaagcgggggcaggacaaggccggagcctgtgtccgcccggcagccgcccgcagctgcagagagtcccgctgcgtctccgccgcgtgcgccctcctcgaccagcagacccgcgctgcgctccgccgctgacatgtgtgccgctcagatgccgcccctggcgcacatcttccgagggacgttcgtccactccacctggacctgccccatggaggtgctgcgggatcacctcctcggcgtgagcgacagcggcaaaatagtgtttttagaagaagcatctcaacaggaaaaactggccaaagaatggtgcttcaagccgtgtgaaataagagaactgagccaccatgagttcttcatgcctgggctggttgatacacacatccatgcctctcagtattcctttgctggaagtagcatagacctgccactcttggagtggctgaccaagtacacatttcctgcagaacacagattccagaacatcgactttgcagaagaagtatataccagagttgtcaggagaacactaaagaatggaacaaccacagcttgttactttgcaacaattcacactgactcatctctgctccttgccgacattacagataaatttggacagcgggcatttgtgggcaaagtttgcatggatttgaatgacacttttccagaatacaaggagaccactgaggaatcgatcaaggaaactgagagatttgtgtcagaaatgctccaaaagaactattctagagtgaagcccatagtgacaccacgtttttccctctcctgctctgagactttgatgggtgaactgggcaacattgctaaaacccgtgatttgcacattcagagccatataagtgaaaatcgtgatgaagttgaagctgtgaaaaacttataccccagttataaaaactacacatctgtgtatgataaaaacaatcttttgacaaataagacagtgatggcacacggctgctacctctctgcagaagaactgaacgtattccatgaacgaggagcatccatcgcacactgtcccaattctaatttatcgctcagcagtggatttctaaatgtgctagaagtcctgaaacatgaagtcaagatagggctgggtacagacgtggctggtggctattcatattccatgcttgatgcaatcagaagagcagtgatggtttccaatatccttttaattaataaggtaaatgagaaaagcctcaccctcaaagaagtcttcagactagctactcttggaggaagccaagccctggggctggatggtgagattggaaactttgaagtgggcaaggaatttgatgccatcctgatcaaccccaaagcatccgactctcccattgacctgttttatggggacttttttggtgatatttctgaggctgttatccagaagttcctctatctaggagatgatcgaaatattgaagaggtttatgtgggcggaaagcaggtggttccgttttccagctcagtgaaagaaacaattcacttaccagcctcctcaccccatcctccaccatttccttaatgttccatggtattttcaacggaatacactttgaaagacctgagtgtgaaagactgagagttgaggagttactttgtggatcttgtccaaatttagtgaaatgtggaagtcaaccagaccaatgatggaattaaatgtaaattccaagagggctttcacagtccacagggttcaaatgacttgggtaacagaagttattcttagcttacctgttatgtgacagtgatttacctgtccatttccaacccaaaagcctgtcagaaagcattctttagagaaaaccactttacatttgttgttaaactcctgatcgctactcttaagaatatacatgtatgtattcataggaacattttttctcaatatttgtatgattcgcttactgttattgtgctgagtgagctcctgtgtgcttcagacaaaaataaatgagactttgtgtttacgtta

SEQ ID NO: 19300 - protein, 471 aa, Homo sapiens
MCAAQMPPLAHIFRGTFVHSTWTCPMEVLRDHLLGVSDSGKIVFLEEASQQEKLAKEWCFKPCEIRELSHHEFFMPGLVDTHIHASQYSFAGSSIDLPLLEWLTKYTFPAEHRFQNIDFAEEVYTRVVRRTLKNGTTTACYFATIHTDSSLLLADITDKFGQRAFVGKVCMDLNDTFPEYKETTEESIKETERFVSEMLQKNYSRVKPIVTPRFSLSCSETLMGELGNIAKTRDLHIQSHISENRDEVEAVKNLYPSYKNYTSVYDKNNLLTNKTVMAHGCYLSAEELNVFHERGASIAHCPNSNLSLSSGFLNVLEVLKHEVKIGLGTDVAGGYSYSMLDAIRRAVMVSNILLINKVNEKSLTLKEVFRLATLGGSQALGLDGEIGNFEVGKEFDAILINPKASDSPIDLFYGDFFGDISEAVIQKFLYLGDDRNIEEVYVGGKQVVPFSSSVKETIHLPASSPHPPPFP

SEQ ID NO: 19301 - DNA, 5430 bp, Homo sapiens
gtagggagccagcccctgggcgcggcctgcagggtaccggcaaccgcccgggtaagcgggggcaggacaaggccggagcctgtgtccgcccggcagccgcccgcagctgcagagagtcccgctgcgtctccgccgcgtgcgccctcctcgaccagcagacccgcgctgcgctccgccgctgacatgtgtgccgctcagatgccgcccctggcgcacatcttccgagggacgttcgtccactccacctggacctgccccatggaggtgctgcgggatcacctcctcggcgtgagcgacagcggcaaaatagtgtttttagaagaagcatctcaacaggaaaaactggccaaagaatggtgcttcaagccgtgtgaaataagagaactgagccaccatgagttcttcatgcctgggctggttgatacacacatccatgcctctcagtattcctttgctggaagtagcatagacctgccactcttggagtggctgaccaagtacacatttcctgcagaacacagattccagaacatcgactttgcagaagaagtatataccagagttgtcaggagaacactaaagaatggaacaaccacagcttgttactttgcaacaattcacactgactcatctctgctccttgccgacattacagataaatttggacagcgggcatttgtgggcaaagtttgcatggatttgaatgacacttttccagaatacaaggagaccactgaggaatcgatcaaggaaactgagagatttgtgtcagaaatgctccaaaagaactattctagagtgaagcccatagtgacaccacgtttttccctctcctgctctgagactttgatgggtgaactgggcaacattgctaaaacccgtgatttgcacattcagagccatataagtgaaaatcgtgatgaagttgaagctgtgaaaaacttataccccagttataaaaactacacatctgtgtatgataaaaacaatcttttgacaaataagacagtgatggcacacggctgctacctctctgcagaagaactgaacgtattccatgaacgaggagcatccatcgcacactgtcccaattctaatttatcgctcagcagtggatttctaaatgtgctagaagtcctgaaacatgaagtcaagatagggctgggtacagacgtggctggtggctattcatattccatgcttgatgcaatcagaagagcagtgatggtttccaatatccttttaattaataaggtaaatgagaaaagcctcaccctcaaagaagtcttcagactagctactcttggaggaagccaagccctggggctggatggtgagattggaaactttgaagtgggcaaggaatttgatgccatcctgatcaaccccaaagcatccgactctcccattgacctgttttatggggacttttttggtgatatttctgaggctgttatccagaagttcctctatctaggagatgatcgaaatattgaagaggtttatgtgggcggaaagcaggtggttccgttttccagctcagtgtaagaccctcgggcgtctacaaagttctcctgggattagcgtggttctgcatctcccttgtgcccaggtggagttagaaagtcaaaaaatagtaccttgttcttgggatgactatccctttctgtgtctagttacagtattcacttgacaaatagttcgaaggaagttgcactaattctcaactctggttgagagggttcataaatttcatgaaaatatctccctttggagctgctcagacttactttaagctcaaacagaagggaatgctattactggtggtgttcctacggtaagacttaagcaaagcctttttcatatttgaaaatgtggaaagaaaagatgttcctaaaaggttagatattttgagctaataattgcaaaaattagaagactgaaaatggacccatgagagtatatttttatgagggagcaaaagttagactgagaacaaacgttagaaaatcacttcagattgtgtttgaaaattatatactgagcatactaatttaaaaagagaacttgttgaaatttaaaacgtgtttctaggttgaccttgtgttttagaaatttgcacttaatggaatttgcatttcagagatgtgttagtgttgtgctttgccttctttggcgatgaatgtcagaaattgaatgccacatgctttcataatatagttttgtgcttcaaagtgtttgacagaagttgggtattaaagatttaaagtctcttaggaatattattcatgtaactccatggcataaatagttgtatttttgtgtactttaaaatcaacttataactgtgagatgttattgcttccattttattagaagagaaacaaattccatgctttatggaatttatgtagactggagtcttcgtgaactggggcaaatgctggcatccaggagccgccaatactaacaggacaggttccattgccatggcctattccacccaaacaatatgttgtagtttctggaaattccatactcagatatcagtctgctagaactttaaaatgaaggacaaatcctgttaaagaaatattgttaaaaatctttaaaccctgtgtattgaaagcactctattttctaattttatccagttttctgtttaactccttataatgtttaggatattaaaattttaggataatgaagagtacataatgtcctacttaatatttatgttaataggacttaattcttactagacatctaggaacattacaaagcaaagactatttttatgcttccataacctagaattaaaaccaaattatgaccttatgataaatctttaagtattggtgtgaatgttatttaaattctatatttttcttatttaattacaaatactataaatgagcaaggaaaaggaatagactttcttaatatattataacactcattcctagagcttaggggtgactctttaatattaccttatagtagaaactttatgtaatatagctaactccgtatttacagaacaaaaaaacacagttccccctcctgtagtataaattttattttcacatacttagctaatttagcagtaattggcccagttttttccctaatagaaatacttttagatttgattatgtatacatgacacctaaagagggaacaaaagttagttttatttttttaataaacaacagagtttgttttgtgagataagtatcttagtaaacccaatttccagtcttagtctgtatttccaatatttctaattcctgagccacgtcaaagatgccttgccaaatttctccccatttctctacggggctagcaaaaatcttcagctttatcactcaacccctgccaaaggaacttgattacatggtgtctaaccaaatgagcaggcttaggaatttagatgagatgtgtaagattcacttacaggcagtagctgcttctagcatttgcaagatcctacacttttaccttctttaagggtgtacattttgatgttgaacatcagttttcatgtagacttaggactcatgtgcagtaaatataaataagtgtagcatcagaagcagtaggaatggccgtatacaaccatcctgttaaacatttaaatttagctctgatagtgtgttaagacctgaatatctttcctagtaaaaataggatgtgttgaaatatttatatgtactttgatctctccacatcacttataacttatgtgttttatttctccaagtgcggtgttcctgaatgttatgtatgcttttttttctgtaccacaggcattatctatacctggggccagattttctgcactttgaaatgttgcctttgcctaatgtaggttgactttctgaattgtggagaggcacttttccaagccaatcttatttgtcactttttgttttaatatcttgctctctgacaggaaagaaacaattcacttaccagcctcctcaccccatcctccaccatttccttaatgttccatggtattttcaacggaatacactttgaaaggtaaaaacaattcaaaagtatcgattatcataaattcacaaaatatttttgcaaccagaacacaaaagcaggctagtcagctaaggtaaatttcattttcaaacgagagggaaacatgggaagtaaaagattaggatgtgaaaggttgtcctaaacagaccaaggagactgttccctaatttattctcttggctggttctctcattgaattatcagaccccaagaggagatattggaacaggctcccttcatgccaagggtctttctaagttaatactgtgagcattgagcccccattaaaactcttttttacttcagaaagaattttacaggttaaagggaaagaaatggtgggaaactctccccgtaatgcttagccaactttaaagtgtacccttcaatatccccattggcaactgcagctgagatcttagagaggaaatataaccggtgtgagatctagcaatgcattttgaatcttcactccctaccaggctcttcctatttttaatctcttcacctcagaactagacatatggagagctttaaaggcaagctggaaggcacattgtatcaattctaccttgtgctatacgtaggagagatccaaaatttggatgcttctggagactcttagacatcttttcattgttgtccatttttaaagttgatgattgctggaaacattcacacgcttaaaagcaatggtgtgagttattaatgggtaaactaagaagtgttataggcaatgacttgaaatggtttttaaattgtatggattgttaagaattgttgaaaaaaaattttttttttttggacagcttcaaggagatgttagcaatttcagatatactagccagtttaggtatgactttggaagtgcagaaacagaaggatactgttagaaaatcctaacattggtctccgtgcatgtgttcacacctggtctcactgcctttccttcccacagacctgagtgtgaaagactgagagttgaggagttactttgtggatcttgtccaaatttagtgaaatgtggaagtcaaccagaccaatgatggaattaaatgtaaattccaagagggctttcacagtccacagggttcaaatgacttgggtaacagaagttattcttagcttacctgttatgtgacagtgatttacctgtccatttccaacccaaaagcctgtcagaaagcattctttagagaaaaccactttacatttgttgttaaactcctgatcgctactcttaagaatatacatgtatgtattcataggaacattttttctcaatatttgtatgattcgcttactgttattgtgctgagtgagctcctgtgtgcttcagacaaaaataaatgagactttgtgtttacgtta

SEQ ID NO: 19302 - protein, 454 aa, Homo sapiens; identical to SEQ ID NO: 2368

SEQ ID NO: 19303 - DNA, 2117 bp, Homo sapiens
gtagggagccagcccctgggcgcggcctgcagggtaccggcaaccgcccgggtaagcgggggcaggacaaggccggagcctgtgtccgcccggcagccgcccgcagctgcagagagtcccgctgcgtctccgccgcgtgcgccctcctcgaccagcagacccgcgctgcgctccgccgctgacatgtgtgccgctcagatgccgcccctggcgcacatcttccgagggacgttcgtccactccacctggacctgccccatggaggtgctgcgggatcacctcctcggcgtgagcgacagcggcaaaatagtgtttttagaagaagcatctcaacaggaaaaactggccaaagaatggtgcttcaagccgtgtgaaataagagaactgagccaccatgagttcttcatgcctgggctggttgatacacacatccatgcctctcagtattcctttgctggaagtagcatagacctgccactcttggagtggctgaccaagtacacatttcctgcagaacacagattccagaacatcgactttgcagaagaagtatataccagagttgtcaggagaacactaaagaatggaacaaccacagcttgttactttgcaacaattcacactgactcatctctgctccttgccgacattacagataaatttggacagcgggcatttgtgggcaaagtttgcatggatttgaatgacacttttccagaatacaaggagaccactgaggaatcgatcaaggaaactgagagatttgtgtcagaaatgctccaaaagaactattctagagtgaagcccatagtgacaccacgtttttccctctcctgctctgagactttgatgggtgaactgggcaacattgctaaaacccgtgatttgcacattcagagccatataagtgaaaatcgtgatgaagttgaagctgtgaaaaacttataccccagttataaaaactacacatctgtgtatgataaaaacaatcttttgacaaataagacagtgatggcacacggctgctacctctctgcagaagaactgaacgtattccatgaacgaggagcatccatcgcacactgtcccaattctaatttatcgctcagcagtggatttctaaatgtgctagaagtcctgaaacatgaagtcaagatagggctgggtacagacgtggctggtggctattcatattccatgcttgatgcaatcagaagagcagtgatggtttccaatatccttttaattaataaggtaaatgagaaaagcctcaccctcaaagaagtcttcagactagctactcttggaggaagccaagccctggggctggatggtgagattggaaactttgaagtgggcaaggaatttgatgccatcctgatcaaccccaaagcatccgactctcccattgacctgttttatggggacttttttggtgatatttctgaggctgttatccagaagttcctctatctaggagatgatcgaaatattgaagaggtttatgtgggcggaaagcaggtggttccgttttccagctcagtgtaagaccctcgggcgtctacaaagttctcctgggattagcgtggttctgcatctcccttgtgcccaggaaagaaacaattcacttaccagcctcctcaccccatcctccaccatttccttaatgttccatggtattttcaacggaatacactttgaaagacctgagtgtgaaagactgagagttgaggagttactttgtggatcttgtccaaatttagtgaaatgtggaagtcaaccagaccaatgatggaattaaatgtaaattccaagagggctttcacagtccacagggttcaaatgacttgggtaacagaagttattcttagcttacctgttatgtgacagtgatttacctgtccatttccaacccaaaagcctgtcagaaagcattctttagagaaaaccactttacatttgttgttaaactcctgatcgctactcttaagaatatacatgtatgtattcataggaacattttttctcaatatttgtatgattcgcttactgttattgtgctgagtgagctcctgtgtgcttcagacaaaaataaatgagactttgtgtttacgtta

SEQ ID NO: 19304 - protein, 454 aa, Homo sapiens; identical to SEQ ID NO: 2368

SEQ ID NO: 19305 - DNA, 1851 bp, Homo sapiens
gtagggagccagcccctgggcgcggcctgcagggtaccggcaaccgcccgggtaagcgggggcaggacaaggccggagcctgtgtccgcccggcagccgcccgcagctgcagagagtcccgctgcgtctccgccgcgtgcgccctcctcgaccagcagacccgcgctgcgctccgccgctgacatgtgtgccgctcagatgccgcccctggcgcacatcttccgagggacgttcgtccactccacctggacctgccccatggaggtgctgcgggatcacctcctcggcgtgagcgacagcggcaaaatagtgtttttagaagaagcatctcaacaggaaaaactggccaaagaatggtgcttcaagccgtgtgaaataagagaactgagccaccatgagttcttcatgcctgggctggttgatacacacatccatgcctctcagtattcctttgctggaagtagcatagacctgccactcttggagtggctgaccaagtacacatttcctgcagaacacagattccagaacatcgactttgcagaagaagtatataccagagttgtcaggagaacactaaagaatggaacaaccacagcttgttactttgcaacaattcacactgactcatctctgctccttgccgacattacagataaatttggacagcgggcatttgtgggcaaagtttgcatggatttgaatgacacttttccagaatacaaggagaccactgaggaatcgatcaaggaaactgagagatttgtgtcagaaatgctccaaaagaacagccatataagtgaaaatcgtgatgaagttgaagctgtgaaaaacttataccccagttataaaaactacacatctgtgtatgataaaaacaatcttttgacaaataagacagtgatggcacacggctgctacctctctgcagaagaactgaacgtattccatgaacgaggagcatccatcgcacactgtcccaattctaatttatcgctcagcagtggatttctaaatgtgctagaagtcctgaaacatgaagtcaagatagggctgggtacagacgtggctggtggctattcatattccatgcttgatgcaatcagaagagcagtgatggtttccaatatccttttaattaataaggtaaatgagaaaagcctcaccctcaaagaagtcttcagactagctactcttggaggaagccaagccctggggctggatggtgagattggaaactttgaagtgggcaaggaatttgatgccatcctgatcaaccccaaagcatccgactctcccattgacctgttttatggggacttttttggtgatatttctgaggctgttatccagaagttcctctatctaggagatgatcgaaatattgaagaggtttatgtgggcggaaagcaggtggttccgttttccagctcagtgaaagaaacaattcacttaccagcctcctcaccccatcctccaccatttccttaatgttccatggtattttcaacggaatacactttgaaagttctcagaataactgtagaatgtgctggaaatggaacattctcagataaggaggaactggccagatcaaactaagctgtgttcccatccctcctgaaacaggatcttatggtgctttagcccaggacgtcaagtatcccctaggtatgaaacccagagtggagcatgctttgaaggtccctcagctacatgcagactagactgcatgtagctgactctaactgccctgggaaactatcctgagctttgacagacctgccatgaatcttaagcttttattgtcccttgctgcctatctgtgaggaataaagttgcttcacttac

SEQ ID NO: 19306 - protein, 435 aa, Homo sapiens
MCAAQMPPLAHIFRGTFVHSTWTCPMEVLRDHLLGVSDSGKIVFLEEASQQEKLAKEWCFKPCEIRELSHHEFFMPGLVDTHIHASQYSFAGSSIDLPLLEWLTKYTFPAEHRFQNIDFAEEVYTRVVRRTLKNGTTTACYFATIHTDSSLLLADITDKFGQRAFVGKVCMDLNDTFPEYKETTEESIKETERFVSEMLQKNSHISENRDEVEAVKNLYPSYKNYTSVYDKNNLLTNKTVMAHGCYLSAEELNVFHERGASIAHCPNSNLSLSSGFLNVLEVLKHEVKIGLGTDVAGGYSYSMLDAIRRAVMVSNILLINKVNEKSLTLKEVFRLATLGGSQALGLDGEIGNFEVGKEFDAILINPKASDSPIDLFYGDFFGDISEAVIQKFLYLGDDRNIEEVYVGGKQVVPFSSSVKETIHLPASSPHPPPFP

SEQ ID NO: 19307 - DNA, 620 bp, Homo sapiens
ggaagatagagttgtactgtgaccacggttacctaggagtctgtatttttagtttaattttttattgatctataaagtggtgcaccagagcaggctagtcccaggtagttaactatgcataagcagttgcaaagttcgattttgctgtataatattgagccacatattcttcacagtatattttgctcatacctactgcagacttccacatgacagctgaattgcaaactgtaaatggctgaagacagaagacttattatagattttatatccagcccatgaggattttgactgattccattgagcaagctcaggtgaaaaacggaagggccaagacaaattaagtgacttgtccaggatcacacaaccagttattagctctactgagaaaaaaatacacatctcttgacgcccagatgagtgttttgttttcgttatttagcatttcgagtgcttctgtacaacataccatttgtattctttgaaacaaactcttcggatatttccaggtgtttttcacatttctgacctgagagaaagtatacctaatggtataagtagacttaaaatctatttaaaattctcaaaagtttctaattctgttcttttagtaactactt

SEQ ID NO: 19308 - protein, 32 aa, Homo sapiens
MHKQLQSSILLYNIEPHILHSIFCSYLLQTST

SEQ ID NO: 19309 - DNA, 870 bp, Homo sapiens
agcatcagccaggaggaacttcggatcgatgttcctcccacttccaacacacccacgcccgttcgcaagcagtccaagcgctggtccaacctgtttacctctcagaaagggagcaacccagacaaagagaagaagggcctggagaatcgtgcagacagcatcaggaggggcagagccatccccattaaacagggcatgctattcaagctaagtggcaaagggctgaagaaatggaaaaagaaatatgtcaccccatgtgacaacggcgtgctgacctaccatccaaatttacatgattacatgaagaatattcatggtaaagagattgaccttgggagaaccactgtgaaagtcccagggaagaggccactgctagccacatctgcctgtgcgcgcatctccagctctaaaaccaatggcctaaccaaggacatgagcagtttacacatctcacccaattcagacacagggctggatgactccctatgctccagccccagtatctccagcaccaccagccccaagctccacacgccccactctcctcaggccaacagaaagaagcaccaaaggaagaaaagcacaaacaacttaaaagaccatggcctgtccggcactgctgaaggacaagaagaaaactttatcattgtgcccctcactggccaaatgtggcactttgaagccacgatgtatgaggagcgggatgcctgggttcaagccatggagagccagatcctggccagcctgcagtcatgcgagagcagcaagagcaagtccgggctgaggagccaaagcgaggccatggccctgcagttgatcggaaacatgcgggaactccaactgtgtggactgcgagacccagaatcctaa

SEQ ID NO: 19310 - protein, 224 aa, Homo sapiens [sequence omitted]

SEQ ID NO: 19311 - DNA, 1106 bp, Homo sapiens
tctgcacaggaagggttaggaaactcaggctgctggtccgggcaagcagttgctccaaatgcatggagttctgcctggatgtggagtgaagaggcccccctgcatcaggatctctacacaggaaggatggccgtagctcaggctgctgaaccaggtgcctggataaacaagaaattctgaacactttgagtctggaaattttcagaacacctagacagcatcagtcataactccatacctgtgtgagactggaagactggatagggctgaagttggagaaatgccttttcccagggttgtcagactgtcatttgttctgatgaagaccccgcactccttgagtggtcagccagttttatcccagggcagccacacttcagaggcctctgcatcataagcttcatctatcttcatattcagcaaaacaccagataagtggctaattagcataattaacatcagaaatgggttttcattggtgaatttagtggcttgttaatcagcataatgaatgttagaaatgggttctgaattgtgaaattagaagaaatcaagatagtgaattggttaaagtattatagaaacatacttaacacttgcataaaatgggaaattagaatctatgagatctgttgggatggccccgaaggttacatcattaaatggacttgagtccagtctttgggtgagagaatttcatagtgactgatgcaaatttgtaaaggtaacaaaatctgcctctgaaatattgctatgtttgtctcctgtaaatcattcatgtaacaaatatgtatagtttgttcatctaaaagcacagtgatctgggtctttatcaaacttaaacaatattgtattcactctttcgggtttgcctgtgcattcatgtttatgtatgtctgtatgaacatagattttggtctgaaacttgcttttattacaactggtaacaaagcttgcttacaatgagcaacaaatactcacacacatcaaaatgttcagctttttctataaaagaacttctgagttgtatgaaatcaaattggtttacatcagttcagaacggtttgcaataatgtgctacagagaagtaaacatcttctgttcca

SEQ ID NO: 19312 - protein, 38 aa, Homo sapiens [sequence omitted]

SEQ ID NO: 19313 - DNA, 4629 bp, Homo sapiens
aagacggattctcagacaaggcttgcaaatgccccgcagccatcatttaactgcacccgcagaatagttacggtttgtcacccgaccctcccggatcgcctaatttgtccctagtgagaccccgaggctctgcccgcgcctggcttcttcgtagctggatgcatatcgtgctccgggcagcgcgggcgcagggcacgcgttcgcgcacaccctagcacacatgaacacgcgcaagagctgaaccaagcacggtttccatttcaaaaagggagacagcctctaccgcgattgtagaagagactgtggtgtgaattagggaccgggaggcgtcgaacggaggaacggttcatcttagagactaattttctggagtttctgcccctgctctgcgtcagccctcacgtcacttcgccagcagtagcagaggcggcggcggcggctcccggaattgggttggagcaggagcctcgctggctgcttcgctcgcgctctacgcgctcagtccccggcggtagcaggagcctggacccaggcgccgccggcgggcgtgaggcgccggagcccggcctcgaggtgcataccggacccccattcgcatctaacaaggaatctgcgccccagagagtcccgggagcgccgccggtcggtgcccggcgcgccgggccatgcagcgacggccgccgcggagctccgagcagcggtagcgcccccctgtaaagcggttcgctatgccggggccactgtgaaccctgccgcctgccggaacactcttcgctccggaccagctcagcctctgataagctggactcggcacgcccgcaacaagcaccgaggagttaagagagccgcaagcgcagggaaggcctccccgcacgggtgggggaaagcggccggtgcagcgcggggacaggcactcgggctggcactggctgctagggatgtcgtcctggataaggtggcatggacccgccatggcgcggctctggggcttctgctggctggttgtgggcttctggagggccgctttcgcctgtcccacgtcctgcaaatgcagtgcctctcggatctggtgcagcgacccttctcctggcatcgtggcatttccgagattggagcctaacagtgtagatcctgagaacatcaccgaaattttcatcgcaaaccagaaaaggttagaaatcatcaacgaagatgatgttgaagcttatgtgggactgagaaatctgacaattgtggattctggattaaaatttgtggctcataaagcatttctgaaaaacagcaacctgcagcacatcaattttacccgaaacaaactgacgagtttgtctaggaaacatttccgtcaccttgacttgtctgaactgatcctggtgggcaatccatttacatgctcctgtgacattatgtggatcaagactctccaagaggctaaatccagtccagacactcaggatttgtactgcctgaatgaaagcagcaagaatattcccctggcaaacctgcagatacccaattgtggtttgccatctgcaaatctggccgcacctaacctcactgtggaggaaggaaagtctatcacattatcctgtagtgtggcaggtgatccggttcctaatatgtattgggatgttggtaacctggtttccaaacatatgaatgaaacaagccacacacagggctccttaaggataactaacatttcatccgatgacagtgggaagcagatctcttgtgtggcggaaaatcttgtaggagaagatcaagattctgtcaacctcactgtgcattttgcaccaactatcacatttctcgaatctccaacctcagaccaccactggtgcattccattcactgtgaaaggcaaccccaaaccagcgcttcagtggttctataacggggcaatattgaatgagtccaaatacatctgtactaaaatacatgttaccaatcacacggagtaccacggctgcctccagctggataatcccactcacatgaacaatggggactacactctaatagccaagaatgagtatgggaaggatgagaaacagatttctgctcacttcatgggctggcctggaattgacgatggtgcaaacccaaattatcctgatgtaatttatgaagattatggaactgcagcgaatgacatcggggacaccacgaacagaagtaatgaaatcccttccacagacgtcactgataaaaccggtcgggaacatctctcggtctatgctgtggtggtgattgcgtctgtggtgggattttgccttttggtaatgctgtttctgcttaagttggcaagacactccaagtttggcatgaaagatttctcatggtttggatttgggaaagtaaaatcaagacaaggtgttggcccagcctccgttatcagcaatgatgatgactctgccagcccactccatcacatctccaatgggagtaacactccatcttcttcggaaggtggcccagatgctgtcattattggaatgaccaagatccctgtcattgaaaatccccagtactttggcatcaccaacagtcagctcaagccagacacatttgttcagcacatcaagcgacataacattgttctgaaaagggagctaggcgaaggagcctttggaaaagtgttcctagctgaatgctataacctctgtcctgagcaggacaagatcttggtggcagtgaagaccctgaaggatgccagtgacaatgcacgcaaggacttccaccgtgaggccgagctcctgaccaacctccagcatgagcacatcgtcaagttctatggcgtctgcgtggagggcgaccccctcatcatggtctttgagtacatgaagcatggggacctcaacaagttcctcagggcacacggccctgatgccgtgctgatggctgagggcaacccgcccacggaactgacgcagtcgcagatgctgcatatagcccagcagatcgccgcgggcatggtctacctggcgtcccagcacttcgtgcaccgcgatttggccaccaggaactgcctggtcggggagaacttgctggtgaaaatcggggactttgggatgtcccgggacgtgtacagcactgactactacagggtcggtggccacacaatgctgcccattcgctggatgcctccagagagcatcatgtacaggaaattcacgacggaaagcgacgtctggagcctgggggtcgtgttgtgggagattttcacctatggcaaacagccctggtaccagctgtcaaacaatgaggtgatagagtgtatcactcagggccgagtcctgcagcgaccccgcacgtgcccccaggaggtgtatgagctgatgctggggtgctggcagcgagagccccacatgaggaagaacatcaagggcatccataccctccttcagaacttggccaaggcatctccggtctacctggacattctaggctagggcccttttccccagaccgatccttcccaacgtactcctcagacgggctgagaggatgaacatcttttaactgccgctggaggccaccaagctgctctccttcactctgacagtattaacatcaaagactccgagaagctctcgagggaagcagtgtgtacttcttcatccatagacacagtattgacttctttttggcattatctctttctctctttccatctcccttggttgttcctttttctttttttaaattttctttttcttttttttttcgtcttccctgcttcacgattcttaccctttcttttgaatcaatctggcttctgcattactattaactctgcatagacaaaggccttaacaaacgtaatttgttatatcagcagacactccagtttgcccaccacaactaacaatgccttgttgtattcctgcctttgatgtggatgaaaaaaagggaaaacaaatatttcacttaaactttgtcacttctgctgtacagatatcgagagtttctatggattcacttctatttatttattattattactgttcttattgtttttggatggcttaagcctgtgtataaaaaagaaaacttgtgttcaatctgtgaagcctttatctatgggagattaaaaccagagagaaagaagatttattatgaaccgcaatatgggaggaacaaagacaaccactgggatcagctggtgtcagtccctacttaggaaatactcagcaactgttagctgggaagaatgtattcggcaccttcccctgaggacctttctgaggagtaaaaagactactggcctctgtgccatggatgattcttttcccatcaccagaaatgatagcgtgcagtagagagcaaagatggcttccgtgagacacaagatggcgcatagtgtgctcggacacagttttgtcttcgtaggttgtgatgatagcactggtttgtttctcaagcgctatccacagaacctttgtcaacttcagttgaaaagaggtggattcatgtccagagctcatttcggggtcaggtgggaaagccaagaacttggaaaagataagacaagctataaattcggaggcaagtttcttttacaatgaacttttcagatctcacttccctccgacccctaacttccatgcccacccgtccttttaa

SEQ ID NO: 19314 - protein, 838 aa, Homo sapiens; identical to SEQ ID NO: 2378

SEQ ID NO: 19315 - DNA, 425 bp, Homo sapiens
gggcatccggatggcgactgcgggaaatcgagttctcatgctggggcgaaaggtgtgtctgcaggagccaaatccaaatgagcagtccaggtacttcagagttttaacctgagcgaaacaggaatgtctcgggtcttaacaggaccgtccgcccgctcggaagaggcgaatctcccacggcagacgtctgggtgtgcgaatgccagttgagcggggcctcgaggacgcgtcacacacagcgaggatttgaggagggaagcgccttccagagcttcagagaagaggcagaagtgtgcaaacaggagcaggtccaagatttgcatggccagaagcaattcttgatcctcttggctagattcgaagatttggccacctccagacgctaccacactctgggacagtgggagatttggaacagctttgag

SEQ ID NO: 19316 - protein, 33 aa, Homo sapiens
MATAGNRVLMLGRKVCLQEPNPNEQSRYFRVLT

SEQ ID NO: 19317 - DNA, 1441 bp, Homo sapiens
gagcttcagagaagaggcagaagtgtgcaaacaggagcaggtccaagatttgcatggccagaagcaattcttgatcctcttggctagattcgaagatttggccacctccagacgctaccacactctgggacagtgggagatttggaacagctttgagaagagcaaggtgagctgggacttcctggagcaggctgcccaggaaaagccattccatggcagaacttgcgaggtgtgcaagtattttcagtgagggtactgtatttatggagaccgctgcagatatgaacatagcaagccattgaaacaggaagaagcagctgctacagagctaactacaatatcatcccttgctgcttcctcaagtctcttgtcgttagtcggaccacttgttgaaatgaatacaggtgaagctgagtcaagaaattcaaactttgcaattgtaggagcaggttcagaggactgggtcctgcatcccatggctgctgcccagagatcacagcatataaaattgtgcattgaggcccatgagaaggacatggagctctcacttgctgtgcagcgcagcaaggacgtggtgtatgggatctgcatggaggtggtctatgagaaagcaaaccccagtgagtgctgcttcgggattctctccaactgcaaccatgcctactgtctcaagtgcattcgcaagtggagcagtgctaagcaatttcagagcaagattataaagtcctgcctagattgccagatcacatctaactttgtcattccaagtgagtcctgggtggagaaagaagagaagcagaaactcattcagaaatacaaggaggcattgagcaacaaggcttgcaggtattttgatgaaggacgtgggagctgcccatttggaaggaattgtttttacaagcatgcgtaccctgatggccttacagagaagccacagagacagaaagtgggaacatcaagcagaaactgggtccaatgaaggaaccacttctgagaactcactgaggaaagagatagcagcaacccttttgacaatgatgaagaggttgtcacctcttgaggtgggcgagatgttgcttatgcttttggctgcaggtggggatgatgaactggcagactctgaagatgagtgggacttgtttcatgatgagctggaagatttttatgatttggatctatagcaaccttgtgtggcgtgtgaactggtctgctgaccccagacagcagctgtcccctgtgctggtgtggcagtgcctgtgttctctcctaggtaggcctatcaactccaggtgttgtaaaaatttttacccagggcctgtcttctcaacccttcacctttccccgaggagtgtgttattttccctgttgaaaacagttaaaacttaaagttagttttttgtaacacaattaaaaaaaaaatcaggtgatctcaaacagcctc

SEQ ID NO: 19318 - protein, 194 aa, Homo sapiens
MNTGEAESRNSNFAIVGAGSEDWVLHPMAAAQRSQHIKLCIEAHEKDMELSLAVQRSKDVVYGICMEVVYEKANPSECCFGILSNCNHAYCLKCIRKWSSAKQFQSKIIKSCLDCQITSNFVIPSESWVEKEEKQKLIQKYKEALSNKACRYFDEGRGSCPFGRNCFYKHAYPDGLTEKPQRQKVGTSSRNWVQ

SEQ ID NO: 19319 - DNA, 503 bp, Homo sapiens
agcttcagagaagaggcagaagtgtgcaaacaggagcaggtccaagatttgcatggccagaagcaattcttgatcctcttggctagattcgaagatttggccacctccagacgctaccacactctgggacagtgggagatttggaacagctttgagaagagcaaggaaaagaaaatttggacatagactcatacagaggaaagatgatatggagtctagctctgtcgcccaggctggagtgcagtagcacgatctcagctcactgcagcctccgcctcccagtagagacagggtttcaccacgttggccaggctggtctcgaactcctgacttcaagtgatctgctctccttggcctcccaaagtgctgggatcacaggcgtgagccactgcacccggcccctgttgacatcttgatctcagacttcacccggcccccgatgacatcttgatctcagacttctggtctccagaatggtgggaaaataaattgctgtttaatct

SEQ ID NO: 19320 - protein, 70 aa, Homo sapiens
MIWSLALSPRLECSSTISAHCSLRLPVETGFHHVGQAGLELLTSSDLLSLASQSAGITGVSHCTRPLLTS
